United States Patent Application Publication US 2011/0183924 A1 - sequence listing, part 27

SEQ ID NO: 63859 - DNA, 4208 bp, Homo sapiens
cagggagtctccatcccatcgtcatgagatcagtggagagttcaggtggacattcagggacccaagatcttggtttcctggacccaaatatttctgtgactaacttgctggatgtttaccgagtttgtgttttagactaatgctctctccccgttattccctacagtctaatcagcctgccgtgtaagtctgtgtgaaaactgtaacaaaggtgtgaaatgattcatagtacgcataagccatgccttcagtctgaccgcaccctaagctagactctgcaccgtctacagcacgccaccctcctcgtcccctctcatcacccacctcgttccatgctgtgtgtgcgcattcccgtcgactgagccgtcctgtttactattgtgttttacaggccgagacagcggctaacaggatatgtaaggttcttgctgtgaatcaagagaatgagaggctgatggaagaatatgagaggctagcgagtgagcttttggaatggattcgtcgcacgatcccctggctggagaaccggactcccgagaagaccatgcaagccatgcagaagaagctggaggacttccgggattaccgccggaagcacaagccacccaaggtgcaggagaaatgccagctggagatcaacttcaacacgctgcagaccaagctgcggatcagcaaccgtcctgccttcatgccctccgagggcaagatggtgtcggatattgctggtgcctggcagaggctggagcaggctgagaagggttacgaggagtggttgctcaatgagattcggagactggagcgcttggaacacctggctgagaagttcaggcagaaggcctcaacgcacgagacttgggcttatggcaaagagcagatcttgctgcagaaggattacgagtcggcgtcgctgacagaggtgcgggctctgctgcggaagcacgaggcgttcgagagcgacctggcagcgcaccaggaccgcgtggagcagatcgcagccatcgcgcaggagctcaatgaactggactatcacgacgctgtgaatgtcaatgatcggtgccagaaaatttgtgaccagtgggaccgactgggaacgcttactcagaagaggagagaagccctagagagaatggagaaattgctagaaaccattgatcagcttcacctggagtttgccaagagggctgctcctttcaacaattggatggagggcgctatggaggatctgcaagatatgttcattgtccacagcattgaggagatccagagtctgatcactgcgcatgagcagttcaaggccacgctgcccgaggcggacggagagcggcagtccatcatggccatccagaacgaggtggagaaggtgattcagagctacaacatcagaatcagctcaagcaacccgtacagcactgtcaccatggatgagctccggaccaagtgggacaaggtgaagcaactcgtgcccatccgcgatcaatccctgcaggaggagctggctcgccagcatgctaacgagcgtctgaggcgccagtttgctgcccaagccaatgccattgggccctggatccagaacaagatggaggagattgcccggagctccatccagatcacaggagccctggaagaccagatgaaccagctgaagcagtatgagcacaacatcatcaactataagaacaacatcgacaagctggagggagaccatcagctcatccaggaggcccttgtctttgacaacaagcacacgaactacacgatggagcacattcgtgttggatgggagctgctgctgacaaccatcgccagaaccatcaatgaggtggagactcagatcctgacgagagatgcgaagggcatcacccaggagcagatgaatgagttcagagcctccttcaaccactttgacaggaggaagaatggcctgatggatcatgaggatttcagagcctgcctgatttccatgggttatgacctgggtgaagccgaatttgcccgcattatgaccctggtagatcccaacgggcaaggcaccgtcaccttccaatccttcatcgacttcatgactagagagacggctgacaccgacactgccgagcaggtcatcgcctccttccggatcctggcttctgataagccatacatcctggcggaggagctgcgtcgggagctgcccccggatcaggcccagtactgcatcaagaggatgcccgcctactcgggcccaggcagtgtgcctggtgcactggattacgctgcgttctcttccgcactctacggggagagcgatctgtgatgctgagcttctgtaatcactcatcccatcagaatgcaataaaagcggaagtcacagtttgtttcctggaaactttgacaagctttattaagttgagagagagagagggggaaaaaaaaagcctttcgtagttcagtaattgccagcaatataacacggctaaaatgaagtttttacagtatatgacatagtgcgcttcataaataggtttatttctgagtttttagcaaaatgtaatgaaatatcaggttgatttctttgattaaacagaacaaattacttgagtaataggaaattaggaggatctagggacagaaggaaagtgaaaaatgtgaaaatacaaaatacccaagatttaagaccggggggaaaaaaccacaaattggtaaataaaggtttgctatttgtaaaaaatttcatttatctctaatatgcttatgtgattggccctaggggagtatatttgggattctaatgttttattttcatgcttatccaaagattactattgtatcttcaaatgaacttaatattgtgagatggaactgccggggattaaaaagactacccaaaagatttttggcacttacaatttttaaaatagtttatgtcatctcttcattatttagggctggatggtcaactcagtcagtgattttttgatgcttctcttatcctccagaatagagacctaaggacacgtggaagtcagtttaattgccagagagaaggatgcaatcactaggtgaaatgaggtttttaggattatttattgattccaggttcccatgctttttgttagagcttattagtacaggttctcaagagatgaccacataaaagtgctctgtttataaataagcaggtttctgtagtactgactggttcatcacaaggcaagtcagaaaccagtatccttctagctctccagtcaggacttccttatgcctctagttttatgaccggttaaggagaagccagagttagagtaggagaggactaattctcagcagcagtggaggtgagttctttcttttgcggaagctttacatatgttttgtgtagtaggaataactagatattttagctagtgtgcggtgtgtgttcacccctgggattggacagtgtatcctaacaagtcccatgtctggttctgtgtctaaaggcctgctccatgacacaggatgctacatgcactcctgctagcacatcttgatctgttgaatgttcattctttctttttgctcatactgctgtaggctataattcccccctgtttttccatcttgttgacagcttgtagagaataaagcaggaattctttttatatctgagtccttaatgatcaggaaatggattacaaacaaacaaaaacagttgcaaacagcaattaaagcattactagagaagcagtaacatgtctgttacctacagtctgtttgctcagatttttatagatttccaccaacagctggaaatgtaatatttccattccaagctgtctgacagcttgactcttcttcctacactgggccatttagaaccttcaacctttatgaatttcacttaatttgcttcattattaagtaattggtagtttccagattcctgaaatatttgaatccttgagtttaatgccaaacacttttggggtggtttagatgaactctgactctattttatttcaagtaggtgctatatcccggccataaacccctatagaaagcagaagtgggtcttgaggaataggggcgggggtaagaggggggggccccctaccacatttatttttcacaattgacaagggcggtctctcggtaaggaagaggagctggaaaaaggttccccggttttgcgcggcgaagaagtttttaaaaaaaagcggccaaagcgggggggggtaacggacggcgcg

SEQ ID NO: 63860 - DNA, 2535 bp, Homo sapiens
cagctgctttccccaaggtggtccccggatcttggcctcgtgccggcacgaggccaagatcctgacgagagatgcgaagggcatcacccaggagcagatgaatgagttcagagcctccttcaaccactttgacaggaggaagaatggcctgatggatcatgaggatttcagagcctgcctgatttccatgggttatgacctgggtgaagccgaatttgcccgcattatgaccctggtagatcccaacgggcaaggcaccgtcaccttccaatccttcatcgacttcatgactagagagacggctgacaccgacactgccgagcaggtcatcgcctccttccggatcctggcttctgataagccatacatcctggcggaggagctgcgtcgggagctgcccccggatcaggcccagtactgcatcaagaggatgcccgcctactcgggcccaggcagtgtgcctggtgcactggattacgctgcgttctcttccgcactctacggggagagcgatctgtgatgctgagcttctgtaatcactcatcccatcagaatgcaataaaagcggaagtcacagtttgtttcctggaaactttgacaagctttattaagttgagagagagagagggggaaaaaaaaagcctttcgtagttcagtaattgccagcaatataacacggctaaaatgaagtttttacagtatatgacatagtgcgcttcataaataggtttatttctgagtttttagcaaaatgtaatgaaatatcaggttgatttctttgattaaacagaacaaattacttgagtaataggaaattaggaggatctagggacagaaggaaagtgaaaaatgtgaaaatacaaaatacccaagatttaagaccggggggaaaaaaccacaaattggtaaataaaggtttgctatttgtaaaaaatttcatttatctctaatatgcttatgtgattggccctaggggagtatatttgggattctaatgttttattttcatgcttatccaaagattactattgtatcttcaaatgaacttaatattgtgagatggaactgccggggattaaaaagactacccaaaagatttttggcacttacaatttttaaaatagtttatgtcatctcttcattatttagggctggatggtcaactcagtcagtgattttttgatgcttctcttatcctccagaatagagacctaaggacacgtggaagtcagtttaattgccagagagaaggatgcaatcactaggtgaaatgaggtttttaggattatttattgattccaggttcccatgctttttgttagagcttattagtacaggttctcaagagatgaccacataaaagtgctctgtttataaataagcaggtttctgtagtactgactggttcatcacaaggcaagtcagaaaccagtatccttctagctctccagtcaggacttccttatgcctctagttttatgaccggttaaggagaagccagagttagagtaggagaggactaattctcagcagcagtggaggtgagttctttcttttgcggaagctttacatatgttttgtgtagtaggaataactagatattttagctagtgtgcggtgtgtgttcacccctgggattggacagtgtatcctaacaagtcccatgtctggttctgtgtctaaaggcctgctccatgacacaggatgctacatgcactcctgctagcacatcttgatctgttgaatgttcattctttctttttgctcatactgctgtaggctataattcccccctgtttttccatcttgttgacagcttgtagagaataaagcaggaattctttttatatctgagtccttaatgatcaggaaatggattacaaacaaacaaaaacagttgcaaacagcaattaaagcattactagagaagcagtaacatgtctgttacctacagtctgtttgctcagatttttatagatttccaccaacagctggaaatgtaatatttccattccaagctgtctgacagcttgactcttcttcctacactgggccatttagaaccttcaacctttatgaatttcacttaatttgcttcattattaagtaattggtagtttccagattcctgaaatatttgaatccttgagtttaatgccaaacacttttggggtggtttagatgaactctgactctattttatttcaagtaggtgctatatcccggccataaacccctatagaaaagccagaaagttgtgcttcctttgaggctattagggggctctgtggtgttttaggatgggtgtgggtaactcatctacctaaacttttaatttctttacaacattcagcaagagagggggtcagtagtctctatctgctaataaatgaagaaaggaagtaaactctgaaaaataataaacatgtttatactctcattttaggtattatttttatttctgaagctggatgctcaaaaattaaaacgtttataagtttctaaattaaacttaatttataaaagaaaaaagaa

SEQ ID NO: 63861 - DNA, 2864 bp, Homo sapiens
cagggagtctccatcccatcgtcatgagatcagtggagagttcaggtggacattcagggacccaagatcttggtttcctggacccaaatatttctgtgactaacttgctggatgtttaccgagtttgtgttttagactaatgctctctccccgttattccctacagtctaatcagcctgccgtgtaagtctgtgtgaaaactgtaacaaaggtgtgaaatgattcatagtacgcataagccatgccttcagtctgaccgcaccctaagctagactctgcaccgtctacagcacgccaccctcctcgtcccctctcatcacccacctcgttccatgctgtgtgtgcgcattcccgtcgactgagccgtcctgtttactattgtgttttacaggccgagacagcggctaacaggatatgtaaggttcttgctgtgaatcaagagaatgagaggctgatggaagaatatgagaggctagcgagtgagcttttggaatggattcgtcgcacgatcccctggctggagaaccggactcccgagaagaccatgcaagccatgcagaagaagctggaggacttccgggattaccgccggaagcacaagccacccaaggtgcaggagaaatgccagctggagatcaacttcaacacgctgcagaccaagctgcggatcagcaaccgtcctgccttcatgccctccgagggcaagatggtgtcggatattgctggtgcctggcagaggctggagcaggctgagaagggttacgaggagtggttgctcaatgagattcggagactggagcgcttggaacacctggctgagaagttcaggcagaaggcctcaacgcacgagacttgggcttatggcaaagagcagatcttgctgcagaaggattacgagtcggcgtcgctgacagaggtgcgggctctgctgcggaagcacgaggcgttcgagagcgacctggcagcgcaccaggaccgcgtggagcagatcgcagccatcgcgcaggagctcaatgaactggactatcacgacgctgtgaatgtcaatgatcggtgccagaaaatttgtgaccagtgggaccgactgggaacgcttactcagaagaggagagaagccctagagagaatggagaaattgctagaaaccattgatcagcttcacctggagtttgccaagagggctgctcctttcaacaattggatggagggcgctatggaggatctgcaagatatgttcattgtccacagcattgaggagatccagagtctgatcactgcgcatgagcagttcaaggccacgctgcccgaggcggacggagagcggcagtccatcatggccatccagaacgaggtggagaaggtgattcagagctacaacatcagaatcagctcaagcaacccgtacagcactgtcaccatggatgagctccggaccaagtgggacaaggtgaagcaactcgtgcccatccgcgatcaatccctgcaggaggagctggctcgccagcatgctaacgagcgtctgaggcgccagtttgctgcccaagccaatgccattgggccctggatccagaacaagatggaggagattgcccggagctccatccagatcacaggagccctggaagaccagatgaaccagctgaagcagtatgagcacaacatcatcaactataagaacaacatcgacaagctggagggagaccatcagctcatccaggaggcccttgtctttgacaacaagcacacgaactacacgatggagcacattcgtgttggatgggagctgctgctgacaaccatcgccagaaccatcaatgaggtggagactcagatcctgacgagagatgcgaagggcatcacccaggagcagatgaatgagttcagagcctccttcaaccactttgacaggaggaagaatggcctgatggatcatgaggatttcagagcctgcctgatttccatgggttatgacctgggtgaagccgaatttgcccgcattatgaccctggtagatcccaacgggcaaggcaccgtcaccttccaatccttcatcgacttcatgactagagagacggctgacaccgacactgccgagcaggtcatcgcctccttccggatcctggcttctgataagccatacatcctggcggaggagctgcgtcgggagctgcccccggatcaggcccagtactgcatcaagaggatgcccgcctactcgggcccaggcagtgtgcctggtgcactggattacgctgcgttctcttccgcactctacggggagagcgatctgtgatgctgagcttctgtaatcactcatcccatcagaatgcaataaaagcggaagtcacagtttgtttcctggaaactttgacaagctttattaagttgagagagagagagggggaaaaaaaaagcctttcgtagttcagtaattgccagcaatataacacggctaaaatgaagtttttacagtatatgacatagtgcgcttcataaataggtttatttctgagtttttagcaaaatgtaatgaaatatcaggttgatttctttgattaaacagaacaaattacttgagtaataggaaattaggaggatctagggacagaaggaaagtgaaaaatgtgaaaatacaaaatacccaagatttaagaccggggggaaaaaaccacaaattggtaaataaaggtttgctatttgtaaaaaatttcatttatctctaatatgcttatgtgattggccctaggggagtatatttgggattctaatgttttattttcatgcttatccaaagattactattgtatcttcaaatgaacttaatattgtgagatggaactgccggggattaaaaagactaccca

SEQ ID NO: 63862 - DNA, 2346 bp, Homo sapiens
cagggagtctccatcccatcgtcatgagatcagtggagagttcaggtggacattcagggacccaagatcttggtttcctggacccaaatatttctgtgactaacttgctggatgtttaccgagtttgtgttttagactaatgctctctccccgttattccctacagtctaatcagcctgccgtgtaagtctgtgtgaaaactgtaacaaaggtgtgaaatgattcatagtacgcataagccatgccttcagtctgaccgcaccctaagctagactctgcaccgtctacagcacgccaccctcctcgtcccctctcatcacccacctcgttccatgctgtgtgtgcgcattcccgtcgactgagccgtcctgtttactattgtgttttacaggccgagacagcggctaacaggatatgtaaggttcttgctgtgaatcaagagaatgagaggctgatggaagaatatgagaggctagcgagtgagcttttggaatggattcgtcgcacgatcccctggctggagaaccggactcccgagaagaccatgcaagccatgcagaagaagctggaggacttccgggattaccgccggaagcacaagccacccaaggtgcaggagaaatgccagctggagatcaacttcaacacgctgcagaccaagctgcggatcagcaaccgtcctgccttcatgccctccgagggcaagatggtgtcggatattgctggtgcctggcagaggctggagcaggctgagaagggttacgaggagtggttgctcaatgagattcggagactggagcgcttggaacacctggctgagaagttcaggcagaaggcctcaacgcacgagacttgggcttatggcaaagagcagatcttgctgcagaaggattacgagtcggcgtcgctgacagaggtgcgggctctgctgcggaagcacgaggcgttcgagagcgacctggcagcgcaccaggaccgcgtggagcagatcgcagccatcgcgcaggagctcaatgaactggactatcacgacgctgtgaatgtcaatgatcggtgccagaaaatttgtgaccagtgggaccgactgggaacgcttactcagaagaggagagaagccctagagagaatggagaaattgctagaaaccattgatcagcttcacctggagtttgccaagagggctgctcctttcaacaattggatggagggcgctatggaggatctgcaagatatgttcattgtccacagcattgaggagatccagagtctgatcactgcgcatgagcagttcaaggccacgctgcccgaggcggacggagagcggcagtccatcatggccatccagaacgaggtggagaaggtgattcagagctacaacatcagaatcagctcaagcaacccgtacagcactgtcaccatggatgagctccggaccaagtgggacaaggtgaagcaactcgtgcccatccgcgatcaatccctgcaggaggagctggctcgccagcatgctaacgagcgtctgaggcgccagtttgctgcccaagccaatgccattgggccctggatccagaacaagatggaggagattgcccggagctccatccagatcacaggagccctggaagaccagatgaaccagctgaagcagtatgagcacaacatcatcaactataagaacaacatcgacaagctggagggagaccatcagctcatccaggaggcccttgtctttgacaacaagcacacgaactacacgatggagcacattcgtgttggatgggagctgctgctgacaaccatcgccagaaccatcaatgaggtggagactcagatcctgacgagagatgcgaagggcatcacccaggagcagatgaatgagttcagagcctccttcaaccactttgacaggaggaagaatggcctgatggatcatgaggatttcagagcctgcctgatttccatgggttatgacctgggtgaagccgaatttgcccgcattatgaccctggtagatcccaacgggcaaggcaccgtcaccttccaatccttcatcgacttcatgactagagagacggctgacaccgacactgccgagcaggtcatcgcctccttccggatcctggcttctgataagccatacatcctggcggaggagctgcgtcgggagctgcccccggatcaggcccagtactgcatcaagaggatgcccgcctactcgggcccaggcagtgtgcctggtgcactggattacgctgcgttctcttccgcactctacggggagagcgatctgtgatgctgagcttctgtaatcactcatcccatcagaatgcaataaaagcggaagtc

SEQ ID NO: 63863 - DNA, 1164 bp, Homo sapiens
ttaaaaaacatgctggctcaaaccatcctgttcacgaatcatttcgatacaatatggccttcctgaggttcgggaccacgggcccatgaaacacagaaatctgttttatgaccggttaaggagaagccagagttagagtaggagaggactaattctcagcagcagtggaggtgagttctttcttttgcggaagctttacatatgttttgtgtagtaggaataactagatattttagctagtgtgcggtgtgtgttcacccctgggattggacagtgtatcctaacaagtcccatgtctggttctgtgtctaaaggcctgctccatgacacaggatgctacatgcactcctgctagcacatcttgatctgttgaatgttcattctttctttttgctcatactgctgtaggctataattcccccctgtttttccatcttgttgacagcttgtagagaataaagcaggaattctttttatatctgagtccttaatgatcaggaaatggattacaaacaaacaaaaacagttgcaaacagcaattaaagcattactagagaagcagtaacatgtctgttacctacagtctgtttgctcagatttttatagatttccaccaacagctggaaatgtaatatttccattccaagctgtctgacagcttgactcttcttcctacactgggccatttagaaccttcaacctttatgaatttcacttaatttgcttcattattaagtaattggtagtttccagattcctgaaatatttgaatccttgagtttaatgccaaacacttttggggtggtttagatgaactctgactctattttatttcaagtaggtgctatatcccggccataaacccctatagaaaagccagaaagttgtgcttcctttgaggctattagggggctctgtggtgttttaggatgggtgtgggtaactcatctacctaaacttttaatttctttacaacattcagcaagagagggggtcagtagtctctatctgctaataaatgaagaaaggaagtaaactctgaaaaataataaacatgtttatactctcattttaggtattatttttatttctgaagctggatgctcaaaaattaaaacgtttataagtttctaaattaaacttaatttataaaagaaaaaagaa

SEQ ID NO: 63864 - DNA, 3996 bp, Homo sapiens
gaacacccctaaacccgatgaaagagccatcatgacgtacgtctcttgcttctaccacgcttttgcgggcgcggagcaggccgagacagcggctaacaggatatgtaaggttcttgctgtgaatcaagagaatgagaggctgatggaagaatatgagaggctagcgagtgagcttttggaatggattcgtcgcacgatcccctggctggagaaccggactcccgagaagaccatgcaagccatgcagaagaagctggaggacttccgggattaccgccggaagcacaagccacccaaggtgcaggagaaatgccagctggagatcaacttcaacacgctgcagaccaagctgcggatcagcaaccgtcctgccttcatgccctccgagggcaagatggtgtcggatattgctggtgcctggcagaggctggagcaggctgagaagggttacgaggagtggttgctcaatgagattcggagactggagcgcttggaacacctggctgagaagttcaggcagaaggcctcaacgcacgagacttgggcttatggcaaagagcagatcttgctgcagaaggattacgagtcggcgtcgctgacagaggtgcgggctctgctgcggaagcacgaggcgttcgagagcgacctggcagcgcaccaggaccgcgtggagcagatcgcagccatcgcgcaggagctcaatgaactggactatcacgacgctgtgaatgtcaatgatcggtgccagaaaatttgtgaccagtgggaccgactgggaacgcttactcagaagaggagagaagccctagagagaatggagaaattgctagaaaccattgatcagcttcacctggagtttgccaagagggctgctcctttcaacaattggatggagggcgctatggaggatctgcaagatatgttcattgtccacagcattgaggagatccagagtctgatcactgcgcatgagcagttcaaggccacgctgcccgaggcggacggagagcggcagtccatcatggccatccagaacgaggtggagaaggtgattcagagctacaacatcagaatcagctcaagcaacccgtacagcactgtcaccatggatgagctccggaccaagtgggacaaggtgaagcaactcgtgcccatccgcgatcaatccctgcaggaggagctggctcgccagcatgctaacgagcgtctgaggcgccagtttgctgcccaagccaatgccattgggccctggatccagaacaagatggaggagattgcccggagctccatccagatcacaggagccctggaagaccagatgaaccagctgaagcagtatgagcacaacatcatcaactataagaacaacatcgacaagctggagggagaccatcagctcatccaggaggcccttgtctttgacaacaagcacacgaactacacgatggagcacattcgtgttggatgggagctgctgctgacaaccatcgccagaaccatcaatgaggtggagactcagatcctgacgagagatgcgaagggcatcacccaggagcagatgaatgagttcagagcctccttcaaccactttgacaggaggaagaatggcctgatggatcatgaggatttcagagcctgcctgatttccatgggttatgacctgggtgaagccgaatttgcccgcattatgaccctggtagatcccaacgggcaaggcaccgtcaccttccaatccttcatcgacttcatgactagagagacggctgacaccgacactgccgagcaggtcatcgcctccttccggatcctggcttctgataagccatacatcctggcggaggagctgcgtcgggagctgcccccggatcaggcccagtactgcatcaagaggatgcccgcctactcgggcccaggcagtgtgcctggtgcactggattacgctgcgttctcttccgcactctacggggagagcgatctgtgatgctgagcttctgtaatcactcatcccatcagaatgcaataaaagcggaagtcacagtttgtttcctggaaactttgacaagctttattaagttgagagagagagagggggaaaaaaaaagcctttcgtagttcagtaattgccagcaatataacacggctaaaatgaagtttttacagtatatgacatagtgcgcttcataaataggtttatttctgagtttttagcaaaatgtaatgaaatatcaggttgatttctttgattaaacagaacaaattacttgagtaataggaaattaggaggatctagggacagaaggaaagtgaaaaatgtgaaaatacaaaatacccaagatttaagaccggggggaaaaaaccacaaattggtaaataaaggtttgctatttgtaaaaaatttcatttatctctaatatgcttatgtgattggccctaggggagtatatttgggattctaatgttttattttcatgcttatccaaagattactattgtatcttcaaatgaacttaatattgtgagatggaactgccggggattaaaaagactacccaaaagatttttggcacttacaatttttaaaatagtttatgtcatctcttcattatttagggctggatggtcaactcagtcagtgattttttgatgcttctcttatcctccagaatagagacctaaggacacgtggaagtcagtttaattgccagagagaaggatgcaatcactaggtgaaatgaggtttttaggattatttattgattccaggttcccatgctttttgttagagcttattagtacaggttctcaagagatgaccacataaaagtgctctgtttataaataagcaggtttctgtagtactgactggttcatcacaaggcaagtcagaaaccagtatccttctagctctccagtcaggacttccttatgcctctagttttatgaccggttaaggagaagccagagttagagtaggagaggactaattctcagcagcagtggaggtgagttctttcttttgcggaagctttacatatgttttgtgtagtaggaataactagatattttagctagtgtgcggtgtgtgttcacccctgggattggacagtgtatcctaacaagtcccatgtctggttctgtgtctaaaggcctgctccatgacacaggatgctacatgcactcctgctagcacatcttgatctgttgaatgttcattctttctttttgctcatactgctgtaggctataattcccccctgtttttccatcttgttgacagcttgtagagaataaagcaggaattctttttatatctgagtccttaatgatcaggaaatggattacaaacaaacaaaaacagttgcaaacagcaattaaagcattactagagaagcagtaacatgtctgttacctacagtctgtttgctcagatttttatagatttccaccaacagctggaaatgtaatatttccattccaagctgtctgacagcttgactcttcttcctacactgggccatttagaaccttcaacctttatgaatttcacttaatttgcttcattattaagtaattggtagtttccagattcctgaaatatttgaatccttgagtttaatgccaaacacttttggggtggtttagatgaactctgactctattttatttcaagtaggtgctatatcccggccataaacccctatagaaaagccagaaagttgtgcttcctttgaggctattagggggctctgtggtgttttaggatgggtgtgggtaactcatctacctaaacttttaatttctttacaacattcagcaagagagggggtcagtagtctctatctgctaataaatgaagaaaggaagtaaactctgaaaaataataaacatgtttatactctcattttaggtattatttttatttctgaagctggatgctcaaaaattaaaacgtttataagtttctaaattaaacttaatttataaaagaaaaaagaa

SEQ ID NO: 63865 - DNA, 2909 bp, Homo sapiens
tgagaccacagctggcctctaacccttgttgtccttgggccctgacaggtgaagcaactcgtgcccatccgcgatcaatccctgcaggaggagctggctcgccagcatgctaacgagcgtctgaggcgccagtttgctgcccaagccaatgccattgggccctggatccagaacaagatggaggagattgcccggagctccatccagatcacaggagccctggaagaccagatgaaccagctgaagcagtatgagcacaacatcatcaactataagaacaacatcgacaagctggagggagaccatcagctcatccaggaggcccttgtctttgacaacaagcacacgaactacacgatggagcacattcgtgttggatgggagctgctgctgacaaccatcgccagaaccatcaatgaggtggagactcagatcctgacgagagatgcgaagggcatcacccaggagcagatgaatgagttcagagcctccttcaaccactttgacaggaggaagaatggcctgatggatcatgaggatttcagagcctgcctgatttccatgggttatgacctgggtgaagccgaatttgcccgcattatgaccctggtagatcccaacgggcaaggcaccgtcaccttccaatccttcatcgacttcatgactagagagacggctgacaccgacactgccgagcaggtcatcgcctccttccggatcctggcttctgataagccatacatcctggcggaggagctgcgtcgggagctgcccccggatcaggcccagtactgcatcaagaggatgcccgcctactcgggcccaggcagtgtgcctggtgcactggattacgctgcgttctcttccgcactctacggggagagcgatctgtgatgctgagcttctgtaatcactcatcccatcagaatgcaataaaagcggaagtcacagtttgtttcctggaaactttgacaagctttattaagttgagagagagagagggggaaaaaaaaagcctttcgtagttcagtaattgccagcaatataacacggctaaaatgaagtttttacagtatatgacatagtgcgcttcataaataggtttatttctgagtttttagcaaaatgtaatgaaatatcaggttgatttctttgattaaacagaacaaattacttgagtaataggaaattaggaggatctagggacagaaggaaagtgaaaaatgtgaaaatacaaaatacccaagatttaagaccggggggaaaaaaccacaaattggtaaataaaggtttgctatttgtaaaaaatttcatttatctctaatatgcttatgtgattggccctaggggagtatatttgggattctaatgttttattttcatgcttatccaaagattactattgtatcttcaaatgaacttaatattgtgagatggaactgccggggattaaaaagactacccaaaagatttttggcacttacaatttttaaaatagtttatgtcatctcttcattatttagggctggatggtcaactcagtcagtgattttttgatgcttctcttatcctccagaatagagacctaaggacacgtggaagtcagtttaattgccagagagaaggatgcaatcactaggtgaaatgaggtttttaggattatttattgattccaggttcccatgctttttgttagagcttattagtacaggttctcaagagatgaccacataaaagtgctctgtttataaataagcaggtttctgtagtactgactggttcatcacaaggcaagtcagaaaccagtatccttctagctctccagtcaggacttccttatgcctctagttttatgaccggttaaggagaagccagagttagagtaggagaggactaattctcagcagcagtggaggtgagttctttcttttgcggaagctttacatatgttttgtgtagtaggaataactagatattttagctagtgtgcggtgtgtgttcacccctgggattggacagtgtatcctaacaagtcccatgtctggttctgtgtctaaaggcctgctccatgacacaggatgctacatgcactcctgctagcacatcttgatctgttgaatgttcattctttctttttgctcatactgctgtaggctataattcccccctgtttttccatcttgttgacagcttgtagagaataaagcaggaattctttttatatctgagtccttaatgatcaggaaatggattacaaacaaacaaaaacagttgcaaacagcaattaaagcattactagagaagcagtaacatgtctgttacctacagtctgtttgctcagatttttatagatttccaccaacagctggaaatgtaatatttccattccaagctgtctgacagcttgactcttcttcctacactgggccatttagaaccttcaacctttatgaatttcacttaatttgcttcattattaagtaattggtagtttccagattcctgaaatatttgaatccttgagtttaatgccaaacacttttggggtggtttagatgaactctgactctattttatttcaagtaggtgctatatcccggccataaacccctatagaaaagccagaaagttgtgcttcctttgaggctattagggggctctgtggtgttttaggatgggtgtgggtaactcatctacctaaacttttaatttctttacaacattcagcaagagagggggtcagtagtctctatctgctaataaatgaagaaaggaagtaaactctgaaaaataataaacatgtttatactctcattttaggtattatttttatttctgaagctggatgctcaaaaattaaaacgtttataagtttctaaattaaacttaatttataaaagaaaaaagaa

SEQ ID NO: 63866 - DNA, 2545 bp, Homo sapiens
cagggagtctccatcccatcgtcatgagatcagtggagagttcaggtggacattcagggacccaagatcttggtttcctggacccaaatatttctgtgactaacttgctggatgtttaccgagtttgtgttttagactaatgctctctccccgttattccctacagtctaatcagcctgccgtgtaagtctgtgtgaaaactgtaacaaaggtgtgaaatgattcatagtacgcataagccatgccttcagtctgaccgcaccctaagctagactctgcaccgtctacagcacgccaccctcctcgtcccctctcatcacccacctcgttccatgctgtgtgtgcgcattcccgtcgactgagccgtcctgtttactattgtgttttacaggccgagacagcggctaacaggatatgtaaggttcttgctgtgaatcaagagaatgagaggctgatggaagaatatgagaggctagcgagtgagcttttggaatggattcgtcgcacgatcccctggctggagaaccggactcccgagaagaccatgcaagccatgcagaagaagctggaggacttccgggattaccgccggaagcacaagccacccaaggtgcaggagaaatgccagctggagatcaacttcaacacgctgcagaccaagctgcggatcagcaaccgtcctgccttcatgccctccgagggcaagatggtgtcggatattgctggtgcctggcagaggctggagcaggctgagaagggttacgaggagtggttgctcaatgagattcggagactggagcgcttggaacacctggctgagaagttcaggcagaaggcctcaacgcacgagacttgggcttatggcaaagagcagatcttgctgcagaaggattacgagtcggcgtcgctgacagaggtgcgggctctgctgcggaagcacgaggcgttcgagagcgacctggcagcgcaccaggaccgcgtggagcagatcgcagccatcgcgcaggagctcaatgaactggactatcacgacgctgtgaatgtcaatgatcggtgccagaaaatttgtgaccagtgggaccgactgggaacgcttactcagaagaggagagaagccctagagagaatggagaaattgctagaaaccattgatcagcttcacctggagtttgccaagagggctgctcctttcaacaattggatggagggcgctatggaggatctgcaagatatgttcattgtccacagcattgaggagatccagagtctgatcactgcgcatgagcagttcaaggccacgctgcccgaggcggacggagagcggcagtccatcatggccatccagaacgaggtggagaaggtgattcagagctacaacatcagaatcagctcaagcaacccgtacagcactgtcaccatggatgagctccggaccaagtgggacaaggtgaagcaactcgtgcccatccgcgatcaatccctgcaggaggagctggctcgccagcatgctaacgagcgtctgaggcgccagtttgctgcccaagccaatgccattgggccctggatccagaacaagatggaggagattgcccggagctccatccagatcacaggagccctggaagaccagatgaaccagctgaagcagtatgagcacaacatcatcaactataagaacaacatcgacaagctggagggagaccatcagctcatccaggaggcccttgtctttgacaacaagcacacgaactacacgatggagcacattcgtgttggatgggagctgctgctgacaaccatcgccagaaccatcaatgaggtggagactcagatcctgacgagagatgcgaagggcatcacccaggagcagatgaatgagttcagagcctccttcaaccactttgacaggaggaagaatggcctgatggatcatgaggatttcagagcctgcctgatttccatgggttatgacctgggtgaagccgaatttgcccgcattatgaccctggtagatcccaacgggcaaggcaccgtcaccttccaatccttcatcgacttcatgactagagagacggctgacaccgacactgccgagcaggtcatcgcctccttccggatcctggcttctgataagccatacatcctggcggaggagctgcgtcgggagctgcccccggatcaggcccagtactgcatcaagaggatgcccgcctactcgggcccaggcagtgtgcctggtgcactggattacgctgcgttctcttccgcactctacggggagagcgatctgtgatgctgagcttctgtaatcactcatcccatcagaatgcaataaaagcggaagtcacagtttgtttcctggaaactttgacaagctttattaagttgagagagagagagggggaaaaaaaaagcctttcgtagttcagtaattgccagcaatataacacggctaaaatgaagtttttacagtatatgacatagtgcgcttcagctggttcatctggtgctccagggctcctgtgatctggatggagctcgggca

SEQ ID NO: 63867 - DNA, 1388 bp, Homo sapiens
cagggagtctccatcccatcgtcatgagatcagtggagagttcaggtggacattcagggacccaagatcttggtttcctggacccaaatatttctgtgactaacttgctggatgtttaccgagtttgtgttttagactaatgctctctccccgttattccctacagtctaatcagcctgccgtgtaagtctgtgtgaaaactgtaacaaaggtgtgaaatgattcatagtacgcataagccatgccttcagtctgaccgcaccctaagctagactctgcaccgtctacagcacgccaccctcctcgtcccctctcatcacccacctcgttccatgctgtgtgtgcgcattcccgtcgactgagccgtcctgtttactattgtgttttacaggccgagacagcggctaacaggatatgtaaggttcttgctgtgaatcaagagaatgagaggctgatggaagaatatgagaggctagcgagtgagcttttggaatggattcgtcgcacgatcccctggctggagaaccggactcccgagaagaccatgcaagccatgcagaagaagctggaggacttccgggattaccgccggaagcacaagccacccaaggtgcaggagaaatgccagctggagatcaacttcaacacgctgcagaccaagctgcggatcagcaaccgtcctgccttcatgccctccgagggcaagatggtgtcggatattgctggtgcctggcagaggctggagcaggctgagaagggttacgaggagtggttgctcaatgagattcggagactggagcgcttggaacacctggctgagaagttcaggcagaaggcctcaacgcacgagacttgggcttatggcaaagagcagatcttgctgcagaaggattacgagtcggcgtcgctgacagaggtgcgggctctgctgcggaagcacgaggcgttcgagagcgacctggcagcgcaccaggaccgcgtggagcagatcgcagccatcgcgcaggagctcaatgaactggactatcacgacgctgtgaatgtcaatgatcggtgccagaaaatttgtgaccagtgggaccgactgggaacgcttactcagaagaggagagaagccctagaggttgcctagtgaaaggaacctctaaagaaaacatgaaaagtggaagaaagagggaaatgggaagttgggagctttgtgctgtaatttatccagacagcagcgaagtatatttttcaattttaaaaaatccaggggtgatgagattacggcataaatctactttgtatctggtagtaacagtacgtttccaaaagtccttctacctgagtaaattgagctgtgagtgagtcgggaaatcagagatgtgcaaagggaagatggaacc

SEQ ID NO: 63868 - DNA, 601 bp, Homo sapiens
gccaggcacttccggcggcgcgctgcaggcgcggggaacaccaatggcggggtacttgaagctggtgtgtgtttcctttcagcgtcaagggttccacactgttgggagtcgctgcaagaatcggacaggcgctgagcacctgtggctgacccgacatctcagggacccatttgtgaaggctgcgaaggtggagagttaccggtgtcgaagcgccttcaagctcctggaggtgaacgagaggcaccagattctgcggcccggccttcgggtgttagactgtggggcagctcctggggcctggagtcaggtggcggtgcagaaggtcaacgccgcaggcacaggtgggcctctgcactgctgttggcaccttctggctcccctgaggctgagtgggcatgggcaagctgcctttgccagtggatgcgggatggtggagcccttttttgaaggcgtgtgcttccgagtgggtggtttagcaatggtgatgataaaaataggatgctgccattttcaaaatgaaagacaaggtagaaaggtgcagtgaacatggaaatcacctcgcatgagaccgcccgcaggtaccagcaccagcatggtggtg

SEQ ID NO: 63869 - DNA, 1801 bp, Homo sapiens
gccaggcacttccggcggcgcgctgcaggcgcggggaacaccaatggcggggtgagctgggcgctgctgctgcgcgtgcagacagcgggagtggttgggggtccgcccggtcgccttcctcggtcctggcctcggggctgggtgccgagcgctgggcaccgtccccgcactcagcgagcgcgacaggggcgaggccaggattccgggtcgcagttccccgggaggagggcgccctcaggtacttgaagctggtgtgtgtttcctttcagcgtcaagggttccacactgttgggagtcgctgcaagaatcggacaggcgctgagcacctgtggctgacccgacatctcagggacccatttgtgaaggctgcgaaggtggagagttaccggtgtcgaagcgccttcaagctcctggaggtgaacgagaggcaccagattctgcggcccggccttcgggtgttagactgtggggcagctcctggggcctggagtcaggtggcggtgcagaaggtcaacgccgcaggcacagatcccagctctcctgttggcttcgtgcttggggtagatcttcttcacatattccccctggaaggagcaacttttctgtgccctgctgacgtgactgacccgagaacctcacagagaatcctcgaggtgcttcctggcaggagagcagatgtgattctgagcgacatggcgcccaatgccacagggttccgggacctcgatcatgacaggctcatcagcctgtgcctgacccttctcagcgtgaccccagacatcctgcaacctggggggacattcctttgtaaaacctgggctggaagtcaaagccgtcggttacagaggagactgacagaggaattccagaatgtaaggatcatcaaacctgaagccagcaggaaagagtcatcagaagtgtacttcttggccacacagtaccacggaaggaagggcactgtgaagcagtgaggatttcttgtgccattttcataatggtcattagctccttttaagctagaaacgtagcctgagctcctgaagagttcctgggagatttgagctgattttggagatggagcaggacaagtggggagtctctctctctctttctctctctctctttttaaccaaaaagagatgacaaaactaagttcaggggccatggaaaatgaaaaagtccgctatattgtgatttgggaagagaaagttatcaagagaaagaggtgaggatggaaggatggagaaaaacagactgtgggaaggatcagaaggaatccgccgaggcagggatgggtgtgcccatgtgtgccttgacgggacttcatcttatagactgttaaactgtcacacacaaacaggctttccacccctgctctgagagcaccacgcacagatttccagttcttagtgtggctgtttaaagtagaaaatctgggggctgggtgaggccactcatgcctgtaaacccagggctttagaaggctgaggctgggggattgcttgaagtcaggagttcaagaccaacctgggcaacatagcaacaccccccatgtctacaaaaatgaaaaaccaaaaagcaaaccaaaagaaaaatctgaaatttccatctggggattaacttctgtctttctggtgaacaatatagcaattcacgcattcttcaagcagcaaaagttcccggaacaattagggaagacgtatggtctgaatttatccaggcagtgggtctgctttggtttttgctggaaatttatatcagtgtctgggctcccaagaacataaatgtaattgccaaagca

SEQ ID NO: 63870 - DNA, 2783 bp, Homo sapiens
gccaggcacttccggcggcgcgctgcaggcgcggggaacaccaatggcggggtgagctgggcgctgctgctgcgcgtgcagacagcgggagtggttgggggtccgcccggtcgccttcctcggtcctggcctcggggctgggtgccgagcgctgggcaccgtccccgcactcagcgagcgcgacaggggcgaggccaggattccgggtcgcagttccccgggaggagggcgccctcaggtctccaggggcagggccggcggggccgtggggaggccggggccggcggcggagtccaggtacttgaagctggtgtgtgtttcctttcagcgtcaagggttccacactgttgggagtcgctgcaagaatcggacaggcgctgagcacctgtggctgacccgacatctcagggacccatttgtgaaggctgcgaaggtggagagttaccggtgtcgaagcgccttcaagctcctggaggtgaacgagaggcaccagattctgcggcccggccttcgggtgttagactgtggggcagctcctggggcctggagtcaggtggcggtgcagaaggtcaacgccgcaggcacagatggagtctcactcttgcccaggctgcagtgcaatggtgtgatctcggctcactgcaacctctgcctacctggttcaagcgattctcctgcctcagcctcccaagtagctgggattacaggcgcccgccaccgcacccagctaattttttctttttgtttttttaagtagagacagggtttcactatgttggctaggctgatctcgaactcttgacctcaggtgatctgcccacctcggcctcccaaagtgctgggattacagatgtgagccatggtgcccggctactcttaatgatgtattgacatctttccccaacagcacagctaaatttccaagtcgcataagccctggggctttcctggtggccccactggggctgctccgtccggaacctagaagaggcttcatggccagggctatggattctttgctctggatgaagctgagacacagttttcatctgttttgtatcttagggttttgagtaagattttctatataaaaaggttctcctgaataatgagatcagccaaccgcccatgcaactgaagacactgtcgtcattgggaaagtttcatcctattccatgtagtgcttgcaccgtaggttctttaaccagctccctcactgtggcatcaaggttgcttttggcttttggctgggatgcgtgtgctgtggtgaatatccttgccatttatgtttcctgctgtaaagccagggtagctgcatgcactggcatttgaacagggtgagacagtccacccagagctctcccaagtctctcccaaataccttagagtagggacactggtccccatttattggtgagaaaacaggctcagggtttcatgacttgttgaaagtgcagaaatggaatgctggccccctggatctgcacatctgcctcgctgctggtttgcgatcccagctctcctgttggcttcgtgcttggggtagatcttcttcacatattccccctggaaggagcaacttttctgtgccctgctgacgtgactgacccgagaacctcacagagaatcctcgaggtgcttcctggcaggagagcagatgtgattctgagcgacatggcgcccaatgccacagggttccgggacctcgatcatgacaggctcatcagcctgtgcctgacccttctcagcgtgaccccagacatcctgcaacctggggggacattcctttgtaaaacctgggctggaagtcaaagccgtcggttacagaggagactgacagaggaattccagaatgtaaggatcatcaaacctgaagccagcaggaaagagtcatcagaagtgtacttcttggccacacagtaccacggaaggaagggcactgtgaagcagtgaggatttcttgtgccattttcataatggtcattagctccttttaagctagaaacgtagcctgagctcctgaagagttcctgggagatttgagctgattttggagatggagcaggacaagtggggagtctctctctctctttctctctctctctttttaaccaaaaagagatgacaaaactaagttcaggggccatggaaaatgaaaaagtccgctatattgtgatttgggaagagaaagttatcaagagaaagaggtgaggatggaaggatggagaaaaacagactgtgggaaggatcagaaggaatccgccgaggcagggatgggtgtgcccatgtgtgccttgacgggacttcatcttatagactgttaaactgtcacacacaaacaggctttccacccctgctctgagagcaccacgcacagatttccagttcttagtgtggctgtttaaagtagaaaatctgggggctgggtgaggccactcatgcctgtaaacccagggctttagaaggctgaggctgggggattgcttgaagtcaggagttcaagaccaacctgggcaacatagcaacaccccccatgtctacaaaaatgaaaaaccaaaaagcaaaccaaaagaaaaatctgaaatttccatctggggattaacttctgtctttctggtgaacaatatagcaattcacgcattcttcaagcagcaaaagttcccggaacaattagggaagacgtatggtctgaatttatccaggcagtgggtctgctttggtttttgctggaaatttatatcagtgtctgggctcccaagaacataaatgtaattgccaaagca

SEQ ID NO: 63871 - DNA, 2506 bp, Homo sapiens
gccaggcacttccggcggcgcgctgcaggcgcggggaacaccaatggcgggcgtcaagggttccacactgttgggagtcgctgcaagaatcggacaggcgctgagcacctgtggctgacccgacatctcagggacccatttgtgaaggctgcgaaggtggagagttaccggtgtcgaagcgccttcaagctcctggaggtgaacgagaggcaccagattctgcggcccggccttcgggtgttagactgtggggcagctcctggggcctggagtcaggtggcggtgcagaaggtcaacgccgcaggcacagatggagtctcactcttgcccaggctgcagtgcaatggtgtgatctcggctcactgcaacctctgcctacctggttcaagcgattctcctgcctcagcctcccaagtagctgggattacaggcgcccgccaccgcacccagctaattttttctttttgtttttttaagtagagacagggtttcactatgttggctaggctgatctcgaactcttgacctcaggtgatctgcccacctcggcctcccaaagtgctgggattacagatgtgagccatggtgcccggctactcttaatgatgtattgacatctttccccaacagcacagctaaatttccaagtcgcataagccctggggctttcctggtggccccactggggctgctccgtccggaacctagaagaggcttcatggccagggctatggattctttgctctggatgaagctgagacacagttttcatctgttttgtatcttagggttttgagtaagattttctatataaaaaggttctcctgaataatgagatcagccaaccgcccatgcaactgaagacactgtcgtcattgggaaagtttcatcctattccatgtagtgcttgcaccgtaggttctttaaccagctccctcactgtggcatcaaggttgcttttggcttttggctgggatgcgtgtgctgtggtgaatatccttgccatttatgtttcctgctgtaaagccagggtagctgcatgcactggcatttgaacagggtgagacagtccacccagagctctcccaagtctctcccaaataccttagagtagggacactggtccccatttattggtgagaaaacaggctcagggtttcatgacttgttgaaagtgcagaaatggaatgctggccccctggatctgcacatctgcctcgctgctggtttgcgatcccagctctcctgttggcttcgtgcttggggtagatcttcttcacatattccccctggaaggagcaacttttctgtgccctgctgacgtgactgacccgagaacctcacagagaatcctcgaggtgcttcctggcaggagagcagatgtgattctgagcgacatggcgcccaatgccacagggttccgggacctcgatcatgacaggctcatcagcctgtgcctgacccttctcagcgtgaccccagacatcctgcaacctggggggacattcctttgtaaaacctgggctggaagtcaaagccgtcggttacagaggagactgacagaggaattccagaatgtaaggatcatcaaacctgaagccagcaggaaagagtcatcagaagtgtacttcttggccacacagtaccacggaaggaagggcactgtgaagcagtgaggatttcttgtgccattttcataatggtcattagctccttttaagctagaaacgtagcctgagctcctgaagagttcctgggagatttgagctgattttggagatggagcaggacaagtggggagtctctctctctctttctctctctctctttttaaccaaaaagagatgacaaaactaagttcaggggccatggaaaatgaaaaagtccgctatattgtgatttgggaagagaaagttatcaagagaaagaggtgaggatggaaggatggagaaaaacagactgtgggaaggatcagaaggaatccgccgaggcagggatgggtgtgcccatgtgtgccttgacgggacttcatcttatagactgttaaactgtcacacacaaacaggctttccacccctgctctgagagcaccacgcacagatttccagttcttagtgtggctgtttaaagtagaaaatctgggggctgggtgaggccactcatgcctgtaaacccagggctttagaaggctgaggctgggggattgcttgaagtcaggagttcaagaccaacctgggcaacatagcaacaccccccatgtctacaaaaatgaaaaaccaaaaagcaaaccaaaagaaaaatctgaaatttccatctggggattaacttctgtctttctggtgaacaatatagcaattcacgcattcttcaagcagcaaaagttcccggaacaattagggaagacgtatggtctgaatttatccaggcagtgggtctgctttggtttttgctggaaatttatatcagtgtctgggctcccaagaacataaatgtaattgccaaagca

SEQ ID NO: 63872 - DNA, 1583 bp, Homo sapiens
gccaggcacttccggcggcgcgctgcaggcgcggggaacaccaatggcgggcgtcaagggttccacactgttgggagtcgctgcaagaatcggacaggcgctgagcacctgtggctgacccgacatctcagggacccatttgtgaaggctgcgaaggtggagagttaccggtgtcgaagcgccttcaagctcctggaggtgaacgagaggcaccagattctgcggcccggccttcgggtgttagactgtggggcagctcctggggcctggagtcaggtggcggtgcagaaggtcaacgccgcaggcacagatcccagctctcctgttggcttcgtgcttggggtagatcttcttcacatattccccctggaaggagcaacttttctgtgccctgctgacgtgactgacccgagaacctcacagagaatcctcgaggtgcttcctggcaggagagcagatgtgattctgagcgacatggcgcccaatgccacagggttccgggacctcgatcatgacaggctcatcagcctgtgcctgacccttctcagcgtgaccccagacatcctgcaacctggggggacattcctttgtaaaacctgggctggaagtcaaagccgtcggttacagaggagactgacagaggaattccagaatgtaaggatcatcaaacctgaagccagcaggaaagagtcatcagaagtgtacttcttggccacacagtaccacggaaggaagggcactgtgaagcagtgaggatttcttgtgccattttcataatggtcattagctccttttaagctagaaacgtagcctgagctcctgaagagttcctgggagatttgagctgattttggagatggagcaggacaagtggggagtctctctctctctttctctctctctctttttaaccaaaaagagatgacaaaactaagttcaggggccatggaaaatgaaaaagtccgctatattgtgatttgggaagagaaagttatcaagagaaagaggtgaggatggaaggatggagaaaaacagactgtgggaaggatcagaaggaatccgccgaggcagggatgggtgtgcccatgtgtgccttgacgggacttcatcttatagactgttaaactgtcacacacaaacaggctttccacccctgctctgagagcaccacgcacagatttccagttcttagtgtggctgtttaaagtagaaaatctgggggctgggtgaggccactcatgcctgtaaacccagggctttagaaggctgaggctgggggattgcttgaagtcaggagttcaagaccaacctgggcaacatagcaacaccccccatgtctacaaaaatgaaaaaccaaaaagcaaaccaaaagaaaaatctgaaatttccatctggggattaacttctgtctttctggtgaacaatatagcaattcacgcattcttcaagcagcaaaagttcccggaacaattagggaagacgtatggtctgaatttatccaggcagtgggtctgctttggtttttgctggaaatttatatcagtgtctgggctcccaagaacataaatgtaattgccaaagca

SEQ ID NO: 63873 - DNA, 1945 bp, Homo sapiens
  misc_feature (51)..(51): n is a, c, g, or t
caccgaaaatgtagtgaggcggcaccggttgtaatttcatgaggggctgtngtatctttgctacatcatggcagttggcttaccatgtcgcataagccctggggctttcctggtggccccactggggctgctccgtccggaacctagaagaggcttcatggccagggctatggattctttgctctggatgaagctgagacacagttttcatctgttttgtatcttagggttttgagtaagattttctatataaaaaggttctcctgaataatgagatcagccaaccgcccatgcaactgaagacactgtcgtcattgggaaagtttcatcctattccatgtagtgcttgcaccgtaggttctttaaccagctccctcactgtggcatcaaggttgcttttggcttttggctgggatgcgtgtgctgtggtgaatatccttgccatttatgtttcctgctgtaaagccagggtagctgcatgcactggcatttgaacagggtgagacagtccacccagagctctcccaagtctctcccaaataccttagagtagggacactggtccccatttattggtgagaaaacaggctcagggtttcatgacttgttgaaagtgcagaaatggaatgctggccccctggatctgcacatctgcctcgctgctggtttgcgatcccagctctcctgttggcttcgtgcttggggtagatcttcttcacatattccccctggaaggagcaacttttctgtgccctgctgacgtgactgacccgagaacctcacagagaatcctcgaggtgcttcctggcaggagagcagatgtgattctgagcgacatggcgcccaatgccacagggttccgggacctcgatcatgacaggctcatcagcctgtgcctgacccttctcagcgtgaccccagacatcctgcaacctggggggacattcctttgtaaaacctgggctggaagtcaaagccgtcggttacagaggagactgacagaggaattccagaatgtaaggatcatcaaacctgaagccagcaggaaagagtcatcagaagtgtacttcttggccacacagtaccacggaaggaagggcactgtgaagcagtgaggatttcttgtgccattttcataatggtcattagctccttttaagctagaaacgtagcctgagctcctgaagagttcctgggagatttgagctgattttggagatggagcaggacaagtggggagtctctctctctctttctctctctctctttttaaccaaaaagagatgacaaaactaagttcaggggccatggaaaatgaaaaagtccgctatattgtgatttgggaagagaaagttatcaagagaaagaggtgaggatggaaggatggagaaaaacagactgtgggaaggatcagaaggaatccgccgaggcagggatgggtgtgcccatgtgtgccttgacgggacttcatcttatagactgttaaactgtcacacacaaacaggctttccacccctgctctgagagcaccacgcacagatttccagttcttagtgtggctgtttaaagtagaaaatctgggggctgggtgaggccactcatgcctgtaaacccagggctttagaaggctgaggctgggggattgcttgaagtcaggagttcaagaccaacctgggcaacatagcaacaccccccatgtctacaaaaatgaaaaaccaaaaagcaaaccaaaagaaaaatctgaaatttccatctggggattaacttctgtctttctggtgaacaatatagcaattcacgcattcttcaagcagcaaaagttcccggaacaattagggaagacgtatggtctgaatttatccaggcagtgggtctgctttggtttttgctggaaatttatatcagtgtctgggctcccaagaacataaatgtaattgccaaagca

SEQ ID NO: 63874 - DNA, 1886 bp, Homo sapiens
atatagggtaggtagaatgaggtactgatatgccctagtggtcttacctggttgccctgactgagcttcttgtaccggtggctaaatctagggttcatgctcatagtgagtcgtattatgctcgagaatccaggtgaaactgcgttactgacttctggcatatcttagggttttgagtaagattttctatataaaaaggttctcctgaataatgagatcagccaaccgcccatgcaactgaagacactgtcgtcattgggaaagtttcatcctattccatgtagtgcttgcaccgtaggttctttaaccagctccctcactgtggcatcaaggttgcttttggcttttggctgggatgcgtgtgctgtggtgaatatccttgccatttatgtttcctgctgtaaagccagggtagctgcatgcactggcatttgaacagggtgagacagtccacccagagctctcccaagtctctcccaaataccttagagtagggacactggtccccatttattggtgagaaaacaggctcagggtttcatgacttgttgaaagtgcagaaatggaatgctggccccctggatctgcacatctgcctcgctgctggtttgcgatcccagctctcctgttggcttcgtgcttggggtagatcttcttcacatattccccctggaaggagcaacttttctgtgccctgctgacgtgactgacccgagaacctcacagagaatcctcgaggtgcttcctggcaggagagcagatgtgattctgagcgacatggcgcccaatgccacagggttccgggacctcgatcatgacaggctcatcagcctgtgcctgacccttctcagcgtgaccccagacatcctgcaacctggggggacattcctttgtaaaacctgggctggaagtcaaagccgtcggttacagaggagactgacagaggaattccagaatgtaaggatcatcaaacctgaagccagcaggaaagagtcatcagaagtgtacttcttggccacacagtaccacggaaggaagggcactgtgaagcagtgaggatttcttgtgccattttcataatggtcattagctccttttaagctagaaacgtagcctgagctcctgaagagttcctgggagatttgagctgattttggagatggagcaggacaagtggggagtctctctctctctttctctctctctctttttaaccaaaaagagatgacaaaactaagttcaggggccatggaaaatgaaaaagtccgctatattgtgatttgggaagagaaagttatcaagagaaagaggtgaggatggaaggatggagaaaaacagactgtgggaaggatcagaaggaatccgccgaggcagggatgggtgtgcccatgtgtgccttgacgggacttcatcttatagactgttaaactgtcacacacaaacaggctttccacccctgctctgagagcaccacgcacagatttccagttcttagtgtggctgtttaaagtagaaaatctgggggctgggtgaggccactcatgcctgtaaacccagggctttagaaggctgaggctgggggattgcttgaagtcaggagttcaagaccaacctgggcaacatagcaacaccccccatgtctacaaaaatgaaaaaccaaaaagcaaaccaaaagaaaaatctgaaatttccatctggggattaacttctgtctttctggtgaacaatatagcaattcacgcattcttcaagcagcaaaagttcccggaacaattagggaagacgtatggtctgaatttatccaggcagtgggtctgctttggtttttgctggaaatttatatcagtgtctgggctcccaagaacataaatgtaattgccaaagca

SEQ ID NO: 63875 - DNA, 1502 bp, Homo sapiens
gccaggcacttccggcggcgcgctgcaggcgcggggaacaccaatggcggggtacttgaagctggtgtgtgtttcctttcagcgtcaagggttccacactgttgggagtcgctgcaagaatcggacaggcgctgagcacctgtggctgacccgacatctcagggacccatttgtgaaggctgcgaaggtggagagttaccggtgtcgaagcgccttcaagctcctggagatcccagctctcctgttggcttcgtgcttggggtagatcttcttcacatattccccctggaaggagcaacttttctgtgccctgctgacgtgactgacccgagaacctcacagagaatcctcgaggtgcttcctggcaggagagcagatgtgattctgagcgacatggcgcccaatgccacagggttccgggacctcgatcatgacaggctcatcagcctgtgcctgacccttctcagcgtgaccccagacatcctgcaacctggggggacattcctttgtaaaacctgggctggaagtcaaagccgtcggttacagaggagactgacagaggaattccagaatgtaaggatcatcaaacctgaagccagcaggaaagagtcatcagaagtgtacttcttggccacacagtaccacggaaggaagggcactgtgaagcagtgaggatttcttgtgccattttcataatggtcattagctccttttaagctagaaacgtagcctgagctcctgaagagttcctgggagatttgagctgattttggagatggagcaggacaagtggggagtctctctctctctttctctctctctctttttaaccaaaaagagatgacaaaactaagttcaggggccatggaaaatgaaaaagtccgctatattgtgatttgggaagagaaagttatcaagagaaagaggtgaggatggaaggatggagaaaaacagactgtgggaaggatcagaaggaatccgccgaggcagggatgggtgtgcccatgtgtgccttgacgggacttcatcttatagactgttaaactgtcacacacaaacaggctttccacccctgctctgagagcaccacgcacagatttccagttcttagtgtggctgtttaaagtagaaaatctgggggctgggtgaggccactcatgcctgtaaacccagggctttagaaggctgaggctgggggattgcttgaagtcaggagttcaagaccaacctgggcaacatagcaacaccccccatgtctacaaaaatgaaaaaccaaaaagcaaaccaaaagaaaaatctgaaatttccatctggggattaacttctgtctttctggtgaacaatatagcaattcacgcattcttcaagcagcaaaagttcccggaacaattagggaagacgtatggtctgaatttatccaggcagtgggtctgctttggtttttgctggaaatttatatcagtgtctgggctcccaagaacataaatgtaattgccaaagca

SEQ ID NO: 63876 - DNA, 1723 bp, Homo sapiens
gccaggcacttccggcggcgcgctgcaggcgcggggaacaccaatggcggggtacttgaagctggtgtgtgtttcctttcagcgtcaagggttccacactgttgggagtcgctgcaagaatcggacaggcgctgagcacctgtggctgacccgacatctcagggacccatttgtgaaggctgcgaaggtggagagttaccggtgtcgaagcgccttcaagctcctggagatggagtctcactcttgcccaggctgcagtgcaatggtgtgatctcggctcactgcaacctctgcctacctggttcaagcgattctcctgcctcagcctcccaagtagctgggattacaggcgcccgccaccgcacccagctaattttttctttttgtttttttaagtagagacagggtttcactatgttggctaggctgatctcgaactcttgacctcagatcccagctctcctgttggcttcgtgcttggggtagatcttcttcacatattccccctggaaggagcaacttttctgtgccctgctgacgtgactgacccgagaacctcacagagaatcctcgaggtgcttcctggcaggagagcagatgtgattctgagcgacatggcgcccaatgccacagggttccgggacctcgatcatgacaggctcatcagcctgtgcctgacccttctcagcgtgaccccagacatcctgcaacctggggggacattcctttgtaaaacctgggctggaagtcaaagccgtcggttacagaggagactgacagaggaattccagaatgtaaggatcatcaaacctgaagccagcaggaaagagtcatcagaagtgtacttcttggccacacagtaccacggaaggaagggcactgtgaagcagtgaggatttcttgtgccattttcataatggtcattagctccttttaagctagaaacgtagcctgagctcctgaagagttcctgggagatttgagctgattttggagatggagcaggacaagtggggagtctctctctctctttctctctctctctttttaaccaaaaagagatgacaaaactaagttcaggggccatggaaaatgaaaaagtccgctatattgtgatttgggaagagaaagttatcaagagaaagaggtgaggatggaaggatggagaaaaacagactgtgggaaggatcagaaggaatccgccgaggcagggatgggtgtgcccatgtgtgccttgacgggacttcatcttatagactgttaaactgtcacacacaaacaggctttccacccctgctctgagagcaccacgcacagatttccagttcttagtgtggctgtttaaagtagaaaatctgggggctgggtgaggccactcatgcctgtaaacccagggctttagaaggctgaggctgggggattgcttgaagtcaggagttcaagaccaacctgggcaacatagcaacaccccccatgtctacaaaaatgaaaaaccaaaaagcaaaccaaaagaaaaatctgaaatttccatctggggattaacttctgtctttctggtgaacaatatagcaattcacgcattcttcaagcagcaaaagttcccggaacaattagggaagacgtatggtctgaatttatccaggcagtgggtctgctttggtttttgctggaaatttatatcagtgtctgggctcccaagaacataaatgtaattgccaaagca

SEQ ID NO: 63877 - DNA, 1622 bp, Homo sapiens
agcggatattgaggaactgaggaggacgctcgggctgtacctgcagcgggggtcgggtgccgcttacacgaggtgcgggatgcacagcggtagacgtgagtagatcggtaaatccccagaggggcgtgaagcaaactagtgggctggacggcgatcagtctccagagacgcccagtgtcgtgaatggctgcgaaggtggagagttaccggtgtcgaagcgccttcaagctcctggaggtgaacgagaggcaccagattctgcggcccggccttcgggtgttagactgtggggcagctcctggggcctggagtcaggtggcggtgcagaaggtcaacgccgcaggcacagatcccagctctcctgttggcttcgtgcttggggtagatcttcttcacatattccccctggaaggagcaacttttctgtgccctgctgacgtgactgacccgagaacctcacagagaatcctcgaggtgcttcctggcaggagagcagatgtgattctgagcgacatggcgcccaatgccacagggttccgggacctcgatcatgacaggctcatcagcctgtgcctgacccttctcagcgtgaccccagacatcctgcaacctggggggacattcctttgtaaaacctgggctggaagtcaaagccgtcggttacagaggagactgacagaggaattccagaatgtaaggatcatcaaacctgaagccagcaggaaagagtcatcagaagtgtacttcttggccacacagtaccacggaaggaagggcactgtgaagcagtgaggatttcttgtgccattttcataatggtcattagctccttttaagctagaaacgtagcctgagctcctgaagagttcctgggagatttgagctgattttggagatggagcaggacaagtggggagtctctctctctctttctctctctctctttttaaccaaaaagagatgacaaaactaagttcaggggccatggaaaatgaaaaagtccgctatattgtgatttgggaagagaaagttatcaagagaaagaggtgaggatggaaggatggagaaaaacagactgtgggaaggatcagaaggaatccgccgaggcagggatgggtgtgcccatgtgtgccttgacgggacttcatcttatagactgttaaactgtcacacacaaacaggctttccacccctgctctgagagcaccacgcacagatttccagttcttagtgtggctgtttaaagtagaaaatctgggggctgggtgaggccactcatgcctgtaaacccagggctttagaaggctgaggctgggggattgcttgaagtcaggagttcaagaccaacctgggcaacatagcaacaccccccatgtctacaaaaatgaaaaaccaaaaagcaaaccaaaagaaaaatctgaaatttccatctggggattaacttctgtctttctggtgaacaatatagcaattcacgcattcttcaagcagcaaaagttcccggaacaattagggaagacgtatggtctgaatttatccaggcagtgggtctgctttggtttttgctggaaatttatatcagtgtctgggctcccaagaacataaatgtaattgccaaagca

SEQ ID NO: 63878 - DNA, 1711 bp, Homo sapiens
gccaggcacttccggcggcgcgctgcaggcgcggggaacaccaatggcggggtacttgaagctggtgtgtgtttcctttcagcgtcaagggttccacactgttgggagtcgctgcaagaatcggacaggcgctgagcacctgtggctgacccgacatctcagggacccatttgtgaaggctgcgaaggtggagagttaccggtgtcgaagcgccttcaagctcctggaggtgaacgagaggcaccagattctgcggcccggccttcgggtgttagactgtggggcagctcctggggcctggagtcaggtggcggtgcagaaggtcaacgccgcaggcacagatcccagctctcctgttggcttcgtgcttggggtagatcttcttcacatattccccctggaaggagcaacttttctgtgccctgctgacgtgactgacccgagaacctcacagagaatcctcgaggtgcttcctggcaggagagcagatgtgattctgagcgacatggcgcccaatgccacagggttccgggacctcgatcatgacaggctcatcagcctgtgcctgacccttctcagcgtgaccccagacatcctgcaacctggggggacattcctttgtaaaacctgggctggaagtcaaagccgtcggttacagaggagactgacagaggaattccagaatgtaaggatcatcaaacctgaagccagcaggaaagagtcatcagaagtgtacttcttggccacacagtaccacggaaggaagggcactgtgaagcagtgaggatttcttgtgccattttcataatggtcattagctccttttaagctagaaacgtagcctgagctcctgaagagttcctgggagatttgagctgattttggagatggagcaggacaagtggggagtctctctctctctttctctctctctctttttaaccaaaaagagatgacaaaactaagttcaggggccatggaaaatgaaaaagtccgctatattgtgatttgggaagagaaagttatcaagagaaagaggtgaggatggaaggatggagaaaaacagactgtgggaaggatcagaaggaatccgccgaggcagggatgggtgtgcccatgtgtgccttgacgggacttcatcttatagactgttaaactgtcacacacaaacaggctttccacccctgctctgagagcaccacgcacagatttccagttcttagtgtggctgtttaaagtagaaaatctgggggctgggtgaggccactcatgcctgtaaacccagggctttagaaggctgaggctgggggattgcttgaagtcaggagttcaagaccaacctgggcaacatagcaacaccccccatgtctacaaaaatgaaaaaccaaaaagcaaaccaaaagaaaaatctgaaatttccatctggggattaacttctgtctttctggtgaacaatatagcaattcacgcattcttcaagcagcaaaagttcccggaacaattagggaagacgtatggtctgaatttatccaggcagtgggtctgctttggtttttgctggaaatttatatcagtgtctgggctcccaagaacataaatgtaattgccaaagcaagcagtgatgtggtgtgtttattttcttttactcatctaggaacttgacgcagctttatatttaataaaataatagagattgcattattttaaggta

SEQ ID NO: 63879 - DNA, 1614 bp, Homo sapiens
gccaggcacttccggcggcgcgctgcaggcgcggggaacaccaatggcggggtacttgaagctggtgtgtgtttcctttcagcgtcaagggttccacactgttgggagtcgctgcaagaatcggacaggcgctgagcacctgtggctgacccgacatctcagggacccatttgtgaaggctgcgaaggtggagagttaccggtgtcgaagcgccttcaagctcctggaggtgaacgagaggcaccagattctgcggcccggccttcgggtgttagactgtggggcagctcctggggcctggagtcaggtggcggtgcagaaggtcaacgccgcaggcacagatcccagctctcctgttggcttcgtgcttggggtagatcttcttcacatattccccctggaaggagcaacttttctgtgccctgctgacgtgactgacccgagaacctcacagagaatcctcgaggtgcttcctggcaggagagcagatgtgattctgagcgacatggcgcccaatgccacagggttccgggacctcgatcatgacaggctcatcagcctgtgcctgacccttctcagcgtgaccccagacatcctgcaacctggggggacattcctttgtaaaacctgggctggaagtcaaagccgtcggttacagaggagactgacagaggaattccagaatgtaaggatcatcaaacctgaagccagcaggaaagagtcatcagaagtgtacttcttggccacacagtaccacggaaggaagggcactgtgaagcagtgaggatttcttgtgccattttcataatggtcattagctccttttaagctagaaacgtagcctgagctcctgaagagttcctgggagatttgagctgattttggagatggagcaggacaagtggggagtctctctctctctttctctctctctctttttaaccaaaaagagatgacaaaactaagttcaggggccatggaaaatgaaaaagtccgctatattgtgatttgggaagagaaagttatcaagagaaagaggtgaggatggaaggatggagaaaaacagactgtgggaaggatcagaaggaatccgccgaggcagggatgggtgtgcccatgtgtgccttgacgggacttcatcttatagactgttaaactgtcacacacaaacaggctttccacccctgctctgagagcaccacgcacagatttccagttcttagtgtggctgtttaaagtagaaaatctgggggctgggtgaggccactcatgcctgtaaacccagggctttagaaggctgaggctgggggattgcttgaagtcaggagttcaagaccaacctgggcaacatagcaacaccccccatgtctacaaaaatgaaaaaccaaaaagcaaaccaaaagaaaaatctgaaatttccatctggggattaacttctgtctttctggtgaacaatatagcaattcacgcattcttcaagcagcaaaagttcccggaacaattagggaagacgtatggtctgaatttatccaggcagtgggtctgctttggtttttgctggaaatttatatcagtgtctgggctcccaagaacataaatgtaattgccaaagca

SEQ ID NO: 63880 - DNA, 2537 bp, Homo sapiens
gccaggcacttccggcggcgcgctgcaggcgcggggaacaccaatggcggggtacttgaagctggtgtgtgtttcctttcagcgtcaagggttccacactgttgggagtcgctgcaagaatcggacaggcgctgagcacctgtggctgacccgacatctcagggacccatttgtgaaggctgcgaaggtggagagttaccggtgtcgaagcgccttcaagctcctggaggtgaacgagaggcaccagattctgcggcccggccttcgggtgttagactgtggggcagctcctggggcctggagtcaggtggcggtgcagaaggtcaacgccgcaggcacagatggagtctcactcttgcccaggctgcagtgcaatggtgtgatctcggctcactgcaacctctgcctacctggttcaagcgattctcctgcctcagcctcccaagtagctgggattacaggcgcccgccaccgcacccagctaattttttctttttgtttttttaagtagagacagggtttcactatgttggctaggctgatctcgaactcttgacctcaggtgatctgcccacctcggcctcccaaagtgctgggattacagatgtgagccatggtgcccggctactcttaatgatgtattgacatctttccccaacagcacagctaaatttccaagtcgcataagccctggggctttcctggtggccccactggggctgctccgtccggaacctagaagaggcttcatggccagggctatggattctttgctctggatgaagctgagacacagttttcatctgttttgtatcttagggttttgagtaagattttctatataaaaaggttctcctgaataatgagatcagccaaccgcccatgcaactgaagacactgtcgtcattgggaaagtttcatcctattccatgtagtgcttgcaccgtaggttctttaaccagctccctcactgtggcatcaaggttgcttttggcttttggctgggatgcgtgtgctgtggtgaatatccttgccatttatgtttcctgctgtaaagccagggtagctgcatgcactggcatttgaacagggtgagacagtccacccagagctctcccaagtctctcccaaataccttagagtagggacactggtccccatttattggtgagaaaacaggctcagggtttcatgacttgttgaaagtgcagaaatggaatgctggccccctggatctgcacatctgcctcgctgctggtttgcgatcccagctctcctgttggcttcgtgcttggggtagatcttcttcacatattccccctggaaggagcaacttttctgtgccctgctgacgtgactgacccgagaacctcacagagaatcctcgaggtgcttcctggcaggagagcagatgtgattctgagcgacatggcgcccaatgccacagggttccgggacctcgatcatgacaggctcatcagcctgtgcctgacccttctcagcgtgaccccagacatcctgcaacctggggggacattcctttgtaaaacctgggctggaagtcaaagccgtcggttacagaggagactgacagaggaattccagaatgtaaggatcatcaaacctgaagccagcaggaaagagtcatcagaagtgtacttcttggccacacagtaccacggaaggaagggcactgtgaagcagtgaggatttcttgtgccattttcataatggtcattagctccttttaagctagaaacgtagcctgagctcctgaagagttcctgggagatttgagctgattttggagatggagcaggacaagtggggagtctctctctctctttctctctctctctttttaaccaaaaagagatgacaaaactaagttcaggggccatggaaaatgaaaaagtccgctatattgtgatttgggaagagaaagttatcaagagaaagaggtgaggatggaaggatggagaaaaacagactgtgggaaggatcagaaggaatccgccgaggcagggatgggtgtgcccatgtgtgccttgacgggacttcatcttatagactgttaaactgtcacacacaaacaggctttccacccctgctctgagagcaccacgcacagatttccagttcttagtgtggctgtttaaagtagaaaatctgggggctgggtgaggccactcatgcctgtaaacccagggctttagaaggctgaggctgggggattgcttgaagtcaggagttcaagaccaacctgggcaacatagcaacaccccccatgtctacaaaaatgaaaaaccaaaaagcaaaccaaaagaaaaatctgaaatttccatctggggattaacttctgtctttctggtgaacaatatagcaattcacgcattcttcaagcagcaaaagttcccggaacaattagggaagacgtatggtctgaatttatccaggcagtgggtctgctttggtttttgctggaaatttatatcagtgtctgggctcccaagaacataaatgtaattgccaaagca

SEQ ID NO: 63881 - DNA, 2128 bp, Homo sapiens
gccaggcacttccggcggcgcgctgcaggcgcggggaacaccaatggcggggtgagctgggcgctgctgctgcgcgtgcagacagcgggagtggttgggggtccgcccggtcgccttcctcggtcctggcctcggggctgggtgccgagcgctgggcaccgtccccgcactcagcgagcgcgacaggggcgaggccaggattccgggtcgcagttccccgggaggagggcgccctcaggtctccaggggcagggccggcggggccgtggggaggccggggccggcggcggagtccaggtggggggcgcagcgccggggcccagatccaaggcgccgggggcgagcccggggcgggatttcgcttctgggccgggtagctccattgcccgcgcttcctgggctgtcgagtgggccctggcccccgggaccggcttgtgccattttcccgggagaccccttaagcgaggggaagacagcgactcacggtcagcagtcagtgcctcctggcttgtcagcacgctttggtgttgcagaagctagaagctttggccttggagccatgagggtacttgaagctggtgtgtgtttcctttcagcgtcaagggttccacactgttgggagtcgctgcaagaatcggacaggcgctgagcacctgtggctgacccgacatctcagggacccatttgtgaaggctgcgaaggtggagagttaccggtgtcgaagcgccttcaagctcctggaggtgaacgagaggcaccagattctgcggcccggccttcgggtgttagactgtggggcagctcctggggcctggagtcaggtggcggtgcagaaggtcaacgccgcaggcacagatcccagctctcctgttggcttcgtgcttggggtagatcttcttcacatattccccctggaaggagcaacttttctgtgccctgctgacgtgactgacccgagaacctcacagagaatcctcgaggtgcttcctggcaggagagcagatgtgattctgagcgacatggcgcccaatgccacagggttccgggacctcgatcatgacaggctcatcagcctgtgcctgacccttctcagcgtgaccccagacatcctgcaacctggggggacattcctttgtaaaacctgggctggaagtcaaagccgtcggttacagaggagactgacagaggaattccagaatgtaaggatcatcaaacctgaagccagcaggaaagagtcatcagaagtgtacttcttggccacacagtaccacggaaggaagggcactgtgaagcagtgaggatttcttgtgccattttcataatggtcattagctccttttaagctagaaacgtagcctgagctcctgaagagttcctgggagatttgagctgattttggagatggagcaggacaagtggggagtctctctctctctttctctctctctctttttaaccaaaaagagatgacaaaactaagttcaggggccatggaaaatgaaaaagtccgctatattgtgatttgggaagagaaagttatcaagagaaagaggtgaggatggaaggatggagaaaaacagactgtgggaaggatcagaaggaatccgccgaggcagggatgggtgtgcccatgtgtgccttgacgggacttcatcttatagactgttaaactgtcacacacaaacaggctttccacccctgctctgagagcaccacgcacagatttccagttcttagtgtggctgtttaaagtagaaaatctgggggctgggtgaggccactcatgcctgtaaacccagggctttagaaggctgaggctgggggattgcttgaagtcaggagttcaagaccaacctgggcaacatagcaacaccccccatgtctacaaaaatgaaaaaccaaaaagcaaaccaaaagaaaaatctgaaatttccatctggggattaacttctgtctttctggtgaacaatatagcaattcacgcattcttcaagcagcaaaagttcccggaacaattagggaagacgtatggtctgaatttatccaggcagtgggtctgctttggtttttgctggaaatttatatcagtgtctgggctcccaagaacataaatgtaattgccaaagca

SEQ ID NO: 63882 - DNA, 1741 bp, Homo sapiens
gccaggcacttccggcggcgcgctgcaggcgcggggaacaccaatggcggggtacttgaagctggtgtgtgtttcctttcagcgtcaagggttccacactgttgggagtcgctgcaagaatcggacaggcgctgagcacctgtggctgacccgacatctcagggacccatttgtgaaggctgcgaaggtggagagttaccggtgtcgaagcgccttcaagctcctggaggtgaacgagaggcaccagattctgcggcccggccttcgggtgttagactgtggggcagctcctggggcctggagtcaggtggcggtgcagaaggtcaacgccgcaggcacagatcccagctctcctgttggcttcgtgcttggggtagatcttcttcacatattccccctggaaggagcaacttttctgtgccctgctgacgtgactgacccgagaacctcacagagaatcctcgaggtgcttcctggcaggagagcagatgtgattctgagcgacatggcgcccaatgccacagggttccgggacctcgatcatgacaggctcatcagcctgtgcctgacccttctcagcgtgaccccagacatcctgcaacctggggggacattcctttgtaaaacctgggctggaagtcaaagccgtcggttacagaggagactgacagaggaattccagaatgtaaggatcatcaaacctgaagccagcaggaaagagtcatcagaagtgtacttcttggccacacagtaccacggaaggaagggcactgtgaagcagtgaggatttcttgtgccattttcataatggtcattagctccttttaagctagaaacgtagcctgagctcctgaagagttcctgggagatttgagctgattttggagatggagcaggacaagtggggagtctctctctctctttctctctctctctttttaaccaaaaagagatgacaaaactaagttcaggggccatggaaaatgaaaaagtccgctatattgtgatttgggaagagaaagttatcaagagaaagaggtgaggatggaaggatggagaaaaacagactgtgggaaggatcagaaggaatccgccgaggcagggatgggtgtgcccatgtgtgccttgacgggacttcatcttatagactgttaaactgtcacacacaaacaggctttccacccctgctctgagagcaccacgcacagatttccagttcttagtgtggctgtttaaagtagaaaatctgggggctgggtgaggccactcatgcctgtaaacccagggctttagaaggctgaggctgggggattgcttgaagtcaggagttcaagaccaacctgggcaacatagcaacaccccccatgtctacaaaaatgaaaaaccaaaaagcaaaccaaaagaaaaatctgaaatttccatctggggatgaaaggcctcgacatgaattcatatcgagcgccttcatcccccagcttgggctagtaactggagctcttctgacttgaagcaaagggttcttgttatgcagggctggggaaaggcagggcaggctctgccctgtgggaagaggtgggatgtgtaagaatggcatgaaggcactggatatgaattcatgtccagtgctttcatccccaaaagctacatttggataaataaaacatacagtcttaaaacacctgatttctgttggcagtaaagagtgcagatagctgcctctcacagacactcatggagtgtc

SEQ ID NO: 63883 - DNA, 1770 bp, Homo sapiens
gccaggcacttccggcggcgcgctgcaggcgcggggaacaccaatggcggggtgagctgggcgctgctgctgcgcgtgcagacagcgggagtggttgggggtccgcccggtcgccttcctcggtcctggcctcggggctgggtgccgagcgctgggcaccgtccccgcactcagcgagcgcgacaggggcgaggccaggattccgggtcgcagttccccgggaggagggcgccctcagcgtcaagggttccacactgttgggagtcgctgcaagaatcggacaggcgctgagcacctgtggctgacccgacatctcagggacccatttgtgaaggctgcgaaggtggagagttaccggtgtcgaagcgccttcaagctcctggaggtgaacgagaggcaccagattctgcggcccggccttcgggtgttagactgtggggcagctcctggggcctggagtcaggtggcggtgcagaaggtcaacgccgcaggcacagatcccagctctcctgttggcttcgtgcttggggtagatcttcttcacatattccccctggaaggagcaacttttctgtgccctgctgacgtgactgacccgagaacctcacagagaatcctcgaggtgcttcctggcaggagagcagatgtgattctgagcgacatggcgcccaatgccacagggttccgggacctcgatcatgacaggctcatcagcctgtgcctgacccttctcagcgtgaccccagacatcctgcaacctggggggacattcctttgtaaaacctgggctggaagtcaaagccgtcggttacagaggagactgacagaggaattccagaatgtaaggatcatcaaacctgaagccagcaggaaagagtcatcagaagtgtacttcttggccacacagtaccacggaaggaagggcactgtgaagcagtgaggatttcttgtgccattttcataatggtcattagctccttttaagctagaaacgtagcctgagctcctgaagagttcctgggagatttgagctgattttggagatggagcaggacaagtggggagtctctctctctctttctctctctctctttttaaccaaaaagagatgacaaaactaagttcaggggccatggaaaatgaaaaagtccgctatattgtgatttgggaagagaaagttatcaagagaaagaggtgaggatggaaggatggagaaaaacagactgtgggaaggatcagaaggaatccgccgaggcagggatgggtgtgcccatgtgtgccttgacgggacttcatcttatagactgttaaactgtcacacacaaacaggctttccacccctgctctgagagcaccacgcacagatttccagttcttagtgtggctgtttaaagtagaaaatctgggggctgggtgaggccactcatgcctgtaaacccagggctttagaaggctgaggctgggggattgcttgaagtcaggagttcaagaccaacctgggcaacatagcaacaccccccatgtctacaaaaatgaaaaaccaaaaagcaaaccaaaagaaaaatctgaaatttccatctggggattaacttctgtctttctggtgaacaatatagcaattcacgcattcttcaagcagcaaaagttcccggaacaattagggaagacgtatggtctgaatttatccaggcagtgggtctgctttggtttttgctggaaatttatatcagtgtctgggctcccaagaacataaatgtaattgccaaagca

SEQ ID NO: 63884 - DNA, 1452 bp, Homo sapiens
  misc_feature (1266)..(1266): n is a, c, g, or t
  misc_feature (1268)..(1268): n is a, c, g, or t
  misc_feature (1285)..(1285): n is a, c, g, or t
  misc_feature (1287)..(1287): n is a, c, g, or t
gccaggcacttccggcggcgcgctgcaggcgcggggaacaccaatggcggggtacttgaagctggtgtgtgtttcctttcagcgtcaagggttccacactgttgggagtcgctgcaagaatcggacaggcgctgagcacctgtggctgacccgacatctcagggacccatttgtgaaggctgcgaaggtggagagttaccggtgtcgaagcgccttcaagctcctggaggtgaacgagaggcaccagattctgcggcccggccttcgggtgttagactgtggggcagctcctggggcctggagtcaggtggcggtgcagaaggtcaacgccgcaggcacagatggagtctcactcttgcccaggctgcagtgcaatggtgtgatctcggctcactgcaacctctgcctacctggttcaagcgattctcctgcctcagcctcccaagtagctgggattacaggcgcccgccaccgcacccagctaattttttctttttgtttttttaagtagagacagggtttcactatgttggctaggctgatctcgaactcttgacctcaggtgatctgcccacctcggcctcccaaagtgctgggattacagatgtgagccatggtgcccggctactcttaatgatgtattgacatctttccccaacagcacagctaaatttccaagtcgcataagccctggggctttcctggtggccccactggggctgctccgtccggaacctagaagaggcttcatggccagggctatggattctttgctctggatgaagctgagacacagttttcatctgttttgtatcttagggttttgagtaagattttctatataaaaaggttctcctgaataatgagatcagccaaccgcccatgcaactgaagacactgtcgtcattgggaaagtttcatcctattccatgtagtgcttgcaccgtaggttctttaaccagctccctcactgtggcatcaaggttgcttttggcttttggctgggatgcgtgtgctgtggtgaatatccttgccatttatgtttcctgctgtaaagccagggtagctgcatgcactggcatttgaacagggtgagacagtccacccagagctctcccaagtctctcccaaataccttagagtagggacactggtccccatttattggtgagaaaacaggctcagggtttcatgacttgttgaaagtgcagaaatggaatgctggccccctggatctgcacatctgcctcgctgctggtttgcggnanccagtctctgtggtcgngnggggggacctctccccttccccggaagggcgcttgtgggctcgtgggtggtgcccggacccaggaccccggggtccgcagggcgtgtttgccggccagcggggtcgccctcgcgtggtcggccttgcccctctgggctttttggtcctgagggagcccgtcgccg

SEQ ID NO: 63885 - DNA, 202 bp, Homo sapiens
  misc_feature (174)..(174): n is a, c, g, or t
  misc_feature (178)..(178): n is a, c, g, or t
gccacagagacagagacaaggaaagatagaaatattaatagaaagagacccagagacgcaaagcaggggaaatgaatagagactcagacagaactactcagagacgccgagacgcaaccaggcagagaccttgaaggtgctcccccagattgatattgtgaacatcagcgacantttnagatgacctatagattcttttccc

SEQ ID NO: 63886 - DNA, 394 bp, Homo sapiens
  misc_feature (134)..(134): n is a, c, g, or t
  misc_feature (139)..(139): n is a, c, g, or t
  misc_feature (294)..(294): n is a, c, g, or t
  misc_feature (379)..(379): n is a, c, g, or t
gatctgcctgcctcagcctcccaaagtactgggattacagatgtgagccaccttgcccagccggggattagtgcccttataaaagagaccccaaaaagcgtccttgccccttctgccatgtgagctagaggacngtaanctatgaactaaaaaatgggctctgaccagacaccaaatctgcaagcaccttgattttgcaccatccagcctccggtaccattagaaacgtttctgttgtttataagctaccctgtctatggtattctgtagcgacagtgcaaacaaactaagacncggaccttccaacacaagttaaaggcttcaggggatgctgcctgggtcaacaacatgacagcaacctttactcatgagagacttngagtcagaaccacct

SEQ ID NO: 63887 - DNA, 442 bp, Homo sapiens
tgatgactcatggcttggctctctaaagttcaaccttctatacacaaaccatcggtcacagacagttatcagttatatggccaccctaatttcaaaagagagaagtacaatcccaccatgtgctcacagaggggagaactgtaagtatttgtgaagagcccaagtgcccaccagcccttccttaatcctccctcacttggtacaatagcgggactctcagggaaaggtactgcctccgatgtctctgttgggttgtctgcctgccttacctctttaaaaatactcctgccatcttagagagcaaatgggtaatacaaaataagaagttatatttattccttttagaaaacaaaaggaagaagtatgtagttgagcaaaggttgaataaaaatcacaaattttgtgtttagaggtaattaataaaaataatattatcttcctt

SEQ ID NO: 63888 - DNA, 302 bp, Homo sapiens
cagaaatccattctcattcccgaataggaaataaggccatacgctcagagtttcctctcctgaacgagacgctagcaagctcagaacatgagtaagcccaggtgctccagaaagatttaacaggtcttctcacagctaagctttagaagttcgagtatttccttgatatgggaatttcaaaggtctctaacaagtttctatagttattacttgttgcatttttagaatatgggctaattgctttatgtggtcttttggttgtgctctagaatctgatatgcctcaaacagtagctttccatc

SEQ ID NO: 63889 - DNA, 935 bp, Homo sapiens
attggccaattacaagataaaaatgttcaatttctttaagaatccttgttgacttgtcttttcatctctgctatttatatttgtcactgtttcaacaaagtcttattgctgaggaaggacttgctgcacttactgtaccacatcaaacactggggagggtggtgtttaactttttaaaaaatgttattctgattataacaataatattggcttttttcatgaaaagagcgccaccttgcaaggtttagtgagatttatggaagttgaatacctaagcaggaattgctgctagctccaaaaatttgcgaagcaaaagctagccccaatggttggaagtttgaaactgattaacagatttgcatttgaagtgactccagacattaggtccagacattagttaaaaatagaaagaggaataaagacatctcttctctctagaaaagataacaccacaattaataatccttcccactttcattgagatcagcttgtctgataacctgatatgagtgtgataatgataaacatgataatagtggtacttttgtaattttgctggtgcatttaagaagatagtaaatgatgagttcatcttttcttcgaacattcctattcctagatgtagtttacctcaaatggggaattataactgtctaatttttgttgtgtacctgatgccccttttgctttaataccacagtgtaacaattaaatatcacactatgacatatgatttaagtaggatattttaaagataaattttaggggtaaatgtttacttcaaaatgactccatatttcaaatatctgtttagactgtgaaggccaaataatttttaagaaaacatttgaagagtagtgtgtttgcatttgtgaataatcttactcacagcaagtaaacgtaataaaagccaacatttaagtccaaaaaaaaag

SEQ ID NO: 63890 - DNA, 321 bp, Homo sapiens
cttgctttttagtagctttaggttacttctctaccaagatttggagaaggtttattccatttattactggaaaacatgaaagcaaaatttatcaattttcacttcccacaagaaacctaataggccatcctttgatgtatcttaataagaacttccaagtgtaccttctaggcattttcttcatgtctttcaatattaaaatacttagagagttgggcttggcagtgcatgcctgtagtccccgttactcagaatgatgacgcaggaggattacttgcctgaagttcgagtctagcctggactagtgagtccctcatgtct

SEQ ID NO: 63891 - DNA, 268 bp, Homo sapiens
cactgcagcctgggtgacagtgagactctatctaaaaacagcaacaaaaaacaaaacaaacaaaaaaagagaagctcattccacagacttttggaggtttggggtcagacagtgacatcaggaaagtgatgttggagtggagggggcttgggagagggccaggtgtaaggcattaggaaatggctgaaggagggtgaatgtcaagggtctggagggaggagaatttgggactggatgaccagatctacggaaggcagaggggcctttg

SEQ ID NO: 63892 - DNA, 1216 bp, Homo sapiens
  misc_feature (1192)..(1194): n is a, c, g, or t
tgtgccatcagatgccactcttattcagcctatcttgaccttcagtttctttatctgcagaatgcccagtagtgtttgtaaggcttaagtagagacgatttacataaagtagctggcagatgataggtactcaataaataatacttgttattaatgcatttataacttatttttagttctattttcattactaaatagtccccttcttttccagaaaaattagaaaagtcagaagagcaataatgaaatggacattttgctgttatttctattaactaacaacagtgagttcgttgggtaattttacagagattcaaaaagtacattatgttggcttccttaaggtttgagataatcacaactgtaggtccaggtgagaaatctgggacacctcagacagtcagttaaagtgggtggacagaggccctgggtcacagtgagggcaaaagagggcaaggcaaatccaccctcacagggctctgcggttcctgctgctgttgggcaggagcagcagccgccacagacctgggattcaccattagcctagatacgggcacatgctgctccctggagtaggcgctgctgccccatttagcacagaaggactgctacaggatttgtccaccttgttaaacatgtagaaggatcacgacagtccagctgttgctcagatagacacagatgaagatggaagtgagtgtgaggctgagtgctgccctggcgagggcagcactgggagcccagcacactccccagacatgctcacacctgtgtctgcttttccctcctgagtgatacaagtgggtgggaaacgtggggattgttgcccggacccccttcaatatttgggcaccagctgccatgacctcctgtgaagctgggtctggagatgcgcatttctggctggagcctggtctgcctggaaactggagatcggcagccacgttttgtgggccgtgtttaagtcccggttctgccggcctgtcagcttcatgtcctccactccctcaggagcactgtgggtatgagaggacctgcctcacagggtggtggtggcctgggtagtggctgctgctgctgcccctgtgtgttgtatgtttatccattgtatgtggacagaggccctgggtcacagtgagggcaaaagagggcaaggcaaatccaccctcacagggctctgcggttcctgctnnngttgggcaggagcagcggccgc

SEQ ID NO: 63893 - DNA, 377 bp, Homo sapiens
gaatctcttaaatctcttaggaaacaaatttactaattaaaaagaaatataactttataaggatcaggcatgaatatcatacatgatatggtttgagtctttttccccactcaaatctcacctagaattgtaatccccatgtgtcaggggaggtacctggtgggaggtgattggatcatggaagtggttttccccagagttttctcgcgatagtgagttctcatgagatctgattgtttaaaagtgtttggcagttcctgcctctcttgtgctctctcctgccaccttgtgaagaagatgcttgcttttccttcacgttccaccataattatgttttctgaggccaccccagtcatgtggaactgtgagtcaattaa

SEQ ID NO: 63894 - DNA, 621 bp, Homo sapiens
ttcctgcatccgggcctgagagtgcaggcttgagggaagcatggaggtccatggcaagcccaaggctagcccgagttgttcgtcgcccacccgggattcctcaggagtcccagtgtccaaggagctgctgacggcgggaagcgacggccgcggaggtatatgggacaggttgctcatcaactcccaacctaagtccagaaagacctccactcttcaaacagttcggatagagaggagtcccttattggaccaggtacagacatttctcccacagatggcacgggcaaatgaaaagctaagaaaagaaatggcagctgcaccacctggtcgtttcaatattgaaaacattgatgggcctcatagtaaagttatacaaatggatgtggctttgtttgagatgaatcagtcggattcaaaagaagtggacagttcagaagagagttcacaagacagttcagagaacagttcagaatcagaagacgaagatgacagcatcccatctgaagtcaccatagataacattaagcttcccaattctgaaggtggaaaaggcaagattgaagttttggacagtccagcaagtaaaaaaaagaaatagtcaaataaattatctgaaaagaa

SEQ ID NO: 63895 - DNA, 845 bp, Homo sapiens
ttcctgcatccgggcctgagagtgcaggcttgagggaagcatggaggtccatggcaagcccaaggctagcccgagttgttcgtcgcccacccgggattcctcaggagtcccagtgtccaaggagctgctgacggcgggaagcgacggccgcggaggtatatgggacaggttgctcatcaactcccaacctaagtccagaaagacctccactcttcaaacagttcggatagagaggagtcccttattggaccaggtacagacatttctcccacagatggcacgggcaaatgaaaagctaagaaaagaaatggcagctgcaccacctggtcgtttcaatattgaaaacattgatgggcctcatagtaaagttatacaaatggatgtggctttgtttgagatgaatcagtcggattcaaaagaagtggacagttcagaagagagttcacaagacagttcagagaacagttcagaatcagaagacgaagatgacagcatcccatctgaagtcaccatagataacattaagcttcccaattctgaaggtggaaaagtagagacgggatttcaccgtgttagccaggatggtctcaatctcctgacctcgtgttccacccttcttgacctgccaaagtgttgggattacaggcatgagccaccgtgcccggctggaaactagcttatctttattttcttcatctattccaaggtgaggacacaccgttcctctgctccagaggatgcactacaaggcaccatcttaaaactagaggccaaacctgctgacacctttatcttagacttcccggcctccagaactgtaagagaataaatttctgttctttata

SEQ ID NO: 63896 - DNA, 484 bp, Homo sapiens
ttcctgcatccgggcctgagagtgcaggcttgagggaagcatggaggtccatggcaagcccaaggctagcccgagttgttcgtcgcccacccgggattcctcaggagtcccagtgtccaaggagctgctgacggcgggaagcgacggccgcggaggtatatgggacaggttgctcatcaactcccaacctaagtccagaaagacctccactcttcaaacagttcggatagagaggagtccctgatgtggctttgtttgagatgaatcagtcggattcaaaagaagtggacagttcagaagagagttcacaagacagttcagagaacagttcagaatcagaagacgaagatgacagcatcccatctgaagtcaccatagataacattaagcttcccaattctgaaggtggaaaaggcaagattgaagttttggacagtccagcaagtaaaaaaaagaaatagtcaaataaattatctgaaaagaa

SEQ ID NO: 63897 - DNA, 835 bp, Homo sapiens
ttcctgcatccgggcctgagagtgcaggcttgagggaagcatggaggtccatggcaagcccaaggctagcccgagttgttcgtcgcccacccgggattcctcaggagtcccagtgtccaaggagctgctgacggcgggaagcgacggccgcggaggtatatgggacaggttgctcatcaactcccaacctaagtccagaaagacctccactcttcaaacagttcggatagagaggagtcccttattggaccaggtacagacatttctcccacagatggcacgggcaaatgaaaagctaagaaaagaaatggcagctgcaccacctggtcgtttcaatattgaaaacattgatgggcctcatagtaaagttatacaaatggatgtggctttgtttgagatgaatcagtcggattcaaaagaagtggacagttcagaagagagttcacaagacagttcagagaacagttcagaatcagaagacgaagatgacagcatcccatctgaagtcaccatagataacattaagcttcccaattctgaaggtggaaaagatgcgccagtcttgctcccatcagcaccaatcctacctccatcgctaaccccactaaaacactcaccaagacctcaactcctgacccccatgcctcaggatactcctcaatagccatcgctgtagtatatccaaagacaaccatcattccccctaaataaattaaaaaaactattaaacccatataacctcccccaaaattcagaataataacacacccgaccacaccgctaacaatcatactaaaccccctgatgggacgaagactgggggatctctagacac

SEQ ID NO: 63898 - DNA, 597 bp, Homo sapiens
ttcctgcatccgggcctgagagtgcaggcttgagggaagcatggaggtccatggcaagcccaaggctagcccgagttgttcgtcgcccacccgggattcctcaggagtcccagtgtccaaggagctgctgacggcgggaagcgacggccgcggaggtatatgggacaggttgctcatcaactcccaacctaagtccagaaagacctccactcttcaaacagttcggatagagaggagtcccttattggaccaggtacagacatttctcccacagatggcacgggcaaatgaaaagctaagaaaagaaatggcagctgcaccacctggtcgtttcaatattgaaaacattgatgggcctcatagtaaagttatacaaatggtaactatgctttgttttcatatgagttcagaagagagttcacaagacagttcagagaacagttcagaatcagaagacgaagatgacagcatcccatctgaagtcaccatagataacattaagcttcccaattctgaaggtggaaaaggcaagattgaagttttggacagtccagcaagtaaaaaaaagaaatagtcaaataaattatctgaaaagaa

SEQ ID NO: 63899 - DNA, 995 bp, Homo sapiens
ttcctgcatccgggcctgagagtgcaggcttgagggaagcatggaggtccatggcaagcccaaggctagcccgagttgttcgtcgcccacccgggattcctcaggagtcccagtgtccaaggagctgctgacggcgggaagcgacggccgcggaggtatatgggacaggttgctcatcaactcccaacctaagtccagaaagacctccactcttcaaacagttcggatagagaggagtcccttattggaccaggtacagacatttctcccacagatggcacgggcaaatgaaaagctaagaaaagaaatggcagctgcaccacctggtcgtttcaatattgaaaacattgatgggcctcatagtaaagttatacaaatggatgtggctttgtttgagatgaatcagtcggattcaaaagaagtggacagttcagaagagagttcacaagacagttcagagaacagttcagaatcagaagacgaagatgacagcatcccatctgaagtcaccatagataacattaagcttcccaattctgaaggtggaaaagtagagacgggatttcaccgtgttagccaggatggtctcaatctcctgacctcgtgttccacccttcttgacctgccaaagtgttgggattacaggcatgagccaccgtgcccggctggaaactagcttatctttattttcttcatctattccaagagttttctccatccctttactttgagcttctgagtgtcactgcatgtgaggtgggtctcttgaagatagcataccattggattttgcttctttatccaagttgccacactgtttcttttgattggggcatttagcccatttacattcaaggtgaggacacaccgttcctctgctccagaggatgcactacaaggcaccatcttaaaactagaggccaaacctgctgacacctttatcttagacttcccggcctccagaactgtaagagaataaatttctgttctttata

SEQ ID NO: 63900 - DNA, 401 bp, Homo sapiens
cccctaccaaatacatatttaacatttacatagtattttgcaggtggtttagataggtttactgatccccagaaacccatctatggaccctgcaaagctccaaaattagaaggaaggtggctgggtgcagtggctcactcctataatcccagcactttgggaggccaagatgggtggatcacaaggtcaggagttcaagaccagcctggccaagatggtgaagccccatctctactaaaaatacaaaaattagctgagcatggtggcaggcgcctgtaatcccagctactcgggaggctgaggcagagaactgcttgcacccaagaggcagaggttgcagtgagccaagatcatgccactgcaatctagcctgggtgacagagcgagactccatctcaaga

SEQ ID NO: 63901 - DNA, 477 bp, Homo sapiens
tccgcctcaaaaaaaaaaaaaatgtttataattgctcatcacaataaataatttattagaaaaatagttgcttatgtcataggtgaagtatttataacctgccttatttcattaaattcctctcactttgatagtttatgatctctgttggaaaacacaatgtatctcttgcagcacaggtaccatgcaggggatgtaggatggatgcctaagtaaaccataggtatggtaaagaagcactccaaagaataatgcttaccactcactcctcttcatacagataaaaaaactcccaacctgtttgctaagcccattagtaagtcttttgggttctacctccaaagacagttgaaatccgtatactacttttcattttctatcctggtccatttttttcttagccagagctactacaataaccatctaatctaaatggactccttgcactccattctccacaaatatgatacagattta

SEQ ID NO: 63902 - DNA, 581 bp, Homo sapiens
gttgggtgcacttacaagtaagtataaactgctcttcaattcaagtttattaatgctgccccaccccagggttttaatccggtctgggcagaagcgggcgataaaagccaaaggagaccataaagtgtaggatatttcctggttagtggctgccgggtaatcacgatgcatccatcttcctcggcgtcgcagccctcagtagccagaaggcagtctccttccctggggggcaaaagccccgagcccagcctgcccgttgccccgctcccgcggtggatgaacctcaacccttcccaggctccttcctggccccagggtcccaggacccccgagaccctggggtgcggcgccactgaggcccagaccgggggaaggagaccctgtcactcgggagcggagccctgtcccgggagcgcacggaaatgcctcctccacgctcccaaggttcctgctccgccaggcccaaccggaaggagtcctcgggccgcagtggggcaccaccgggccgccgggccctccaggctgcgtggggcctgcctcagtgggcaactggggagctagcccggggcggccgcaagccg

SEQ ID NO: 63903 - DNA, 156 bp, Homo sapiens
  misc_feature (11)..(11): n is a, c, g, or t
  misc_feature (13)..(13): n is a, c, g, or t
  misc_feature (15)..(16): n is a, c, g, or t
  misc_feature (136)..(136): n is a, c, g, or t
  misc_feature (138)..(138): n is a, c, g, or t
  misc_feature (141)..(141): n is a, c, g, or t
  misc_feature (147)..(147): n is a, c, g, or t
  misc_feature (149)..(149): n is a, c, g, or t
  misc_feature (151)..(151): n is a, c, g, or t
  misc_feature (155)..(155): n is a, c, g, or t
aagcttatgcnangnncatatcaccacgttatattgagaatgttaagtaagtaaattattcctttagtgtcctgaattcacatatggagaagaattacattttgggaatctttacttaacagagtatattcaagantntantggtantngntttna

SEQ ID NO: 63904 - DNA, 176 bp, Homo sapiens
ctaacgttaatagttaattctaggtgttgagatcagggtgtatagtgtatattattatttgtacttttctttaccttttatatttctcaaaatacattatgtcccttatgttgattaaaccatattctactaaccagtcaaaatattgaaaaaacctagtctttgctggaatttga

SEQ ID NO: 63905 - DNA, 343 bp, Homo sapiens
aagatttagaaattatttattgactttctaccgtggaagataaaatttaagaccaggccaggcacagtgtggctcatgcctgtaatcccagcactttgggaggcctaggcaagaagatcacttgaggccaggagttcaagaccagcctgggcaacataacaaaaccctgtctctacaaaaaatttaaaaattagccaggcatggtggcacatgcttgtagttccagctactcaggaggctgaggtgggaggatcatttgagccagggaggttgaggctgcagtgagccatgattgtagtactgcatttcgacctgggtgacagagcgagaaccaatatctaaa

SEQ ID NO: 63906 - DNA, 286 bp, Homo sapiens
cagaccttcaaggcaaagaccacactcaaggcagaatctgcagggccatccaagcagacaggctacaaacccatctccacaggagactctacagggagaccaatgaggacttaacctaggagcaagggtgaggaaaaactataccccatcctctgacttcttgcccccactcccaaccccacacatcatggagccccaatatcattgtgtggagaattcatctgcatatctacccaggcagccatccaaaagacagccgaagtcctgagctttagttctaatcctc

SEQ ID NO: 63907 - DNA, 1641 bp, Homo sapiens
gttaaataagttgtctttaaacagaaaaacataaaagaaggctatgtatttggaatgggttgacagaacgttgtgacttgaggctctttttaagttaacagggcatggtggcatgtgcccgtacttccaaagtagtcccaactgtttggaaggctgaggtgggaggatcatttgagcccaggagtttaaggctacactgagctatgatcactctactgcactccaggtggggcaacaaagcaagaccgctctaagaagggccaggcatggcagctcacacctgtaatcccagcattttgagagcctgaagttggtggatcacttgagcccagcagtttcaatagtaacttgggcaacatagcaaaaccccgtctctacaaaaacaaaacgaaatgaaagaacaaaaagattagccagttgtggtggtgcatgttgtagtctcagctatttgagaggctgagatgggagaattacctgagcccaggaagtcgaggctgcagtgagccatgattacaccactgcactccagcctgggtgacagaccgagaccctgtctcaaaccataaataaaaataaaaaagaagaaaaaaatcaaaagtgtatatattgtggtaggcagcttctgacatgttcccaatgatccctgcctcctggtattctcacccttgtgtaatcctgtccttctgaatgtgagctagacttaataacttgattttaacaaattagacaaaagtgatggtatatcacttctgtaattaggttttaaaagaccatgactgttattttgctgatgtgttctctctggctcttcttttgtgcttgctctgttgaagagggccacttgacaaagaactgaggtcagctaacttgccaatacccagcaaggaactgaggcccatagtccaacaatttgtgaaccctgccaacagctattgagtgagctcagcgatagatactgtcttagttgagtcttgagatgactatggcaccagcctacaccctgattacagtcttgtaaaagatcctggcagagcacttatataaacagtatgtagattcccatagaaactgtgagataataaaatttttttaataaaaaaaagtagagcagtttaggttgatagcaaaattgagaggaaagaagagaattcccgttatctcccctctgctcccacacatgcatagcctcccccattatcaacattcccaccagagtggcacataatacagttaagtatttgtatttacacattaaaacctccaaacacatgcttgagatggggtgtgcagtaataagcactactgtgttttaacctttggcagcttttattctttcctcccaactttcaattattttcttttcatttccaattttttaacctttctctacttgaaaatagtgaccagtttctttttggttatagtcatcctaatgtgtatgatgtaatatctcattatggttttggttttcatttccgtaatgaataatggtgatgagcatcttttcctgtgcttcttaaacattgtatattttatttggtaaaatgtaattcaaacccattgcccatataaattgtgcatatttgtctttttattgttgagttgtaaaagttctttttacatagtagataaaaaaaaaaa

SEQ ID NO: 63908 - DNA, 1339 bp, Homo sapiens
tggcattgggactgactccagcctctgctccgggaggccctcccgggctgcctgacctcccgggaccatgcagaaggcctcccacaaaaacaaaaaagaaagaggagtcagcaacaaggtcaaaacatctgtacacaacttgagcaaaacacagcagaccaaactcactgtgggtagcctgggattaggcctcatcatcatccagcatggaccctacctccagatcacccacctcatcaggaagggggctgcagccaacgacgggaaactccagccaggctgtacaggaagcatggctggggaggcctcaggaaacttacaatcatggcagaaggtgaagaggaaggaggtgatgttctgattagtgttggccatgccaatgtgttaggatatactcttcgagaatttttacagcttttgcaacatatcactattggaacagtgctacaaatcaaggtttaccgagattttattaacattcctgaagaatggcaagaaatatatgatttaatccctgaggccaaattcccagtaacaagcacaccaaagaaaattgagctggcaaaagatgaatctttcacaagcagtgatgataatgaaaatgtagatttagataaaagacttcaatattatagatatccgtggtcaactgtgcatcaccctgcaaggagaccaatatccatctccagagactggcatggatataagaagaagaaccatactattagtgtaggaaaagacattaattgtgacgtgatgattcacagagacgacaagaaagaagtgagggccccttctccatactggataatggtgaagcaagacaatgaaagctcttcctcctctacctcctctacctcagatgcattttggctggaagattgtgcccaagttgaagagggtaaagcccaactggtatcaaaggttggttagcaaatctgtggtcatatgagcatttatcttgcagacacccaagttttgtgcctcaccaggcacaagtttgctgtacttatcaaggactgtctgtagactcaccaattctcttctcttatgactgcgttataaagcctttagagatgttcttcaacaggattatctaaagacttccttgggttcttgcaggcctcacaaatcttattttcagaataagaccctcctttttgagaagaatttctttcttttagaaaatgccgtagagaaatccaatatcagaatgtctgaacatagtagagaatgtcactttatgtaaacactacatttttctttaaatatttagtttctctcttttttttggtaaacttcaagtactataattaaaataactaagagacataaaaat

SEQ ID NO: 63909 - DNA, 357 bp, Homo sapiens
tctgaaatttcctacagaaaatggccttctttcattgaaaaggttttaggcttacagctctgtgaattggaatttgaaagttgtcaatgctgtgttgatttactcgagttactgatgataggagccttttggtgtattggagctcttttggatgtacgtgcagaaacccaactgaaactgacgtaagccaaagtaaagaagtgatgtgttattgactcacataagtgaaaagtctggggtagggctcaagtatgactttttccagggttgcaaactctgccattataactggccccactgtttcttggcagtgtttccttcagtgttggcttcgtatgcaggcaggttttccccagg

SEQ ID NO: 63910 - DNA, 352 bp, Homo sapiens
aaactctctgattgtgtgcccaggtttcagggagcagggacagtcatgcagaaatgtgaccggacagaaggaaatgatgtaatggtaacaggctaactagggacactcggtgaggcctgtctgttcagatcttgctcagcctctctgtgtagctttccttcctcgcaggtatccggcaggaccctttctgtaatggggggcctattacctaccattaaataagataggtcagaaaattttttctggccaattcttacacagaaaaacagccaaaagtgaaagtgcctttaggctacacgttggctttggggaaaaggaactctggtttctgtgacactcgttggggcagaga

SEQ ID NO: 63911 - DNA, 536 bp, Homo sapiens
aagtaaaccacggaaactacatcatccaaacccgaaacgcggcaggttggccacaaatagagggctaatttgaaggacaatgaaattttaacttatccccagtgcctaccatttattagcgaatctcaagatagccgagaacatttattcttttcacatctatagtagcaatccccagtcaactccagactaacctgttaagtaccagagaataaacatcacagagacgctatagcctgggccaaatggcctggctccagagtctccagtagtctagaactacccaacaggaaattgttgctgacatttctgaagaaacctcttcacttggttttcttttttatacatctagatcttagaaatgaaaactccttggactccctggctgtcaaagaggcggcttgaacgtactcagcatcagaaaatgaaacatttgctttcactgtctgtttcttagtggaagaatcactccatggctgtcagttggcagatccatggttgcagctctctcattccatccctggatatgggccatg

SEQ ID NO: 63912 - DNA, 373 bp, Homo sapiens
ttggtcctcaagtcctattttaaaattttgtcaattagaggactcttggttctcttggttgactcattctctgctgatttgttctctgtacttgcagcaaataaagtgcagtcattgagaatgttcctgtgtcactgtgatgtatcaagggatcttcatgttaatatctgtttctctgacaactgtgttttatactttgtactgtagctttcattggagaagccctgggctcataagagtgatttgttgtggcatttccttatggaacataagctttgaaatatacttgagataaatattcatgggagacatccaaatgcagtaatgagagtacaatgaagacagcatttggacttggaaaacctgagttcaa

SEQ ID NO: 63913 - DNA, 649 bp, Homo sapiens
gagataaatagatagtttgagagaaattaagcagatagaatgactaggacttggcagttgactggatatggtgggcctggtgaatgagaggcaggagtcaagattgatggtcaggtttctgacttgggcagtgggtatatagtgatgcttgtacgaagattgagaaagtaaaagggaaagtaaatatcaagcagtttcaagcagcagtcagctgctgggctggctcaccacacttctgtagattccgttgaaaaggagacaatgagcctagatagatttagacagtttattactcaaagcaaagtaggcagcatgatcttcatgcatctatgaattccccaaatcccatgatacagagtgaggcccagacagatgctgtgtacacggtggacctgtgtcctcccaatcttataagaggctacttgcaaacttgcccaaaatcattgtcctggaggttgacattatctttgttatgctggtcaggaaacaaatgtaccctctaacccagaagcatatcctgtctttactcagagacaaataaaaacaccatggacaattacctttcaacagtaagagaatgctttccattttggacataatgaatttgaaatgcccatgatatctaaataaaggtattcagtagataata

SEQ ID NO: 63914 - DNA, 369 bp, Homo sapiens
gacatcctagatcctttaagtcctccctcaatctcatgtagtgggtattcttttgagcattattcagaggagataatttgcccaaagccagacaagtattaagtagcagagtcaggatccaattccagggctgtctgatttcagagccttttagctaccctgctaggtcttgcaatagtaatgggccctctcattgcttacctgtcaggccttagaattcttagaatttagctgcctctacaccattgtcttggttctcactccagggttaggggctgcctggtcaacactgaggtctttaactgtgctgaagcattaggatagaaatttagtctaataaatacttactggatacctactacatgcaaa

SEQ ID NO: 63915 - DNA, 709 bp, Homo sapiens
  misc_feature (35)..(36): n is a, c, g, or t
  misc_feature (58)..(58): n is a, c, g, or t
  misc_feature (72)..(72): n is a, c, g, or t
  misc_feature (78)..(78): n is a, c, g, or t
  misc_feature (93)..(93): n is a, c, g, or t
  misc_feature (111)..(111): n is a, c, g, or t
  misc_feature (122)..(122): n is a, c, g, or t
  misc_feature (128)..(128): n is a, c, g, or t
  misc_feature (130)..(130): n is a, c, g, or t
  misc_feature (142)..(142): n is a, c, g, or t
  misc_feature (147)..(147): n is a, c, g, or t
  misc_feature (172)..(173): n is a, c, g, or t
ggctagaccctcctcagctccaaagtactgggatnnaggctgagcactgtgccggccnagaataatttttgnctcttngaaatcatgtttctnctctacatttcccccaanccgtgtacctngctacntngaaaatatcttngcttntaccatgatgtaactagatgcgatnntatttgtatttaccttgcatagtgttcagagaacctcttgactctgagttgatttcttccagcagtagcagtagctcttcaaatattgtttttgtccctttctctcctctcctggaactccatctaaaagtgtttttctaaatttcatatttagatcctcaatctgtctggaaataatcatgtaaaatctttttattttgaaataattttagacttacagaaaagctgaaggactagtactaagaattccagtatactctatcaagattcctcatatgttaacctgtcatgattatcacttccctgtatataccatgtatacacacatagtttttttgggggtgggggggctgtttcagcatgaactatagacataatgctcctttactgctgaatatttcagtgtgtatttccagaaaaacaaggacattcttttttataaccatagtaataacattgataggatgctagtatctaatgtataacctttcattaaattttgccagttgtgctaatttcagatatagcaaaagaga

SEQ ID NO: 63916 - DNA, 267 bp, Homo sapiens
gatcttttattaattcatctacaaagtggaggataatagaacctttcccgctgagctgttttgagaactaaacaccacaatgtttgtgcagtacctgcacagattgccgtagcagggtgtgcaatcagcaaagatttcctgaatcccaatctgacccattgtcgcatggcatggcaacttttcaactttcagaaaaacattgaattaaggcccttgcactattatttcaaagcacacgagtgcaattggatatgattttgaacacag

SEQ ID NO: 63917 - DNA, 261 bp, Homo sapiens
tgtgtggagctatttgttgtcaactgaacatccctgccaccccttctaatgtctccctgctccatggaagagaaatcaggactgtagttgtaatttgcagaattctcttctctgtgaggttcaggagagaccatccaggaagacgcacttgtatgaggaaggaggaaggcaaggccagtattctccagtggcagttgtaggcacacgcatggagagatgtaaggttcaaagcagctttcagatgaacttttggagaattgc

SEQ ID NO: 63918 - DNA, 514 bp, Homo sapiens
gaagaactgtaacactcactgtgagggtccgtggctttattcttgaagtcagtgagaccaagaacccaccaattccggaccctatggctcactgtaactttgaattcccaggctccgtagttccccctgccttagtctcctgaatagctgggactacaggcacacagaatcatgccaagctacctttttattttttgtagagaggaggtctcgctgtgaagcccagtttggtctcaaacaggtggactcaagagatcttcccacctcggcctcccaaagtgctagctttacaaatgtgagccaccatgtctggccacgaactcttccaatgagcttttataaaaaaaaataattcaactattcaatgtgagccaaggatgtgccagacatttgctagatgctatgaataaaatatgaccaagattcagtctttgttcctatggactttatagtctactagtagatgagactcataagtaatatgtagccaaaaataaaatttactatattacgg

SEQ ID NO: 63919 - DNA, 396 bp, Homo sapiens
gcctgtaataccagcactatgggaggccaaggcaggtggatcacttataacccaggaatttgagaccagcctgggcaaaagagcaagaccctgtctctacaaaaatttaaaaattagccaggcacagtggctcaagcctatagccccagctacttggaggccgaggcaggcagatcacttgagctcaggagctgaccagcctgggcaacttggcaaaaccccatcttacaagaaatacagaaattagctgggcatggtggtgcacacctgtagtccctgatactctggaggctgaagtggaaggatcgcctgagcccagggaggtgcaggctacagtgagccgtgatcatgctactacactccagtgtgggtgacagagtgcgaccttgtctcaaa

SEQ ID NO: 63920 - DNA, 301 bp, Homo sapiens
tgtacattaaactaccataaaccctgcttgtgggtaaccaaagcacatgtagtggtttaatcatgcaggacctttccaatttggtatggagggaactgcctgatctttcctgagctctcttttctctaataatcacttttgtttattctactcttacatgaatcgtaaaatgttagtaaatagaactatatatgttatagagatgaattccctaaaggccccctcgatgacaacactgtgatgtgtgctccatccttctcgatcctcttatcctcaccaacacttagcgtcagaggtttca

SEQ ID NO: 63921 - DNA, 4448 bp, Homo sapiens
  misc_feature (661)..(661): n is a, c, g, or t
  misc_feature (1130)..(1130): n is a, c, g, or t
  misc_feature (1706)..(1706): n is a, c, g, or t
  misc_feature (1780)..(1780): n is a, c, g, or t
  misc_feature (1793)..(1793): n is a, c, g, or t
  misc_feature (2071)..(2071): n is a, c, g, or t
  misc_feature (2197)..(2197): n is a, c, g, or t
  misc_feature (2264)..(2264): n is a, c, g, or t
  misc_feature (2808)..(2808): n is a, c, g, or t
  misc_feature (2821)..(2821): n is a, c, g, or t
  misc_feature (2828)..(2828): n is a, c, g, or t
  misc_feature (2854)..(2854): n is a, c, g, or t
  misc_feature (2866)..(2866): n is a, c, g, or t
  misc_feature (2868)..(2868): n is a, c, g, or t
gggtggaggaaggactggagcctggtcagttgccggtggtgaaggagaaccgtgatccctttgtcagagggtcttcagtgaggtgttcccctgatcctcgcatccaccccgtgacttccagcgttatcatctccgtcgctatcccaggaacacgggaggttcagaaggggaaagtgatttccctaaggtctcacaacccggtggtactttatgtgagcagcagatattttttcatttatcttttgattttactcgctggtagattttgccatgtatacgttttgacgttttaaatttctctcgggtggaatttactgttctttccgtttggggcacccaaaattcttcactactttgaaatacgaaagttttcccatgattctggtgcagtcacgctctgcgtaacagtgtttctgtcaacgagggacctcatgtaaatggtggtcctatgtgattgtaatactatatttttgtattgtaccgtttcttttctttactttcttttttttttttttttttttgagacggagtctcgctctgtcgtccaggctggagtgcagtggcttgatctcggctcactgcaacctccgcctcctgggttaaagtagtgctctgcctcagcctcccgagtagctgggattacaggcgtgagccaccgcgnccggccagacacaatttattgatgtaactgttcctctaaatactactttaactacatcactcaaatttttatatcttgtattttcttttctgttgttgttgtttttgagactgagtctcactctgtcacccaggctggagtgcagtggcactcagctcactgaaacctctgcctcccgggttcaagcagtcctcctggctgggattacaggcacccgccactacacctggctgatttttgtatttttagtagagacggggtttcaccatgttggcccggctgctctagaactcttgacctcaagtgattctcccgccttggcttcccaaagtgctgggattacaggcatgaaccactgcacccagcctttttattgtgttttcattaccattcaattcaaatttttttaacttcccttgtgacttcattttttacccttatttatttagattgtattgcataatttccnagtttttggagattttccagatcttttttttttttttttgagacagagtctcgctctgttgcccagtctggagtgcagtagcgagatctcggctcactgcaagctccgcctaccaggttcacaccattctcctgcctcagcctccagagtagctgggactacaggcgcccgccactacacctggctaatttttttatttttttttgtatttttagtagagacggggtttcaccgtgttagccaggatggtctctatctcctgacctggtgatccacctgcctcggccttgcaaagtgctgggatcacaggcgtgagccatcgcacccggcccagatctttttatattattgatttatagtttaattctgatttggtcagaatactgtgttacgaatttcaattattttaaatttgttgtggtttgtttttgtattgtatttttgtttcattttgttttagtagactcctggtctcaagtgatccgctgaccttggcctcccaaagtgctttacaggcgtgagccactgcaccaggcctgttgtagtttgttttaaggtcgaggatatgatgatctntctgggtaactgtttcgtgtgtatttgaataaatattgtgctgttgatcgtagaatcttccttgattgattgantgattgagacagngtctgtctctgttgcccaagctggagtgcagtggttcagtcacagctgtctgcaacctcaaaccttttgcctcagcctcccgagtagctaggactgcaggtgtgcgccctaatccttttgcctcagcctccggagtagctaggactcaaggtgtgagccaccacactcagctaattttctgtattttttgtagagacgaggttttgccatgttgcccaggctggtctcaaacccctgggctcaagcagtccacccacctttgcctcccaaagtgctgngtttacaggcatgagctactgtgcctgaccctctttttccattcttttatcttttttttttttaatttcctgactcctacaactgatcatccttttactttgaatgtagctatgtttttatatttnaaacaaactgcttatagacagcacatggtttggtcttactttttttatataatttgacctctgttanttaattggtgtgtttatgccaattattgatatagttgtgttaaagtctaccatcttgctggtttttttctgtttttcttatttggtctttgtttctgtttacctttttttctgtctacttttgtcttaagtgggtcttttttataattacattttatctccactgttgtcttattgtatatttgtaaaaatttaacagagtttttggttgttaccctaaagtttagtggaactttaaagatatcatactgttttatgtcaatatacttggaacattatactcccaatttcatcctcccgtcttttgcattattgttgtcatacatgttgcagaatattgacatatgctgtaaacccacaaaactttgctactatttttgctttagataatctttcacagtgattaaaagcaagaaaaagtatctattgtgttgatcctcattttaacgattctcgagattttcatttatttgtgtagattcaggtttttgtctgatatcatatttcttctatttaaataacttcattaaacatttcttctatgnaggtctactgatnatgaatncgctatgtttttgttgtttgaaaaangtttttacttcntnatcattttgaagaatttttgctgggtatagaattctgagttaatagttttttgctttagttgcttttttgttgttgtgaaagcactttcaggatgtcactactttgttttctggcttagtttctgatgagaaggtggctatgattcattatcttgatttttctatatataatatgtcttttttcctctggctactttgaagattttaactttggttttcatttgtttggatatgatgtgtccatgtgtgtttttgtttgagtttagtttttggtattttccctgtttggataaattgagtttcttggacctgtggtttcaaattattatttttggaaaattcttgtccattatgtcttcaaatacttcttttctccttttggaatttcagttacatgtttattagaccatttgatattgtctcacagcccttggatgctctgtccttttatgtttttcttccatttctctttgagtttcagtttgacctatcttcaagtttactgaaacttttcttagctcctttgtctactaatgaacctgctgaaagatcaactctgttactgtacttttcttagcatttccatttgattttttcttgcagtttccatctctgctgaaattccctatttgtttattcatgttgtccaccttttctagtaaagcctttagtatatgaatcatagttgtgttaaatgccctgtctgataatttcagcagttgagggttctgttgattgttttgcctcttttgatagtggattatcttagtcttgcctttatgggtgtctgataatgttagattgaagataggtgctgttagtatgatcttttctgccccttctgaagaggcaaagggactttcccaggaggtggtattttcccaggtggtctctagggatttctaaacaagtcattctaggagttgtaaggcaggtcagacctttaataacaatgccttcctttttcctctattccagttctgccttcatagttctctgcctttgcccaaaactgcagaaaatgaacaaatcccaggtgagttgtttgtttattccccattttgcttttcagtgcatttaaggaagtttataaggatccagaaaatgaaatagaaaagtatgaataagacacaaaggaaacatagcaagaataactaatcaataccagcagccaaaaagcaaattgagttaattaaatgtcttgcattggttatgaataccaattatttggttctgtacattaggtctgaataaattttatggaccttcatatagatggtgttttggacagcacccccagaaacaaccaactttgaaagggttatcactttatctgtggttgtttcatataacattcctcagtgcaagtgcagaagattattgtatgtatttggtttttccagtcagattagcctaatgccagagaatgcagtaaatatgtgggtttgtatttaaatccccccaccccaagcaggtaccactgtcattactttcttgtgtagctttccagagcttatttgtacataattacacaagtacaaataaaagcacaaacgtaagatagcatgttaaaaaaaaaa

SEQ ID NO: 63922 - DNA, 374 bp, Homo sapiens
aaactcagatgatggtggcaggaatgcattctctaaagatttacaccttcctttaacatgaggtggtttacgtgtttgggttcagaagtcagagtgtctaggtttgttccaggttttgccgttcgttaactgagtgaccttgggcgagtcatttttttctgtttcatttttttctcacgtataaagctgtggacagtaatagtggttgtgaggattaagtgaatgaattcatgcaaagcacttcaaacaatgcttggcacataataaatgtatttactgtgctatttcagctgttttctgtagcctttccctgatctcctaaacttgagaggacagagagaactatctctgtaatacagatgagaggcacagga

SEQ ID NO: 63923 - DNA, 100 bp, Homo sapiens
aaattatattatggagaaataacaaaaatactaatataatgctgcacttgaaaacaaaaaggaataccttccatgggccagaagtagatatctaccaaaa

SEQ ID NO: 63924 - DNA, 862 bp, Homo sapiens
tgagacagagtctctctccgttgccaggctggagtgcagagaggctggacttctgtggtgacgggcagacaggactggtggtgttagtcctgatggtctcttaagaggaggtgggtaggccgggaacattggctcatgcctgtaatctcagcactttgggaggctgaggcaggcggatcgcctgaggtcaggagtttgagagcagcctggcaaacatggtgaaaccccgtctctactaataatacaaaaattagctgggcaaggtggtgggtgcctgtaatctcagctactcgggaggctgaggcaggataatcagttgaacctgggaggcggaggttgcagtgagctgagattgcaccatttcactccagcctgggtgacaagagtaaaaatcatcttaaaaaaaagaggtggtgggtaatcagttctcacagtagcctccttctggggttggtcctccaggccatatgcagtgggaagggaggatgagtaaaatggtcatgtcatgtaagtaaaatggtcttgtgtaatcattaggtttttattgaaatatacattgttaataatgtttgtatttttgtttgaaagcttaggaaaagccaattgactgattatccttcaaagagggtgccaaataggagaaaaaaatacattttattgtgttttgtactatgagttcctagaaacgtagtttggatatgaaattttataaaccaattattatgtatagcttgctagttaaaagaagttaaattacttcaaaaagtggagacactttgtaatgcaaacaatcctttgctttgtttctaatattttgccttttgcatattaggttatcttaaatcatgagagagagagaagg

SEQ ID NO: 63925 - DNA, 309 bp, Homo sapiens
aattcattaaattggataacctgattagcctctattactgagctcatcaatcacaccaagggcagaaaactaatagatgtcagcatctggcttggactattactactctttatctacctcctgaaactctgaatcaacaaatctttgttagaatgatgcttagtcactatgctcatttccagctgctgtggaagaaaaaacgctacctttattttttgtaagttccacaaggaagatgcaagttggtatttcctcatttctgagatgcactaacagcatattgcacacaagatcctatgtgttaccaca

SEQ ID NO: 63926 - DNA, 456 bp, Homo sapiens
tgaacttctgacttcaagcaatcctcccatctcagcctcccaaagtgctgggattataggcgtaagccactgtggccagcttaatatctttctagacatcattttgagttattacttcaggaaatatccgctagaaaacttttccatttctggaaactcagtatttttatttgtgagattaagatcccaaaatacaactctaatatacaaaaactgagaccctgaaaaataaagaacagaaaagtcaaacaagaatctctgccttcacatgtttccagaagacagctggtacatgtaattagagtggaagtttatttaaaatatatctaggacaggcatagtggctcacgcctgtaatcccagcactgtgggaggccgaggtgggtagatcacttaaggtcaggagttcaagaccagcctggccaacacggcaaaaccctgtctctactaaaaaca

SEQ ID NO: 63927 - DNA, 459 bp, Homo sapiens
accagcagaaaatcaaggaaaaacttagaataagaacaaaagcagctgtaaagatccaggcctggtggcggggcaccctggtgcgcaggacactgctgcatgcagccctcagggcctggataattcagtgctggtggcggatgacgctgtcgagggtgctggagaagaaacggcaggcagctctgatcgcctacgcaaccagagagagggcagtgatcaagctccagtctttggtccgtatgtggcgtgtccgctggcgatactgccaggtgctcaatgccatctacatcatccagggccactggcaatgccacaactgccagacctgcgctctcctccagggccactgtgtggtcacagccactcacctgcagttccacattgagatcatcaactcctaagggctggcaagaagggcactgtgtctactgtccctattaaaggtctaacctggaaagg

SEQ ID NO: 63928 - DNA, 314 bp, Homo sapiens
ccaggtgattagaaagctgtattgctcacacaaagcctgtttgttggtctcttcacacggatgcatgtgatagatatacaaagcatttttatagtcacattttggtgctcaactaaggctccctgattacacctctgccatatggatagtaagtcacttaagcttgtagaggagtatatttaattctcctttttgattctataatttttaactatagaatctcagtttagcctataggttttctaccatgaaaggcatttctacccctactgtagggtaggaatgagtttcccaatcaaattattaaaagttag

SEQ ID NO: 63929 - DNA, 527 bp, Homo sapiens
taacacttagaaaaatatacccaaactatgtttttaacagataaacagtccttaaggccttcagcatagttgacaaggttcataattcacctttatttaagcaactgagagtcaaaatgggggaaggagatggaatgcggacctaaaagccaaagggcactgtgggtgtaacgctgatgagtgaccttcaaccccaaggaagaaatactgatttcagaccttcttgctctagaagtcaaaatactttccccctgacaagaggtaagataaggtagaaaatagaaacactggaagagagatctggactcctaaagctgtgatgccatagtgtagtgggggggggtgcgtgaggaagtcaggaatgccgcaatgttaaagggaaagggaagatggagcaaagtgagtcccagggccagcagggggccagccttgtttgacaggggcaggggagaaaaggccagacttcccatacacatgctagagggagggctagtgtgaagggtaataagtgaaggagtccacgggct

SEQ ID NO: 63930 - DNA, 463 bp, Homo sapiens
cccaaagtgctgggattacaggcgtgagccaccatgccccgcccttttttctcgtctttaataataagagactatcctaggtgacctctaaaattccttttagttctaatatcctattattcaagaattagccattgtcattgatcaacagatagaattttagcatctgccgtttacatttttttattagctaatattttttgtaccagaatactaaagaatatttattgtgaaagctatttcttattttataaaaaattttaggtggttaagtttatatgtacgctgtaccttaaatgagaattacagcatgtcgtttaacttccacgagactattttgttatatagaaaatgcaaataatagtatacttcatggttgttgagaaaagcaaattagatttgaaatagattatgacggaaattacaagttgctatttaaattttgattgtggggtaactagct

SEQ ID NO: 63931 - DNA, 91 bp, Homo sapiens
agtttgcctacctctgtcctagagcgaagcctgagccttgggcgcgcagcacaccacaagtatctgttactgtgttttgcagaagcttcag

SEQ ID NO: 63932 - DNA, 231 bp, Homo sapiens
aataaacaatgtgcaggtttttataactgatcggaagaaggttgaccctcagttatcacctttaaaaaatggtcttagttaggctttctccctttgttcttttccagaagaaacttggagtctgtcaaatttcacaaaataccctgttgagattttgcttggctttgataagggtgaattcacagattaattcggaaaagaatttacgtctttctaatcaaattgttcctt

SEQ ID NO: 63933 - DNA, 217 bp, Homo sapiens
ggttgcagtgagccgagatcgtgccattgcactccagccttggggacaagagccagacttcctctcaaaaaaagaaaagaaaagaaaagaaaactacaggccaacatttcatgaatgtagatgcaaaaatccccatcaaaatattagcaaatatccataatgcatacaaaattatacaccatgaccatgtgtgatttattccatgtatgcaaggcta

SEQ ID NO: 63934 - DNA, 735 bp, Homo sapiens
gatcaatttgcttgaaaaatgcaaaataatttttacatacattgaaggttttatcattttaatagaaattgttcaagcatattaaggaacaagagttagcatttgaataattgcccataataaaaaattcttatttgcttttgacatttctgaatttgctttccattttaagactatcagggttcttaatatatatttatggaggttacatggattagtgtgacccaagagaatgatggtagtcaacatttcaaagttaataaagaccgcttttgacaataggggcagggattatatttttcatatataaaagaaaaaaatctgtcatttagtaaggttgatctatttgtctaagattatgcagctttgaaattgcagagtcagaatttgaatacagaaattctaacatcaaaatgcaaggtccaggttacggttgaattattgatttataagtaacatttgctgataattactttgaacaacacagagtaaaaaatctttagagatccccttggagttgtcttactatagagcataatcttaaagcaatttagttcagcaaacatttattctgcaaacatatattcagactctagtgtttacaaggcaccttgagaggaaactgtgggaggatatttggacaaaccaaaataagggtccctattctttaaaggaacttgccaatcttattgttgactactctgattgtattgggcacaaagcgattgcctatat

SEQ ID NO: 63935 - DNA, 1251 bp, Homo sapiens
tgagacggagtctcacactgtcacctgggctggagtgcagtggtgcgatcttggctcgctgcagcctccacctcctgggttcaagcaattctcctgcctcagcctcccaagcagctgggattacaggcgctcccccaccacgcccagctaatttttgttgtatttttaggacagacggcgtttcactgttggccagactggtctcaaactcctgacctcgtgatccgcccgcctcggcctcccagagtgctgggattataggtgtgagccaccgaacctggcccaaaacagcatttttggaagctacattctgtgagatgttcacctgtttgccacctcttctcgtgaaaaccatagtgagtgccagtgtgaaaggaagattgcagcgtatatgtcaagtagaaacatgtttgaattttccatttgtctgtggggaagaaggtaataacagtaataacagactgaaggaccaaaggaaaatagggaagacgttgattatggacttggatcagattctagctacatgatttgaaaatgacactgcctctcctattttgccacaagcctgtcatttggagaactggcagatcatttatgttcagatttgattttctgttttagaatcccatggagtacatgtgaacataggaaaatcacactcagcagccaagctatccttttgcgataatgaaatcactttaaaacctataacttgatcttaggttggcaaatcttaaacttaacgatccttgaaatttcctgcctgctgtgactgtgatgcagttggattcaactggtttacactgctcttggatcggcaagaccaaaaaaggttggactgcactgtagcatgcttatgggttgaggcagtggcagaggcagaggacttggccgtcagccagccagcacaggcgtaagaaaatagcatgagaagtttcacgagcctgaaaccattgagacagtgattacaacctccatattaatcagatgagggtttgtaggtgacatagcattttacccaagtaattctgaacagactgtggcttatgataatacattttaactagcaagtgtgtggactataaaacaaatatctagagttatatatggatgtactatcatttggtgataaaagcatagaaaaagcataagttggagtatactgggtttttttgttgttgttaaattcttttccatcagaagtaagagctgttggcagcaactaataaaatgcaacctagtgacatgctc

SEQ ID NO: 63936 - DNA, 1144 bp, Homo sapiens
agaacacagaagccattagagtctaggcctgctagatgttcaacactagcaggctgggaagcttcttcttactaaagggtaacaacatacacatagagtgtagttacaatttgcctccttatccaagaacacagtatatcctcaaattagaaatatagtatgcatttttcattttttcttggacttttttctagcctgaaccactaaaaaggcttatgactgctaacagctcaggaggaatgagcctctaaagtgcaaaactgtctctgaatatcatttacccgtgacagaaaccaggactcactggagaaatagctgagtctagtatagactaagaaatcttcaagatgagtttggaatatcttatatcacaccctcacgttcctcattgttagaatgggaccaatttcatagggttgggctgagttaatatcccgaaattacttagaacaataaggagtaactcataaggaccataaaggtgagcatatttgcatttcataataaaagggtgacattccagaacaacatttagtacacttagctgtatatgtatcaaaatctagtgctgcaaatcttatagcagagctaggactctgtcttcttaactcagtagcctaccttccaggccctttttgcctgcccgattttactttttaaacttttttgttgtaaacgaagacacatacgcattaatctaggcctaaatagggttaggatcttgagtatcactgtctgacaccttctaccgtgtcccacttaaggtattcaggggcaataacatgcacggagctgacatctcctatggtgacaatgacttctagaatgtcttctgaagcatctgcttgaggcttgtttttgagttaacttttcttttttagtaagtagaaggaatacattctaaaataacaataaatagtataaaaatatataaaccagtaatgtggtcacttattactattcattattatgtactgtatataatctactgtacataaccatatttactactgttacatgactggcagtgcagcaggtttaaatgacagacatgtgagtaatgtgctttacaatgttacactggctatgtcattaggtgattggaattttttagcactattaaaatgttatgagagcactgtca

SEQ ID NO: 63937 - DNA, 473 bp, Homo sapiens
aagatttttcacatctttgccggtttatgcaatcattgtggcaaatttttgcagaagctggaccttttatttgctcctcataagtcagcctgcttattttgaagaggtctttggatttgcaataagtaaggtgggtctcttgtcagcagtcccacacatggttatgacaatcgttgtacctattggaggacaattggctgattatttaagaagcagacaaattttaaccacaactgctgtcagaaaaatcatgaactgtggaggtactgtggatttcatagatggcttaggcagcttttgtagaattagggtaaactgaactgcagagcatatattaagaagtgacatttagtcattggagtggatcttaaagacctctaagtctgtccctcagcagacacttgagtgttgtccatcacagtgctgccaagaggtcatccagctgggacctttccatacatccttccacattt

SEQ ID NO: 63938 - DNA, 771 bp, Homo sapiens
ttttttatgttcatacccatcctgaggttcccagctccaggaacctccagctctagtacccagctcagtgcttgtgatgggaactcaggaaatatttgccagttggttctcttcatagaaatgcaagaagcagtctgggcgtggtggctcacacctgtaatcccagcattttgggaggccaaagcaggcggatcagctgaggtcaggagttcaagaccagcctggccaacatgacaaaaccccgtctctactaaaaatacaaaattagctaggcatggtggcacatgcctgtaatcccagctactcgagaggctgaggcaggagaattgctcaaacccaggaggcagaggttgcagtgagccaagatcacgctgccattgcactccagcctgggcaacaagagcgaaactctgtctaaaaaaaaaagaaatgcaagagacagatgaagcccatgattctggcctggatagtggattaggtttcctgcgcgttccttggtcagatgataaatgttagtttttacttcagtgccctcttagtatttacctatgtaagttatgcacacagatgaagacatttgtaaaaaccaacccaccaatattctaatgaaacaacttatagttttgaaatgtcacagataatcaaaagcccatggaaaaccatgcatattgtagccaaatctgtagtacacaatttattttttttaatagagacaggatctcactatgttgcccaggctggtcttgaactcctgggctcaggcaatccact

SEQ ID NO: 63939 - DNA, 383 bp, Homo sapiens
cacccccaagccctggcccaggtctttcggataaagggggccactgcccagtgtgcacaggcccagaaggaagaaaagacaagaaaggcaaggtgctgactgccttgggggttgtttggtgtaaacaggcagccattcagagaggcttcaaatcggttcaggatttgaagggaaaaaaaacagcaggaaaggtgacttgactcctgtgtgcccctaacctttacttagagcccatcaagctctaagtagctgccctgaactgcccaggttgaaactcttctgcctcttctacccacagaagtagtgacaggaagggggaatgaggatagcagccctgggcttggcatcttgtcaccttgaggagttaatttgcatgacacccc

SEQ ID NO: 63940 - DNA, 214 bp, Homo sapiens
ccaaagaactgcaaagtcaatgtggaaaatgcaagctactttatggagggaaagcaggagttgtgaagtacaggtctcacacagatacctgcagtgctcccactggtggctcgtttttctgtttttaaaagagaaatcagaaatccatatttttatgtgaaatttcctgattgaaaaaacaactctgagaagacccccatgacattttggacca

SEQ ID NO: 63941 - DNA, 8377 bp, Homo sapiens
  misc_feature (3994)..(3994): n is a, c, g, or t
  misc_feature (4036)..(4036): n is a, c, g, or t
acacctgcgcgccggaataattcatgaagaaggggctggatccgtgggtcagagaacacaggaccagtttgccatcccaaggccgaaggcctccctccaacacagttctccaagctctagaaatctctgacacatcttgaccatgagaccacggctggtttttggcaggattcgaggcacaaacccagcagcctcaacctagttcatggaggagcctcgcggggtcctggccaagcaagcccgcccctctggtgggaagagcggcgcctaggtggagggtggctgccgtaggagtggacatgaatgctggctttcagagagaacagcgtttcagttttggtcatcggaagtggtgccttcagcacagaagaagagcgtgatttctcctccaaggccgttgatctccaacccagaactaaaggggagaagagccacccccagcatccagcgtggcatctcttgtgccaggaccagggatgactgggccatggacacagatgtctccaaccttcaaccgtttgcatagcacacgggggactcgtgggggccacctgccactgccagctgaaataatacaatggcaatactgacatccttcatgacgttttcccgacagacattcaggcagaaagtgctggtgcgttttctgtctgcaaagtagagggccatcgcctcaccaatagaatagcgtgggccctgatgacctgctccgagtccactcacagccagtgacacttgcaaaaaactcccaaagccgtcttgggtttggctcccacagctcttgaccaatgtggccaaagctggacacctccttgggacactgggattattcataaatgcagcccgccctgactctccctgaatagcatctgaagtctttgtgaaggtcatggatcctgaacaaagtgtcaagggcaccaagaaggctgagggaagtccccggaagcggctgaccaaaggagaggccattcagaccagtgtttcttccagcgtcccatacccaggcagcggcacagctccgacccaagagagccccgcccaagagctcttagccccgcagcccttcccgggcccctcatcagttcttagggaaggctctcaggagaaaacgggccagcagcagaagccccccaaaaggccccccatcgaagcatccgtccacatctcacacgttccgcagcaccctctgacaccagcattcatgtcgcctggcaaacctgagcatctcctggaggggtccacatggcaactggttagccccatgagactcggaccctctggctccttgctggcccctgggctccatcctcagagccagctccttccttcccacgcttccatcattccccccgaggaccttcctggagtccccaaagtcttcgtgcctcgtccttcccaggtctccttgaagcccacagaagaggcacacaagaaggagaggaagccccagaagccaggcaagtacatctgccagtactgcagccggccctgtgccaagcccagcgtgctccagaagcacattcgctcacacacaggtgagaggccctacccctgcggcccctgtggcttctccttcaagaccaagagtaatctctacaagcacaggaagtcccatgcccaccgcatcaaagcaggcctggcctcaggcatgggtggcgagatgtacccacatgggctggagatggagcggatccctggggaagagtttgaggagcccactgagggagaaagcacagattctgaagaggagactagtgccacctctggtcaccctgcagagctctccccaagacccaagcagccccttctctccagcgggctatacagctctgggagccacagttccagccacgaacgctgttccctgtcccagtccagcacagcccagtcactcgaagacccccctccatttgtggaaccctcatctgagcaccccctgagccataaacctgaagacacccacacgattaagcagaagctggccctccgcttaagcgagaggaagaaggtgatcgatgagcaggcgtttctgagcccaggcagcaaagggagtactgagtctgggtatttctctcgctccgagagtgcagagcagcaggtcagccccccaaacaccaacgccaagtcctacgctgagatcatctttggcaagtgtgggcgaataggacagcggaccgccatgctgacagccacctccacccagcccctcctgcccctctccaccgaagacaagcccagcctggtgcctttgtctgtaccccggacgcaggtgatcgagcacatcacgaagctcatcaccatcaacgaggccgtggtggacaccagtgagatcgacagcgtgaagccaaggcggagctcactgtccaggcgcagcagcatggagtccccaaaatccagcctctaccgggagcccctgtcatcccacagtgagaaaaccaagcctgaacaatcactgctgagcctccagcacccgcccagtaccgccccccctgtgcctctcctgagaagccactcaatgccttctgccgcctgcactatcagcaccccccaccaccccttccgaggtagctactccttcgatgaccatatcaccgactccgaagccctgagccgcagcagtcacgtgtttacctcccacccccggatgctgaagccgcagccggcaatcgaattacctttgggaggggaatacagttctgaggagcctggcccaagcagcaaagacacagcctccaagccctcggacgaagtggaacccaaggaaagcgagcttaccaaaaagaccaagaagggtttgaaaacaaaaggggtgatctacgaatgtaacatatgtggtgctcggtacaagaaaagggataactacgaagcccacaaaaaatactactgctcagagcttcagatcgcaaagcccatctctgcaggcacccacacatctccagaagctgaaaagagtcagattgagcatgagccgtggtcccaaatgatgcattacaaactgggaaccaccctggaactcactccactgaggaagaggaggaaagagaagagccttggggacgaggaagagccacctgcctttgagtccacaaaaagtcagtttggcagccccgggccatctgatgctgctcggaaccttcccctggagtccaccaagtcaccagcagaaccaagtaaatcagtgccctccttggagggacccacgggcttccagccaaggactcccaagccagggtccggttcagaatcagggaaggagaggagaacaacgtccaaagaaatttctgtcatccagcacaccagctcctttgagaaatctgattctctcgagcagccgagtggcttggaaggggaagacaaacctctggcccagttcccatcacccccacctgccccacacggacgctctgctcactccctgcagcctaagttggtccgccagcccaacattcaggttcctgagatcctagtaactgaggagcctgaccggccggacacagagccagagccgccccctaaggaacctgagaagactgaggagttccaatggccccagcgcagccagacacttgcccagctcccagctgagaagctgccacccaaaaagaagaggttgcgcctggcagagatggcccaatcatcaggggagtccagcttcgagtcctctgtgcctctgtctcgcagcccgagccaggaaagcaatgtctctttgagtgggtccagccgctcagcctcgtttgagagggatgaccatgggaaagccgaggcccccagtccctcatctgacatgcgccccaaacccctgggcacccacatgttgactgtccccagccaccacccacatgcccgagagatgcggaggtcagcctcagagcagagccccaacgtttcccattctgcccacatgaccgagacacgcagcaaatcctttgactatggcagcttgtccttgacaggcccttctgctccagccccagtggctccaccagccgcgggnggccccgccagagagaagaaaatgcttcttggtgagacagcncctctctgagcaggcctccagaatctgagttggaggttgcccccaagggaagacaggagagcgaagaaccacagccctcatccagtaaaccctctgccaaaagctcattgtcccagatttcctctgcggccacctcacatggtggacccccgggaggcaagggcccagggcaggacaggcccccattggggcccactgtgccctacacagaagcactgcaagtgttccaccaccccgttgcccagacacccctgcatgagaagccatacctgcccccaccagtctcccttttctccttccagcatctcgtgcagcatgagccaggacagtctccagaattcttctccacccaggccatgtccagcctcctgtcctcaccatactccatgcccccacttcctccctccttatttcaagccccaccgcttcctctccagcctactgttctgcacccaggccaactccatctcccccagctcatgcctcacccagccaacatccccttcaggcaacccccttccttcctccccatgccatacccgacctcctcagcactgtcttctgggtttttcctgcctctgcaatcccagtttgcacttcagctccctggtgatgtggaaagccatctgccccagatcaaaaccagcctggccccactggcaacaggaagtgctggcctctcccccagcacagagtacagcagtgacatccggctaccccctgtggctcccccagccagctcctcagcacctacatcagctcctccactggccctgcctgcctgtccagacaccatggtgtccctggttgtgcctgtccgtgttcagaccaatatgccgtcctatgggagcgcaatgtacaccaccctttcccagatcttggtcacccagtcccaaggcagctcagcaactgtggcacttcccaagtttgaggaacccccatcaaaggggacgactgtatgtggtgcagatgtgcatgaggttgggcccggcccttctgggttaagtgaagagcaaagcagagctttcccaactccatacctgagagtgcctgtgacattacctgaaagaaaaggcacttccctgtcatcagagagtatcttgagcctggaggggagttcatcaacagcagggggaagcaaacgtgtcctttcaccagctggcagccttgaacttaccatggaaacccagcagcaaaaaagagtgaaggaggaggaggcttccaaggcagatgaaaaacttgagctggtaaaaccatgcagtgtggtccttaccagcaccgaggatgggaagaggccagagaaatcccacttaggcaaccagggccaaggcaggagggagctagaaatgctgtccagcctgtcctcagatccatctgacacaaaggaaattcctcccctccctcaccctgcattgtcccatgggacagccccaggctcagaagctttgaaggaatatccccagccatctggcaaacctcaccgaagagggttgaccccactgagcgtgaagaaagaagattccaaggaacaacctgatctcccctccttggcacctccgagctctctgcctctgtcagaaacgtcctccagaccagccaagtcacaagaaggtacggactcaaagaaggtactgcagttccccagcctccacacaaccactaatgtcagttggtgctatttaaactacattaagccaaatcacatccagcatgcagataggaggtcctctgtttacgctggttggtgcataagtttgtacaaccccaaccttccgggggtttccactaaagctgctttgtccctcctgaggtctaagcagaaagtgagcaaagagacatacaccatggccacagctccgcatcctgaggcaggaaggcttgtgccatccagctcccgcaagccccgcatgacagaggttcacctcccttcactggtttccccggaaggccagaaagatctagctagagtggagaaggaagaagagaggagaggggagccggaggaggatgctcctgcctcccagagaggggagccggcgaggatcaaaatcttcgaaggaggggaatctgactaagcacatgaagtcgaaggcccacagcaaaaagtgccaagagacaggggtgctggaggagctggaagccgaagaaggaaccagtgacgacctgttccaggactcggaaggacgagagggttcagaggctgtggaggagcaccagttttcggacctggaggactcggactcagactcagacctggacgaagacgaggatgaggatgaggaggagagccaggatgagctgtccagaccatcctcagaggcgcccccgcctggcccaccacatgcactgcgggcagactcctcacccatcctgggccctcagcccccagatgcccccgcctctggcacggaggccacacgaggcagctcggtctcggaagctgagcgcctgacagccagcagctgctccatgtccagccagagcatgccgggcctcccctggctgggaccggcccctctgggctctgtggagaaagacacaggctcagccttgagctacaagcctgtgtccccaagaagaccgtggtccccaagcaaagaagcaggcagccgtccaccactagcccgcaaacactcgctaaccaaaaacgactcatctccccagcgatgctccccggcccgagaaccacaggcctcagccccaagcccacctggcctgcacgtggacccaggaaggggcatgggccctctcccttgtgggtctccaagacttcagctgtctcctctcaccctctgccccctgggaagagaactggcccctcgagcacatgtgctctccaaactcgagggtaccaccgacccaggcctccccagatactcgcccaccaggagatggtctccaggtcaggccgagtcaccaccacggtcagcgccgccagggaagtgggccttggctgggccgggcagcccctcagcgggggagcatggcccaggcttggggctggccccacgggttctcttcccgcccgcgcctctacctcacaagctcctcagcagaagcccagagacctgcgcctccccgtggcagaaggccgagtcccgaagtccctcctgctcacccggccctgctcatcctctctcctcccgacccttctccgccctccatgacttccacggccacatcctggcccggacagaggagaacatcttcagccacctgcctctgcactcccagcacttgacccgtgccccatgtcccttgattcccatcggtgggatccagatggtgcaggcccggccaggagcccaccccaccctgctgccagggcccaccgcagcctgggtcagtggcttctccgggggtggcagcgacctgacaggggcccgggaggcccaggagcgaggccgctggagtcccactgagagctcgtcagcctccgtgtcgcctgtggctaaggtctccaaattcacactctcctcagagctggagggcggggactaccccaaggagagggagaggaccggcggaggcccgggcaggcctcctgactggacaccccatgggaccggggcacctgcagagcccacacccacgcacagcccctgcaccccacccgacaccttgccccggccgccccagggacgccgggcagcgcagtcctggagcccccgcttggagtccccgcgtgcaccggccaaccccgagccttctgccaccccgccgctggaccgcagcagctctgtgggctgcctggcagaggcctctgcccgcttcccagcccggacgaggaacctctccggggaacccaggaccaggcaggactcccccaagccctcaggaagtggggagcccagggcacatccacatcagcctgaggacagggttccccccaacgcttagcctctctccaactgcttcagcatctggcttccagtgtccagcaacagacgtttccagccactttcctcgaatcatcccacttcctcagccccatctgtccctccatccaggagctctcacggccccatctgttgtaccttcccatgtatgcagttacctgtgcctttttctacaccttttgttgcttaaaaagaaacaaaacaaatcacatacatacatttaaaaaaaaaacaacaacccacgaggagtctgaggctgtgaatagtttatggttttggggaaaggctgatggtgaagcctcctgaccctccccgctgtggttggcagccacccaccccagaggctggcagagggaaaggggtacactgagggagaaaggaaaaggaaacttcaaacaatatagaattaaatgtaaaaggcagcactcctgtgtacagatgc

SEQ ID NO: 63942 - DNA, 425 bp, Homo sapiens
aacacatccgcacccacactgacgtccggccctatgtgtgcaagcactgtcactttgcttttaaaaccaaaggtaagagagagtcagctggggcactgcccctgcccgctgcagggagctcccctctgggagtcccagcacagagttcaggtgcccagacctctttgcagggggcctggagcagccccatttcctgggttcccacccagcttggtgcccagtggcagagcagctggctccagactggcctgtggctccccatggctgcccccagccatcctcctggaacacacacacagcccctgcacctgtggccacccggccctggcctgcccagcctggtgcggcactcttgctcaccgttcatggttttgcatcttctctcatctcccctcccttctgcatgtctcctgagccgtttatcc

SEQ ID NO: 63943 - DNA, 8553 bp, Homo sapiens
  misc_feature (3994)..(3994): n is a, c, g, or t
  misc_feature (4036)..(4036): n is a, c, g, or t
acacctgcgcgccggaataattcatgaagaaggggctggatccgtgggtcagagaacacaggaccagtttgccatcccaaggccgaaggcctccctccaacacagttctccaagctctagaaatctctgacacatcttgaccatgagaccacggctggtttttggcaggattcgaggcacaaacccagcagcctcaacctagttcatggaggagcctcgcggggtcctggccaagcaagcccgcccctctggtgggaagagcggcgcctaggtggagggtggctgccgtaggagtggacatgaatgctggctttcagagagaacagcgtttcagttttggtcatcggaagtggtgccttcagcacagaagaagagcgtgatttctcctccaaggccgttgatctccaacccagaactaaaggggagaagagccacccccagcatccagcgtggcatctcttgtgccaggaccagggatgactgggccatggacacagatgtctccaaccttcaaccgtttgcatagcacacgggggactcgtgggggccacctgccactgccagctgaaataatacaatggcaatactgacatccttcatgacgttttcccgacagacattcaggcagaaagtgctggtgcgttttctgtctgcaaagtagagggccatcgcctcaccaatagaatagcgtgggccctgatgacctgctccgagtccactcacagccagtgacacttgcaaaaaactcccaaagccgtcttgggtttggctcccacagctcttgaccaatgtggccaaagctggacacctccttgggacactgggattattcataaatgcagcccgccctgactctccctgaatagcatctgaagtctttgtgaaggtcatggatcctgaacaaagtgtcaagggcaccaagaaggctgagggaagtccccggaagcggctgaccaaaggagaggccattcagaccagtgtttcttccagcgtcccatacccaggcagcggcacagctccgacccaagagagccccgcccaagagctcttagccccgcagcccttcccgggcccctcatcagttcttagggaaggctctcaggagaaaacgggccagcagcagaagccccccaaaaggccccccatcgaagcatccgtccacatctcacacgttccgcagcaccctctgacaccagcattcatgtcgcctggcaaacctgagcatctcctggaggggtccacatggcaactggttagccccatgagactcggaccctctggctccttgctggcccctgggctccatcctcagagccagctccttccttcccacgcttccatcattccccccgaggaccttcctggagtccccaaagtcttcgtgcctcgtccttcccaggtctccttgaagcccacagaagaggcacacaagaaggagaggaagccccagaagccaggcaagtacatctgccagtactgcagccggccctgtgccaagcccagcgtgctccagaagcacattcgctcacacacaggtgagaggccctacccctgcggcccctgtggcttctccttcaagaccaagagtaatctctacaagcacaggaagtcccatgcccaccgcatcaaagcaggcctggcctcaggcatgggtggcgagatgtacccacatgggctggagatggagcggatccctggggaagagtttgaggagcccactgagggagaaagcacagattctgaagaggagactagtgccacctctggtcaccctgcagagctctccccaagacccaagcagccccttctctccagcgggctatacagctctgggagccacagttccagccacgaacgctgttccctgtcccagtccagcacagcccagtcactcgaagacccccctccatttgtggaaccctcatctgagcaccccctgagccataaacctgaagacacccacacgattaagcagaagctggccctccgcttaagcgagaggaagaaggtgatcgatgagcaggcgtttctgagcccaggcagcaaagggagtactgagtctgggtatttctctcgctccgagagtgcagagcagcaggtcagccccccaaacaccaacgccaagtcctacgctgagatcatctttggcaagtgtgggcgaataggacagcggaccgccatgctgacagccacctccacccagcccctcctgcccctctccaccgaagacaagcccagcctggtgcctttgtctgtaccccggacgcaggtgatcgagcacatcacgaagctcatcaccatcaacgaggccgtggtggacaccagtgagatcgacagcgtgaagccaaggcggagctcactgtccaggcgcagcagcatggagtccccaaaatccagcctctaccgggagcccctgtcatcccacagtgagaaaaccaagcctgaacaatcactgctgagcctccagcacccgcccagtaccgccccccctgtgcctctcctgagaagccactcaatgccttctgccgcctgcactatcagcaccccccaccaccccttccgaggtagctactccttcgatgaccatatcaccgactccgaagccctgagccgcagcagtcacgtgtttacctcccacccccggatgctgaagccgcagccggcaatcgaattacctttgggaggggaatacagttctgaggagcctggcccaagcagcaaagacacagcctccaagccctcggacgaagtggaacccaaggaaagcgagcttaccaaaaagaccaagaagggtttgaaaacaaaaggggtgatctacgaatgtaacatatgtggtgctcggtacaagaaaagggataactacgaagcccacaaaaaatactactgctcagagcttcagatcgcaaagcccatctctgcaggcacccacacatctccagaagctgaaaagagtcagattgagcatgagccgtggtcccaaatgatgcattacaaactgggaaccaccctggaactcactccactgaggaagaggaggaaagagaagagccttggggacgaggaagagccacctgcctttgagtccacaaaaagtcagtttggcagccccgggccatctgatgctgctcggaaccttcccctggagtccaccaagtcaccagcagaaccaagtaaatcagtgccctccttggagggacccacgggcttccagccaaggactcccaagccagggtccggttcagaatcagggaaggagaggagaacaacgtccaaagaaatttctgtcatccagcacaccagctcctttgagaaatctgattctctcgagcagccgagtggcttggaaggggaagacaaacctctggcccagttcccatcacccccacctgccccacacggacgctctgctcactccctgcagcctaagttggtccgccagcccaacattcaggttcctgagatcctagtaactgaggagcctgaccggccggacacagagccagagccgccccctaaggaacctgagaagactgaggagttccaatggccccagcgcagccagacacttgcccagctcccagctgagaagctgccacccaaaaagaagaggttgcgcctggcagagatggcccaatcatcaggggagtccagcttcgagtcctctgtgcctctgtctcgcagcccgagccaggaaagcaatgtctctttgagtgggtccagccgctcagcctcgtttgagagggatgaccatgggaaagccgaggcccccagtccctcatctgacatgcgccccaaacccctgggcacccacatgttgactgtccccagccaccacccacatgcccgagagatgcggaggtcagcctcagagcagagccccaacgtttcccattctgcccacatgaccgagacacgcagcaaatcctttgactatggcagcttgtccttgacaggcccttctgctccagccccagtggctccaccagccgcgggnggccccgccagagagaagaaaatgcttcttggtgagacagcncctctctgagcaggcctccagaatctgagttggaggttgcccccaagggaagacaggagagcgaagaaccacagccctcatccagtaaaccctctgccaaaagctcattgtcccagatttcctctgcggccacctcacatggtggacccccgggaggcaagggcccagggcaggacaggcccccattggggcccactgtgccctacacagaagcactgcaagtgttccaccaccccgttgcccagacacccctgcatgagaagccatacctgcccccaccagtctcccttttctccttccagcatctcgtgcagcatgagccaggacagtctccagaattcttctccacccaggccatgtccagcctcctgtcctcaccatactccatgcccccacttcctccctccttatttcaagccccaccgcttcctctccagcctactgttctgcacccaggccaactccatctcccccagctcatgcctcacccagccaacatccccttcaggcaacccccttccttcctccccatgccatacccgacctcctcagcactgtcttctgggtttttcctgcctctgcaatcccagtttgcacttcagctccctggtgatgtggaaagccatctgccccagatcaaaaccagcctggccccactggcaacaggaagtgctggcctctcccccagcacagagtacagcagtgacatccggctaccccctgtggctcccccagccagctcctcagcacctacatcagctcctccactggccctgcctgcctgtccagacaccatggtgtccctggttgtgcctgtccgtgttcagaccaatatgccgtcctatgggagcgcaatgtacaccaccctttcccagatcttggtcacccagtcccaaggcagctcagcaactgtggcacttcccaagtttgaggaacccccatcaaaggggacgactgtatgtggtgcagatgtgcatgaggttgggcccggcccttctgggttaagtgaagagcaaagcagagctttcccaactccatacctgagagtgcctgtgacattacctgaaagaaaaggcacttccctgtcatcagagagtatcttgagcctggaggggagttcatcaacagcagggggaagcaaacgtgtcctttcaccagctggcagccttgaacttaccatggaaacccagcagcaaaaaagagtgaaggaggaggaggcttccaaggcagatgaaaaacttgagctggtaaaaccatgcagtgtggtccttaccagcaccgaggatgggaagaggccagagaaatcccacttaggcaaccagggccaaggcaggagggagctagaaatgctgtccagcctgtcctcagatccatctgacacaaaggaaattcctcccctccctcaccctgcattgtcccatgggacagccccaggctcagaagctttgaaggaatatccccagccatctggcaaacctcaccgaagagggttgaccccactgagcgtgaagaaagaagattccaaggaacaacctgatctcccctccttggcacctccgagctctctgcctctgtcagaaacgtcctccagaccagccaagtcacaagaaggtacggactcaaagaaggtactgcagttccccagcctccacacaaccactaatgtcagttggtgctatttaaactacattaagccaaatcacatccagcatgcagataggaggtcctctgtttacgctggttggtgcataagtttgtacaaccccaaccttccgggggtttccactaaagctgctttgtccctcctgaggtctaagcagaaagtgagcaaagagacatacaccatggccacagctccgcatcctgaggcaggaaggcttgtgccatccagctcccgcaagccccgcatgacagaggttcacctcccttcactggtttccccggaaggccagaaagatctagctagagtggagaaggaagaagagaggagaggggagccggaggaggatgctcctgcctcccagagaggggagccggcgaggatcaaaatcttcgaaggagggtacaaatcaaacgaagagtatgtatatgtgcgaggccgcggccgagggaaatatgtttgtgaggagtgtggaattcgctgcaagaagcccagcatgctgaagaaacacatccgcacccacactgacgtccggccctatgtgtgcaagcactgtcactttgcttttaaaaccaaagggaatctgactaagcacatgaagtcgaaggcccacagcaaaaagtgccaagagacaggggtgctggaggagctggaagccgaagaaggaaccagtgacgacctgttccaggactcggaaggacgagagggttcagaggctgtggaggagcaccagttttcggacctggaggactcggactcagactcagacctggacgaagacgaggatgaggatgaggaggagagccaggatgagctgtccagaccatcctcagaggcgcccccgcctggcccaccacatgcactgcgggcagactcctcacccatcctgggccctcagcccccagatgcccccgcctctggcacggaggccacacgaggcagctcggtctcggaagctgagcgcctgacagccagcagctgctccatgtccagccagagcatgccgggcctcccctggctgggaccggcccctctgggctctgtggagaaagacacaggctcagccttgagctacaagcctgtgtccccaagaagaccgtggtccccaagcaaagaagcaggcagccgtccaccactagcccgcaaacactcgctaaccaaaaacgactcatctccccagcgatgctccccggcccgagaaccacaggcctcagccccaagcccacctggcctgcacgtggacccaggaaggggcatgggccctctcccttgtgggtctccaagacttcagctgtctcctctcaccctctgccccctgggaagagaactggcccctcgagcacatgtgctctccaaactcgagggtaccaccgacccaggcctccccagatactcgcccaccaggagatggtctccaggtcaggccgagtcaccaccacggtcagcgccgccagggaagtgggccttggctgggccgggcagcccctcagcgggggagcatggcccaggcttggggctggccccacgggttctcttcccgcccgcgcctctacctcacaagctcctcagcagaagcccagagacctgcgcctccccgtggcagaaggccgagtcccgaagtccctcctgctcacccggccctgctcatcctctctcctcccgacccttctccgccctccatgacttccacggccacatcctggcccggacagaggagaacatcttcagccacctgcctctgcactcccagcacttgacccgtgccccatgtcccttgattcccatcggtgggatccagatggtgcaggcccggccaggagcccaccccaccctgctgccagggcccaccgcagcctgggtcagtggcttctccgggggtggcagcgacctgacaggggcccgggaggcccaggagcgaggccgctggagtcccactgagagctcgtcagcctccgtgtcgcctgtggctaaggtctccaaattcacactctcctcagagctggagggcggggactaccccaaggagagggagaggaccggcggaggcccgggcaggcctcctgactggacaccccatgggaccggggcacctgcagagcccacacccacgcacagcccctgcaccccacccgacaccttgccccggccgccccagggacgccgggcagcgcagtcctggagcccccgcttggagtccccgcgtgcaccggccaaccccgagccttctgccaccccgccgctggaccgcagcagctctgtgggctgcctggcagaggcctctgcccgcttcccagcccggacgaggaacctctccggggaacccaggaccaggcaggactcccccaagccctcaggaagtggggagcccagggcacatccacatcagcctgaggacagggttccccccaacgcttagcctctctccaactgcttcagcatctggcttccagtgtccagcaacagacgtttccagccactttcctcgaatcatcccacttcctcagccccatctgtccctccatccaggagctctcacggccccatctgttgtaccttcccatgtatgcagttacctgtgcctttttctacaccttttgttgcttaaaaagaaacaaaacaaatcacatacatacatttaaaaaaaaaacaacaacccacgaggagtctgaggctgtgaatagtttatggttttggggaaaggctgatggtgaagcctcctgaccctccccgctgtggttggcagccacccaccccagaggctggcagagggaaaggggtacactgagggagaaaggaaaaggaaacttcaaacaatatagaattaaatgtaaaaggcagcactcctgtgtacagatgc

SEQ ID NO: 63944 - DNA, 2655 bp, Homo sapiens
ctggaagcttttcagaaccacatttttcaccctgcctacctccgtgaaaaccatctgtccatctgtcatgctaagaactgcccaaaccattaagtactttgaactgaagggaagatgagacaggatcagcaggcaggagcaggagctgaatcacgccagctcgtggctgtgccttgactcctcgaccccactttctgctggtacaaatcaaacgaagagtatgtatatgtgcgaggccgcggccgagggaaatatgtttgtgaggagtgtggaattcgctgcaagaagcccagcatgctgaagaaacacatccgcacccacactgacgtccggccctatgtgtgcaagcactgtcactttgcttttaaaaccaaagggaatctgactaagcacatgaagtcgaaggcccacagcaaaaagtgccaagagacaggggtgctggaggagctggaagccgaagaaggaaccagtgacgacctgttccaggactcggaaggacgagagggttcagaggctgtggaggagcaccagttttcggacctggaggactcggactcagactcagacctggacgaagacgaggatgaggatgaggaggagagccaggatgagctgtccagaccatcctcagaggcgcccccgcctggcccaccacatgcactgcgggcagactcctcacccatcctgggccctcagcccccagatgcccccgcctctggcacggaggccacacgaggcagctcggtctcggaagctgagcgcctgacagccagcagctgctccatgtccagccagagcatgccgggcctcccctggctgggaccggcccctctgggctctgtggagaaagacacaggctcagccttgagctacaagcctgtgtccccaagaagaccgtggtccccaagcaaagaagcaggcagccgtccaccactagcccgcaaacactcgctaaccaaaaacgactcatctccccagcgatgctccccggcccgagaaccacaggcctcagccccaagcccacctggcctgcacgtggacccaggaaggggcatgggccctctcccttgtgggtctccaagacttcagctgtctcctctcaccctctgccccctgggaagagaactggcccctcgagcacatgtgctctccaaactcgagggtaccaccgacccaggcctccccagatactcgcccaccaggagatggtctccaggtcaggccgagtcaccaccacggtcagcgccgccagggaagtgggccttggctgggccgggcagcccctcagcgggggagcatggcccaggcttggggctggccccacgggttctcttcccgcccgcgcctctacctcacaagctcctcagcagaagcccagagacctgcgcctccccgtggcagaaggccgagtcccgaagtccctcctgctcacccggccctgctcatcctctctcctcccgacccttctccgccctccatgacttccacggccacatcctggcccggacagaggagaacatcttcagccacctgcctctgcactcccagcacttgacccgtgccccatgtcccttgattcccatcggtgggatccagatggtgcaggcccggccaggagcccaccccaccctgctgccagggcccaccgcagcctgggtcagtggcttctccgggggtggcagcgacctgacaggggcccgggaggcccaggagcgaggccgctggagtcccactgagagctcgtcagcctccgtgtcgcctgtggctaaggtctccaaattcacactctcctcagagctggagggcggggactaccccaaggagagggagaggaccggcggaggcccgggcaggcctcctgactggacaccccatgggaccggggcacctgcagagcccacacccacgcacagcccctgcaccccacccgacaccttgccccggccgccccagggacgccgggcagcgcagtcctggagcccccgcttggagtccccgcgtgcaccggccaaccccgagccttctgccaccccgccgctggaccgcagcagctctgtgggctgcctggcagaggcctctgcccgcttcccagcccggacgaggaacctctccggggaacccaggaccaggcaggactcccccaagccctcaggaagtggggagcccagggcacatccacatcagcctgaggacagggttccccccaacgcttagcctctctccaactgcttcagcatctggcttccagtgtccagcaacagacgtttccagccactttcctcgaatcatcccacttcctcagccccatctgtccctccatccaggagctctcacggccccatctgttgtaccttcccatgtatgcagttacctgtgcctttttctacaccttttgttgcttaaaaagaaacaaaacaaatcacatacatacatttaaaaaaaaaacaacaacccacgaggagtctgaggctgtgaatagtttatggttttggggaaaggctgatggtgaagcctcctgaccctccccgctgtggttggcagccacccaccccagaggctggcagagggaaaggggtacactgagggagaaaggaaaaggaaacttcaaacaatatagaattaaatgtaaaaggcagcactcctgtgtacagatgc

SEQ ID NO: 63945 - DNA, 484 bp, Homo sapiens
  misc_feature (8)..(8): n is a, c, g, or t
  misc_feature (32)..(32): n is a, c, g, or t
  misc_feature (35)..(36): n is a, c, g, or t
  misc_feature (43)..(43): n is a, c, g, or t
cccgggcntcaggaattcggcacgagctcgtnatnncggcacngacgagatcattcaccatgatcaactgggattcttcctagaaatacaaaaagggttcaacctgtgcaaaacaataaatgtgctacaccatattaacagaatggaggacagaaaccatacaatcatttcagtagatgcagaaaaaacatttgaccaaaaaatattgttaactgtgctttcttttctgaacttaagaacttgcttttccaaaaccttcccagaatccctgtatgaatcaacaaaatttagttcttaacacatttctccttctttaaaatggtgacattagctgggcatgatggtgtgtgcctttaatcccagctacttgggaggctgaggcaggagaatcgcctgaacccgggaggcagaggttgcagtgagccgagatcacgccactacactccagtctgggtgacgagcaagacttcgtctcaaaaaaaaa

SEQ ID NO: 63946 - DNA, 958 bp, Homo sapiens
gcctcagctgtcactgcctatctggttaggttctgcactttccttctcggaaaggctccacccttcctgccagtttcatctctagtgccttcaaacctaccctttcttagtgtgtgtggcatgagccagctcagtgcctgcctagtggcagacacttaggctgtaagtatagtgtgggcacaggacccaggatcctatctaaggtgcacaaaaccagctgtctcctgaactcctggagagaaaaaggcacacacccacgttacttagtttctttttctgcccctccacaccatcagcctgggatataccctgggctcccaaactcagagggggtactaggtaggctcaagttagacctatgaagcacttctctgggaggcctggctggggaagctggtgagactggaggaggtgagtaacggaggctgccatatcggggggagtgggggattaacaagaagacctcttggtttgcaggttcatgactctagctcacaaatactccttaaaaaacacaagagcagccactgagaggccaggatgggagccaaggggcctgcacacacacacccagccgctgcgtcttcctgtgtccttagtgtggcttggcagagcctggccagagcccatcctctcccttatacctgggcagaggccaggggctgtgaaggtggcagcacctgcaggtctggtgcctgtgagccccaggtccggtggagcaaggagagaggaggatgctggatgatgagagtgggaaccctagcagcaaggatgagcacagaagggggtgctggccaacgcagccaggatttgacctaaggatggggatccctggccccctgctcttgcccagagctggtgggggcctcagtgggccccagaaccaagaagagaaaggcaaggccagtggggccagacatctgtgtgttgacaataaagttttgtgttggaatcaatg

SEQ ID NO: 63947 - DNA, 236 bp, Homo sapiens
ggatccgcccttctaatttccagaatctaggactagttttgtcttgaggcaggaaatatataggtagcactggttttcttaccagtgacctcatatcaaagccccgatgaagatcaagcatccgtgagaatgacatggcaggcagggtgagggctcctcacttaattgatccttaacccagcaactaagtgctttcaggatatggatcagaagaaagatctaagtcagtggacatg

SEQ ID NO: 63948 - DNA, 4264 bp, Homo sapiens
acaaagtgctcgggacaaggacatagggctgagagtagccatgggctctggaggagacagcctcctggggggcaggggttccctgcctctgctgctcctgctcatcatgggaggcatggctcaggactccccgccccagatcctagtccacccccaggaccagctgttccagggccctggccctgccaggatgagctgccaagcctcaggccagccacctcccaccatccgctggttgctgaatgggcagcccctgagcatggtgcccccagacccacaccacctcctgcctgatgggacccttctgctgctacagccccctgcccggggacatgcccacgatggccaggccctgtccacagacctgggtgtctacacatgtgaggccagcaaccggcttggcacggcagtcagcagaggcgctcggctgtctgtggctgtcctccgggaggatttccagatccagcctcgggacatggtggctgtggtgggtgagcagtttactctggaatgtgggccgccctggggccacccagagcccacagtctcatggtggaaagatgggaaacccctggccctccagcccggaaggcacacagtgtccggggggtccctgctgatggcaagagcagagaagagtgacgaagggacctacatgtgtgtggccaccaacagcgcaggacatagggagagccgcgcagcccgggtttccatccaggagccccaggactacacggagcctgtggagcttctggctgtgcgaattcagctggaaaatgtgacactgctgaacccggatcctgcagagggccccaagcctagaccggcggtgtggctcagctggaaggtcagtggccctgctgcgcctgcccaatcttacacggccttgttcaggacccagactgccccgggaggccagggagctccgtgggcagaggagctgctggccggctggcagagcgcagagcttggaggcctccactggggccaagactacgagttcaaagtgagaccatcctctggccgggctcgaggccctgacagcaacgtgctgctcctgaggctgccggaaaaagtgcccagtgccccacctcaggaagtgactctaaagcctggcaatggcactgtctttgtgagctgggtcccaccacctgctgaaaaccacaatggcatcatccgtggctaccaggtctggagcctgggcaacacatcactgccaccagccaactggactgtagttggtgagcagacccagctggaaatcgccacccatatgccaggctcctactgcgtgcaagtggctgcagtcactggtgctggagctggggagcccagtagacctgtctgcctccttttagagcaggccatggagcgagccacccaagaacccagtgagcatggtccctggaccctggagcagctgagggctaccttgaagcggcctgaggtcattgccacctgcggtgttgcactctggctgctgcttctgggcaccgccgtgtgtatccaccgccggcgccgagctagggtgcacctgggcccaggtctgtacagatataccagtgaggatgccatcctaaaacacaggatggatcacagtgactcccagtggttggcagacacttggcgttccacctctggctctcgggacctgagcagcagcagcagcctcagcagtcggctgggggcggatgcccgggacccactagactgtcgtcgctccttgctctcctgggactcccgaagccccggcgtgcccctgcttccagacaccagcactttttatggctccctcatcgctgagctgccctccagtaccccagccaggccaagtccccaggtcccagctgtcaggcgcctcccaccccagctggcccagctctccagcccctgttccagctcagacagcctctgcagccgcaggggactctcttctccccgcttgtctctggcccctgcagaggcttggaaggccaaaaagaagcaggagctgcagcatgccaacagttccccactgctccggggcagccactccttggagctccgggcctgtgagttaggaaatagaggttccaagaacctttcccaaagcccaggagctgtgccccaagctctggttgcctggcgggccctgggaccgaaactcctcagctcctcaaatgagctggttactcgtcatctccctccagcacccctctttcctcatgaaactcccccaactcagagtcaacagacccagcctccggtggcaccacaggctccctcctccatcctgctgccagcagcccccatccccatccttagcccctgcagtccccctagcccccaggcctcttccctctctggccccagcccagcttccagtcgcctgtccagctcctcactgtcatccctgggggaggatcaagacagcgtgctgacccctgaggaggtagccctgtgcttggaactcagtgagggtgaggagactcccaggaacagcgtctctcccatgccaagggctccttcaccccccaccacctatgggtacatcagcgtcccaacagcctcagagttcacggacatgggcaggactggaggaggggtggggcccaaggggggagtcttgctgtgcccacctcggccctgcctcacccccacccccagcgagggctccttagccaatggttggggctcagcctctgaggacaatgccgccagcgccagagccagccttgtcagctcctccgatggctccttcctcgctgatgctcactttgcccgggccctggcagtggctgtggatagctttggtttcggtctagagcccagggaggcagactgcgtcttcatagatgcctcatcacctccctccccacgggatgagatcttcctgacccccaacctctccctgcccctgtgggagtggaggccagactggttggaagacatggaggtcagccacacccagcggctgggaagggggatgcctccctggccccctgactctcagatctcttcccagagaagtcagctccactgtcgtatgcccaaggctggtgcttctcctgtagattactcctgaaccgtgtccctgagacttcccagacgggaatcagaaccacttctcctgtccacccacaagacctgggctgtggtgtgtgggtcttggcctgtgtttctctgcagctggggtccaccttcccaagcctccagagagttctccctccacgattgtgaaaacaaatgaaaacaaaattagagcaaagctgacctggagccctcagggagcaaaacatcatctccacctgactcctagccactgctttctcctctgtgccatccactcccaccaccaggttgttttggcctgaggagcagccctgcctgctgctcttcccccaccatttggatcacaggaagtggaggagccagaggtgcctttgtggaggacagcagtggctgctgggagagggctgtggaggaaggagcttctcggagccccctctcagccttacctgggcccctcctctagagaagagctcaactctctcccaacctcaccatggaaagaaaataattatgaatgccactgaggcactgaggccctacctcatgccaaacaaagggttcaaggctgggtctagcgaggatgctgaaggaagggaggtatgagaccgtaggtcaaaagcaccatcctcgtactgttgtcactatgagcttaagaaatttgataccataaaatggtaaagacttgagttctgtgagatcattccccggagcaccatttttaggggagcacctggagagatggcaagaatttcctgagttaggcagggatcaggcattcattgacactcagggagtgtcacacatttctgttctgcaattaaagggagaatgaggttcatccaccaaattttaagcagaatataggaagggcaggggtggggagtttcagggtctgctggtcctggcaacttatattaaatccacctcctcaagataagccttagggatatttatggctgagggaagtgggatggtctaaggcatggggaagggtgattggctgtggggaaaatgaagtaataggttcattctgcccaagtgtacttggggttcatggcatttcataaggacatttgtgtagaaaattgttttgctggctgggcacggtggctcacgcctgtaatcccagcactttgggaggcggaggtaggcagatcatgaggtcaggagatcgagaccatcctggctaacatggtgaaaccccgtctctact

SEQ ID NO: 63949 - DNA, 2911 bp, Homo sapiens
acaaagtgctcgggacaaggacatagggctgagagtagccatgggctctggaggagacagcctcctggggggcaggggttccctgcctctgctgctcctgctcatcatgggaggcatggctcaggactccccgccccagatcctagtccacccccaggaccagctgttccagggccctggccctgccaggatgagctgccaagcctcaggccagccacctcccaccatccgctggttgctgaatgggcagcccctgagcatggtgcccccagacccacaccacctcctgcctgatgggacccttctgctgctacagccccctgcccggggacatgcccacgatggccaggccctgtccacagacctgggtgtctacacatgtgaggccagcaaccggcttggcacggcagtcagcagaggcgctcggctgtctgtggctgtcctccgggaggatttccagatccagcctcgggacatggtggctgtggtgggtgagcagtttactctggaatgtgggccgccctggggccacccagagcccacagtctcatggtggaaagatgggaaacccctggccctccagcccggaaggcacacagtgtccggggggtccctgctgatggcaagagcagagaagagtgacgaagggacctacatgtgtgtggccaccaacagcgcaggacatagggagagccgcgcagcccgggtttccatccaggagccccaggactacacggagcctgtggagcttctggctgtgcgaattcagctggaaaatgtgacactgctgaacccggatcctgcagagggccccaagcctagaccggcggtgtggctcagctggaaggtcagtggccctgctgcgcctgcccaatcttacacggccttgttcaggacccagactgccccgggaggccagggagctccgtgggcagaggagctgctggccggctggcagagcgcagagcttggaggcctccactggggccaagactacgagttcaaagtgagaccatcctctggccgggctcgaggccctgacagcaacgtgctgctcctgaggctgccggaaaaagtgcccagtgccccacctcaggaagtgactctaaagcctggcaatggcactgtctttgtgagctgggtcccaccacctgctgaaaaccacaatggcatcatccgtggctaccaggtctggagcctgggcaacacatcactgccaccagccaactggactgtagttggtgagcagacccagctggaaatcgccacccatatgccaggctcctactgcgtgcaagtggctgcagtcactggtgctggagctggggagcccagtagacctgtctgcctccttttagagcaggccatggagcgagccacccaagaacccagtgagcatggtccctggaccctggagcagctgagggctaccttgaagcggcctgaggtcattgccacctgcggtgttgcactctggctgctgcttctgggcaccgccgtgtgtatccaccgccggcgccgagctagggtgcacctgggcccaggtctgtacagatataccagtgaggatgccatcctaaaacacaggatggatcacagtgactcccagtggttggcagacacttggcgttccacctctggctctcgggacctgagcagcagcagcagcctcagcagtcggctgggggcggatgcccgggacccactagactgtcgtcgctccttgctctcctgggactcccgaagccccggcgtgcccctgcttccagacaccagcactttttatggctccctcatcgctgagctgccctccagtaccccagccaggccaagtccccaggtcccagctgtcaggcgcctcccaccccagctggcccagctctccagcccctgttccagctcagacagcctctgcagccgcaggggactctcttctccccgcttgtctctggcccctgcagaggcttggaaggccaaaaagaagcaggagctgcagcatgccaacagttccccactgctccggggcagccactccttggagctccgggcctgtgagttaggaaatagaggttccaagaacctttcccaaagcccaggagctgtgccccaagctctggttgcctggcgggccctgggaccgaaactcctcagctcctcaaatgagctggttactcgtcatctccctccagcacccctctttcctcatgaaactcccccaactcagagtcaacagacccagcctccggtggcaccacaggctccctcctccatcctgctgccagcagcccccatccccatccttagcccctgcagtccccctagcccccaggcctcttccctctctggccccagcccagcttccagtcgcctgtccagctcctcactgtcatccctgggggaggatcaagacagcgtgctgacccctgaggaggtagccctgtgcttggaactcagtgagggtgaggagactcccaggaacagcgtctctcccatgccaagggctccttcaccccccaccacctatgggtacatcagcgtcccaacagcctcagagttcacggacatgggcaggactggaggaggggtggggcccaaggggggagtcttgctgtgcccacctcggccctgcctcacccccacccccagcgagggctccttagccaatggttggggctcagcctctgaggacaatgccgccagcgccagagccagccttgtcagctcctccgatggctccttcctcgctgatgctcactttgcccgggccctggcagtggctgtggatagctttggtttcggtctagagcccagggaggcagactgcgtcttcataggtatgtgaggtctccccatcttactcctcactcatgccccttgcctttctaacaactgttatcatgtcatcattgtt

SEQ ID NO: 63950 - DNA, 2839 bp, Homo sapiens
atagggtgtgagatgggtcagagcaaaggctatagttagggagctggaagccagaccaaggaaggtcctcttagccatgctaggtacctgggctctatcatggtaaatgaggggccattgaaggtcttacgcagagaagctccttgctcagatccctgttcttgaaggatcactcaggcagccagaggccaatatccatggagcaagctcctgctctgccagctgagtgatctcacatttcctcatataaacccagaccatcagtcttgagtgtggaaggccctattgccatcattttacagatgagaaaactggggcttagagaggatgtacttacccaagtgcaacagatgtacttacccaagctaagctgtgacagatagagattgtcaaaccagatttgtcttcaggtcttctttttacctcagcatacatagctgtctgtcattactacctcccagctctgggtgactcggatttcccctcatccaggaataagaaaggggtgctgggtttaggggaccaggtcagagatcttaaggagtctgtgaaaagctgaaaagcagtagtaaggataaagccaccatctccttgccctcttctgctgcctctgaacaggaagtcttggccaaaaaggttctcacttctccctgtttctcctggcctcaccccctccctccactgccccaggatggatcacagtgactcccagtggttggcagacacttggcgttccacctctggctctcgggacctgagcagcagcagcagcctcagcagtcggctgggggcggatgcccgggacccactagactgtcgtcgctccttgctctcctgggactcccgaagccccggcgtgcccctgcttccagacaccagcactttttatggctccctcatcgctgagctgccctccagtaccccagccaggccaagtccccaggtcccagctgtcaggcgcctcccaccccagctggcccagctctccagcccctgttccagctcagacagcctctgcagccgcaggggactctcttctccccgcttgtctctggcccctgcagaggcttggaaggccaaaaagaagcaggagctgcagcatgccaacagttccccactgctccggggcagccactccttggagctccgggcctgtgagttaggaaatagaggttccaagaacctttcccaaagcccaggagctgtgccccaagctctggttgcctggcgggccctgggaccgaaactcctcagctcctcaaatgagctggttactcgtcatctccctccagcacccctctttcctcatgaaactcccccaactcagagtcaacagacccagcctccggtggcaccacaggctccctcctccatcctgctgccagcagcccccatccccatccttagcccctgcagtccccctagcccccaggcctcttccctctctggccccagcccagcttccagtcgcctgtccagctcctcactgtcatccctgggggaggatcaagacagcgtgctgacccctgaggaggtagccctgtgcttggaactcagtgagggtgaggagactcccaggaacagcgtctctcccatgccaagggctccttcaccccccaccacctatgggtacatcagcgtcccaacagcctcagagttcacggacatgggcaggactggaggaggggtggggcccaaggggggagtcttgctgtgcccacctcggccctgcctcacccccacccccagcgagggctccttagccaatggttggggctcagcctctgaggacaatgccgccagcgccagagccagccttgtcagctcctccgatggctccttcctcgctgatgctcactttgcccgggccctggcagtggctgtggatagctttggtttcggtctagagcccagggaggcagactgcgtcttcatagatgcctcatcacctccctccccacgggatgagatcttcctgacccccaacctctccctgcccctgtgggagtggaggccagactggttggaagacatggaggtcagccacacccagcggctgggaagggggatgcctccctggccccctgactctcagatctcttcccagagaagtcagctccactgtcgtatgcccaaggctggtgcttctcctgtagattactcctgaaccgtgtccctgagacttcccagacgggaatcagaaccacttctcctgtccacccacaagacctgggctgtggtgtgtgggtcttggcctgtgtttctctgcagctggggtccaccttcccaagcctccagagagttctccctccacgattgtgaaaacaaatgaaaacaaaattagagcaaagctgacctggagccctcagggagcaaaacatcatctccacctgactcctagccactgctttctcctctgtgccatccactcccaccaccaggttgttttggcctgaggagcagccctgcctgctgctcttcccccaccatttggatcacaggaagtggaggagccagaggtgcctttgtggaggacagcagtggctgctgggagagggctgtggaggaaggagcttctcggagccccctctcagccttacctgggcccctcctctagagaagagctcaactctctcccaacctcaccatggaaagaaaataattatgaatgccactgaggcactgaggccctacctcatgccaaacaaagggttcaaggctgggtctagcgaggatgctgaaggaagggaggtatgagaccgtaggtcaaaagcaccatcctcgtactgttgtcactatgagcttaagaaatttgataccataaaatggtaaagacttg

SEQ ID NO: 63951 - DNA, 3609 bp, Homo sapiens
acaaagtgctcgggacaaggacatagggctgagagtagccatgggctctggaggagacagcctcctggggggcaggggttccctgcctctgctgctcctgctcatcatgggaggcatggctcaggactccccgccccagatcctagtccacccccaggaccagctgttccagggccctggccctgccaggatgagctgccaagcctcaggccagccacctcccaccatccgctggttgctgaatgggcagcccctgagcatggtgcccccagacccacaccacctcctgcctgatgggacccttctgctgctacagccccctgcccggggacatgcccacgatggccaggccctgtccacagacctgggtgtctacacatgtgaggccagcaaccggcttggcacggcagtcagcagaggcgctcggctgtctgtggctgtcctccgggaggatttccagatccagcctcgggacatggtggctgtggtgggtgagcagtttactctggaatgtgggccgccctggggccacccagagcccacagtctcatggtggaaagatgggaaacccctggccctccagcccggaaggcacacagtgtccggggggtccctgctgatggcaagagcagagaagagtgacgaagggacctacatgtgtgtggccaccaacagcgcaggacatagggagagccgcgcagcccgggtttccatccaggagccccaggactacacggagcctgtggagcttctggctgtgcgaattcagctggaaaatgtgacactgctgaacccggatcctgcagagggccccaagcctagaccggcggtgtggctcagctggaaggtcagtggccctgctgcgcctgcccaatcttacacggccttgttcaggacccagactgccccgggaggccagggagctccgtgggcagaggagctgctggccggctggcagagcgcagagcttggaggcctccactggggccaagactacgagttcaaagtgagaccatcctctggccgggctcgaggccctgacagcaacgtgctgctcctgaggctgccggaaaaagtgcccagtgccccacctcaggaagtgactctaaagcctggcaatggcactgtctttgtgagctgggtcccaccacctgctgaaaaccacaatggcatcatccgtggctaccaggtctggagcctgggcaacacatcactgccaccagccaactggactgtagttggtgagcagacccagctggaaatcgccacccatatgccaggctcctactgcgtgcaagtggctgcagtcactggtgctggagctggggagcccagtagacctgtctgcctccttttagagcaggccatggagcgagccacccaagaacccagtgagcatggtccctggaccctggagcagctgagggctaccttgaagcggcctgaggtcattgccacctgcggtgttgcactctggctgctgcttctgggcaccgccgtgtgtatccaccgccggcgccgagctagggtgcacctgggcccaggtctgtacagatataccagtgaggatgccatcctaaaacacaggatggatcacagtgactcccagtggttggcagacacttggcgttccacctctggctctcgggacctgagcagcagcagcagcctcagcagtcggctgggggcggatgcccgggacccactagactgtcgtcgctccttgctctcctgggactcccgaagccccggcgtgcccctgcttccagacaccagcactttttatggctccctcatcgctgagctgccctccagtaccccagccaggccaagtccccaggtcccagctgtcaggcgcctcccaccccagctggcccagctctccagcccctgttccagctcagacagcctctgcagccgcaggggactctcttctccccgcttgtctctggcccctgcagaggcttggaaggccaaaaagaagcaggagctgcagcatgccaacagttccccactgctccggggcagccactccttggagctccgggcctgtgagttaggaaatagaggttccaagaacctttcccaaagcccaggagctgtgccccaagctctggttgcctggcgggccctgggaccgaaactcctcagctcctcaaatgagctggttactcgtcatctccctccagcacccctctttcctcatgaaactcccccaactcagagtcaacagacccagcctccggtggcaccacaggctccctcctccatcctgctgccagcagcccccatccccatccttagcccctgcagtccccctagccccctgactctcagatctcttcccagagaagtcagctccactgtcgtatgcccaaggctggtgcttctcctgtagattactcctgaaccgtgtccctgagacttcccagacgggaatcagaaccacttctcctgtccacccacaagacctgggctgtggtgtgtgggtcttggcctgtgtttctctgcagctggggtccaccttcccaagcctccagagagttctccctccacgattgtgaaaacaaatgaaaacaaaattagagcaaagctgacctggagccctcagggagcaaaacatcatctccacctgactcctagccactgctttctcctctgtgccatccactcccaccaccaggttgttttggcctgaggagcagccctgcctgctgctcttcccccaccatttggatcacaggaagtggaggagccagaggtgcctttgtggaggacagcagtggctgctgggagagggctgtggaggaaggagcttctcggagccccctctcagccttacctgggcccctcctctagagaagagctcaactctctcccaacctcaccatggaaagaaaataattatgaatgccactgaggcactgaggccctacctcatgccaaacaaagggttcaaggctgggtctagcgaggatgctgaaggaagggaggtatgagaccgtaggtcaaaagcaccatcctcgtactgttgtcactatgagcttaagaaatttgataccataaaatggtaaagacttgagttctgtgagatcattccccggagcaccatttttaggggagcacctggagagatggcaagaatttcctgagttaggcagggatcaggcattcattgacactcagggagtgtcacacatttctgttctgcaattaaagggagaatgaggttcatccaccaaattttaagcagaatataggaagggcaggggtggggagtttcagggtctgctggtcctggcaacttatattaaatccacctcctcaagataagccttagggatatttatggctgagggaagtgggatggtctaaggcatggggaagggtgattggctgtggggaaaatgaagtaataggttcattctgcccaagtgtacttggggttcatggcatttcataaggacatttgtgtagaaaattgttttgctggctgggcacggtggctcacgcctgtaatcccagcactttgggaggcggaggtaggcagatcatgaggtcaggagatcgagaccatcctggctaacatggtgaaaccccgtctctact

SEQ ID NO: 63952 - DNA, 2556 bp, Homo sapiens
acaaagtgctcgggacaaggacatagggctgagagtagccatgggctctggaggagacagcctcctggggggcaggggttccctgcctctgctgctcctgctcatcatgggaggcatggctcaggactccccgccccagatcctagtccacccccaggaccagctgttccagggccctggccctgccaggatgagctgccaagcctcaggccagccacctcccaccatccgctggttgctgaatgggcagcccctgagcatggtgcccccagacccacaccacctcctgcctgatgggacccttctgctgctacagccccctgcccggggacatgcccacgatggccaggccctgtccacagacctgggtgtctacacatgtgaggccagcaaccggcttggcacggcagtcagcagaggcgctcggctgtctgtggctgtcctccgggaggatttccagatccagcctcgggacatggtggctgtggtgggtgagcagtttactctggaatgtgggccgccctggggccacccagagcccacagtctcatggtggaaagatgggaaacccctggccctccagcccggaaggcacacagtgtccggggggtccctgctgatggcaagagcagagaagagtgacgaagggacctacatgtgtgtggccaccaacagcgcaggacatagggagagccgcgcagcccgggtttccatccaggagccccaggactacacggagcctgtggagcttctggctgtgcgaattcagctggaaaatgtgacactgctgaacccggatcctgcagagggccccaagcctagaccggcggtgtggctcagctggaaggtcagtggccctgctgcgcctgcccaatcttacacggccttgttcaggacccagactgccccgggaggccagggagctccgtgggcagaggagctgctggccggctggcagagcgcagagcttggaggcctccactggggccaagactacgagttcaaagtgagaccatcctctggccgggctcgaggccctgacagcaacgtgctgctcctgaggctgccggaaaaagtgcccagtgccccacctcaggaagtgactctaaagcctggcaatggcactgtctttgtgagctgggtcccaccacctgctgaaaaccacaatggcatcatccgtggctaccaggtctggagcctgggcaacacatcactgccaccagccaactggactgtagttggtgagcagacccagctggaaatcgccacccatatgccaggctcctactgcgtgcaagtggctgcagtcactggtgctggagctggggagcccagtagacctgtctgcctccttttagagcaggccatggagcgagccacccaagaacccagtgagcatggtccctggaccctggagcagctgagggctaccttgaagcggcctgaggtcattgccacctgcggtgttgcactctggctgctgcttctgggcaccgccgtgtgtatccaccgccggcgccgagctagggtgcacctgggcccaggtctgtacagatataccagtgaggatgccatcctaaaacacaggatggatcacagtgactcccagtggttggcagacacttggcgttccacctctggctctcgggacctgagcagcagcagcagcctcagcagtcggctgggggcggatgcccgggacccactagactgtcgtcgctccttgctctcctgggactcccgaagccccggcgtgcccctgcttccagacaccagcactttttatggctccctcatcgctgagctgccctccagtaccccagccaggccaagtccccaggtcccagctgtcaggcgcctcccaccccagctggcccagctctccagcccctgttccagctcagacagcctctgcagccgcaggggactctcttctccccgcttgtctctggcccctgcagaggcttggaaggccaaaaagaagcaggagctgcagcatgccaacagttccccactgctccggggcagccactccttggagctccgggcctgtgagttaggaaatagaggttccaagaacctttcccaaagcccaggagctgtgccccaagctctggttgcctggcgggccctgggaccgaaactcctcagctcctcaaatgagctggttactcgtcatctccctccagcacccctctttcctcatgaaactcccccaactcagagtcaacagacccagcctccggtggcaccacaggctccctcctccatcctgctgccagcagcccccatccccatccttagcccctgcagtccccctagcccccaggcctcttccctctctggccccagcccagcttccagtcgcctgtccagctcctcactgtcatccctgggggaggatcaagacagcgtgctgacccctgaggaggtagccctgtgcttggaactcagtgagggtgaggagactcccaggtgagtagcttgagagataaccaaagaactacagaaaagctgtgggggcaagcgcctctccacccattccgccctccctca

SEQ ID NO: 63953 - DNA, 1826 bp, Homo sapiens
ccaaaccattgctgtctccccttttgcctctccctaggaacagcgtctctcccatgccaagggctccttcaccccccaccacctatgggtacatcagcgtcccaacagcctcagagttcacggacatgggcaggactggaggaggggtggggcccaaggggggagtcttgctgtgcccacctcggccctgcctcacccccacccccagcgagggctccttagccaatggttggggctcagcctctgaggacaatgccgccagcgccagagccagccttgtcagctcctccgatggctccttcctcgctgatgctcactttgcccgggccctggcagtggctgtggatagctttggtttcggtctagagcccagggaggcagactgcgtcttcatagatgcctcatcacctccctccccacgggatgagatcttcctgacccccaacctctccctgcccctgtgggagtggaggccagactggttggaagacatggaggtcagccacacccagcggctgggaagggggatgcctccctggccccctgactctcagatctcttcccagagaagtcagctccactgtcgtatgcccaaggctggtgcttctcctgtagattactcctgaaccgtgtccctgagacttcccagacgggaatcagaaccacttctcctgtccacccacaagacctgggctgtggtgtgtgggtcttggcctgtgtttctctgcagctggggtccaccttcccaagcctccagagagttctccctccacgattgtgaaaacaaatgaaaacaaaattagagcaaagctgacctggagccctcagggagcaaaacatcatctccacctgactcctagccactgctttctcctctgtgccatccactcccaccaccaggttgttttggcctgaggagcagccctgcctgctgctcttcccccaccatttggatcacaggaagtggaggagccagaggtgcctttgtggaggacagcagtggctgctgggagagggctgtggaggaaggagcttctcggagccccctctcagccttacctgggcccctcctctagagaagagctcaactctctcccaacctcaccatggaaagaaaataattatgaatgccactgaggcactgaggccctacctcatgccaaacaaagggttcaaggctgggtctagcgaggatgctgaaggaagggaggtatgagaccgtaggtcaaaagcaccatcctcgtactgttgtcactatgagcttaagaaatttgataccataaaatggtaaagacttgagttctgtgagatcattccccggagcaccatttttaggggagcacctggagagatggcaagaatttcctgagttaggcagggatcaggcattcattgacactcagggagtgtcacacatttctgttctgcaattaaagggagaatgaggttcatccaccaaattttaagcagaatataggaagggcaggggtggggagtttcagggtctgctggtcctggcaacttatattaaatccacctcctcaagataagccttagggatatttatggctgagggaagtgggatggtctaaggcatggggaagggtgattggctgtggggaaaatgaagtaataggttcattctgcccaagtgtacttggggttcatggcatttcataaggacatttgtgtagaaaattgttttgctggctgggcacggtggctcacgcctgtaatcccagcactttgggaggcggaggtaggcagatcatgaggtcaggagatcgagaccatcctggctaacatggtgaaaccccgtctctact

SEQ ID NO: 63954 - DNA, 602 bp, Homo sapiens
acaaagtgctcgggacaaggacatagggctgagagtagccatgggctctggaggagacagcctcctggggggcaggggttccctgcctctgctgctcctgctcatcatgggaggcatggctcaggactccccgccccagatcctagtccacccccaggaccagctgttccagggccctggccctgccaggatgagctgccaagcctcaggccagccacctcccaccatccgctggttgctgaatgggcagcccctgagcatggtgcccccagacccacaccacctcctgcctgatgggacccttctgctgctacagccccctgcccggggacatgcccacgatggccaggccctgtccacagacctgggtgtctacacatgtgaggccagcaaccggcttggcacggcagtcagcagaggcgctcggctgtctgtggctggtgaggcctgggaggggagcttcagggtggggcaaacctgggtggagacatctgagctgaatgttcaagggaacatctgagaggtcagtgggatacctgtgagcagaggcctgggctggaaggcttgggagggcaagctggggcggggctggccctaaatgg

SEQ ID NO: 63955 - DNA, 3736 bp, Homo sapiens
acaaagtgctcgggacaaggacatagggctgagagtagccatgggctctggaggagacagcctcctggggggcaggggttccctgcctctgctgctcctgctcatcatgggaggcatggctcaggactccccgccccagatcctagtccacccccaggaccagctgttccagggccctggccctgccaggatgagctgccaagcctcaggccagccacctcccaccatccgctggttgctgaatgggcagcccctgagcatggtgcccccagacccacaccacctcctgcctgatgggacccttctgctgctacagccccctgcccggggacatgcccacgatggccaggccctgtccacagacctgggtgtctacacatgtgaggccagcaaccggcttggcacggcagtcagcagaggcgctcggctgtctgtggctgtcctccgggaggatttccagatccagcctcgggacatggtggctgtggtgggtgagcagtttactctggaatgtgggccgccctggggccacccagagcccacagtctcatggtggaaagatgggaaacccctggccctccagcccggaaggcacacagtgtccggggggtccctgctgatggcaagagcagagaagagtgacgaagggacctacatgtgtgtggccaccaacagcgcaggacatagggagagccgcgcagcccgggtttccatccaggagccccaggactacacggagcctgtggagcttctggctgtgcgaattcagctggaaaatgtgacactgctgaacccggatcctgcagagggccccaagcctagaccggcggtgtggctcagctggaaggtcagtggccctgctgcgcctgcccaatcttacacggccttgttcaggacccagactgccccgggaggccagggagctccgtgggcagaggagctgctggccggctggcagagcgcagagcttggaggcctccactggggccaagactacgagttcaaagtgagaccatcctctggccgggctcgaggccctgacagcaacgtgctgctcctgaggctgccggaaaaagtgcccagtgccccacctcaggaagtgactctaaagcctggcaatggcactgtctttgtgagctgggtcccaccacctgctgaaaaccacaatggcatcatccgtggctaccaggtctggagcctgggcaacacatcactgccaccagccaactggactgtagttggtgagcagacccagctggaaatcgccacccatatgccaggctcctactgcgtgcaagtggctgcagtcactggtgctggagctggggagcccagtagacctgtctgcctccttttagagcaggccatggagcgagccacccaagaacccagtgagcatggtccctggaccctggagcagctgagggctaccttgaagcggcctgaggtcattgccacctgcggtgttgcactctggctgctgcttctgggcaccgccgtgtgtatccaccgccggcgccgagctagggtgcacctgggcccaggtctgtacagatataccagtgaggatgccatcctaaaacacaggatggatcacagtgactcccagtggttggcagacacttggcgttccacctctggctctcgggacctgagcagcagcagcagcctcagcagtcggctgggggcggatgcccgggacccactagactgtcgtcgctccttgctctcctgggactcccgaagccccggcgtgcccctgcttccagacaccagcactttttatggctccctcatcgctgagctgccctccagtaccccagccaggccaagtccccaggtcccagctgtcaggcgcctcccaccccagctggcccagctctccagcccctgttccagctcagacagcctctgcagccgcaggggactctcttctccccgcttgtctctggcccctgcagaggcttggaaggccaaaaagaagcaggagctgcagcatgccaacagttccccactgctccggggcagccactccttggagctccgggcctgtgagttaggaaatagaggttccaagaacctttcccaaagcccaggagctgtgccccaagctctggttgcctggcgggccctgggaccgaaactcctcagctcctcaaatgagctggttactcgtcatctccctccagcacccctctttcctcatgaaactcccccaactcagagtcaacagacccagcctccggtggcaccacaggctccctcctccatcctgctgccagcagcccccatccccatccttagcccctgcagtccccctagcccccaggcctcttccctctctggccccagcccagcttccagtcgcctgtccagctcctcactgtcatccctgggggaggatcaagacagcgtgctgacccctgaggaggtagccctgtgcttggaactcagtgagggtgaggagactcccaggaacagcgtctctcccatgccaagggctccttcaccccccaccacctatgggtacatcagcgtcccaacagcctcagagttcacggacatgggcaggactggaggaggggtggggcccaaggggggagtcttgctgtgcccacctcggccctgcctcacccccacccccagcgagggctccttagccaatggttggggctcagcctctgaggacaatgccgccagcgccagagccagccttgtcagctcctccgatggctccttcctcgctgatgctcactttgcccgggccctggcagtggctgtggatagctttggtttcggtctagagcccagggaggcagactgcgtcttcatagatgcctcatcacctccctccccacgggatgagatcttcctgacccccaacctctccctgcccctgtgggagtggaggccagactggttggaagacatggaggtcagccacacccagcggctgggaagggggatgcctccctggccccctgactctcagatctcttcccagagaagtcagctccactgtcgtatgcccaaggctggtgcttctcctgtagattactcctgaaccgtgtccctgagacttcccagacgggaatcagaaccacttctcctgtccacccacaagacctgggctgtggtgtgtgggtcttggcctgtgtttctctgcagctggggtccaccttcccaagcctccagagagttctccctccacgattgtgaaaacaaatgaaaacaaaattagagcaaagctgacctggagccctcagggagcaaaacatcatctccacctgactcctagccactgctttctcctctgtgccatccactcccaccaccaggttgttttggcctgaggagcagccctgcctgctgctcttcccccaccatttggatcacaggaagtggaggagccagaggtgcctttgtggaggacagcagtggctgctgggagagggctgtggaggaaggagcttctcggagccccctctcagccttacctgggcccctcctctagagaagagctcaactctctcccaacctcaccatggaaagaaaataattatgaatgccactgaggcactgaggccctacctcatgccaaacaaagggttcaaggctgggtctagcgaggatgctgaaggaagggaggtatgagaccgtaggtcaaaagcaccatcctcgtactgttgtcactatgagcttaagaaatttgataccataaaatggtaaagacttg

SEQ ID NO: 63956 - DNA, 3319 bp, Homo sapiens
acaaagtgctcgggacaaggacatagggctgagagtagccatgggctctggaggagacagcctcctggggggcaggggttccctgcctctgctgctcctgctcatcatgggaggcatggctcaggactccccgccccagatcctagtccacccccaggaccagctgttccagggccctggccctgccaggatgagctgccaagcctcaggccagccacctcccaccatccgctggttgctgaatgggcagcccctgagcatggtgcccccagacccacaccacctcctgcctgatgggacccttctgctgctacagccccctgcccggggacatgcccacgatggccaggccctgtccacagacctgggtgtctacacatgtgaggccagcaaccggcttggcacggcagtcagcagaggcgctcggctgtctgtggctgtcctccgggaggatttccagatccagcctcgggacatggtggctgtggtgggtgagcagtttactctggaatgtgggccgccctggggccacccagagcccacagtctcatggtggaaagatgggaaacccctggccctccagcccggaaggcacacagtgtccggggggtccctgctgatggcaagagcagagaagagtgacgaagggacctacatgtgtgtggccaccaacagcgcaggacatagggagagccgcgcagcccgggtttccatccaggagccccaggactacacggagcctgtggagcttctggctgtgcgaattcagctggaaaatgtgacactgctgaacccggatcctgcagagggccccaagcctagaccggcggtgtggctcagctggaaggtcagtggccctgctgcgcctgcccaatcttacacggccttgttcaggacccagactgccccgggaggccagggagctccgtgggcagaggagctgctggccggctggcagagcgcagagcttggaggcctccactggggccaagactacgagttcaaagtgagaccatcctctggccgggctcgaggccctgacagcaacgtgctgctcctgaggctgccggaaaaagtgcccagtgccccacctcaggaagtgactctaaagcctggcaatggcactgtctttgtgagctgggtcccaccacctgctgaaaaccacaatggcatcatccgtggctaccaggtctggagcctgggcaacacatcactgccaccagccaactggactgtagttggtgagcagacccagctggaaatcgccacccatatgccaggctcctactgcgtgcaagtggctgcagtcactggtgctggagctggggagcccagtagacctgtctgcctccttttagagcaggccatggagcgagccacccaagaacccagtgagcatggtccctggaccctggagcagctgagggctaccttgaagcggcctgaggtcattgccacctgcggtgttgcactctggctgctgcttctgggcaccgccgtgtgtatccaccgccggcgccgagctagggtgcacctgggcccaggtctgtacagatataccagtgaggatgccatcctaaaacacaggatggatcacagtgactcccagtggttggcagacacttggcgttccacctctggctctcgggacctgagcagcagcagcagcctcagcagtcggctgggggcggatgcccgggacccactagactgtcgtcgctccttgctctcctgggactcccgaagccccggcgtgcccctgcttccagacaccagcactttttatggctccctcatcgctgagctgccctccagtaccccagccaggccaagtccccaggtcccagctgtcaggcgcctcccaccccagctggcccagctctccagcccctgttccagctcagacagcctctgcagccgcaggggactctcttctccccgcttgtctctggcccctgcagaggcttggaaggccaaaaagaagcaggagctgcagcatgccaacagttccccactgctccggggcagccactccttggagctccgggcctgtgagttaggaaatagaggttccaagaacctttcccaaagcccaggagctgtgccccaagctctggttgcctggcgggccctgggaccgaaactcctcagctcctcaaatgagctggttactcgtcatctccctccagcacccctctttcctcatgaaactcccccaactcagagtcaacagacccagcctccggtggcaccacaggctccctcctccatcctgctgccagcagcccccatccccatccttagcccctgcagtccccctagcccccaggcctcttccctctctggccccagcccagcttccagtcgcctgtccagctcctcactgtcatccctgggggaggatcaagacagcgtgctgacccctgaggaggtagccctgtgcttggaactcagtgagggtgaggagactcccaggaacagcgtctctcccatgccaagggctccttcaccccccaccacctatgggtacatcagcgtcccaacagccttacctgggcccctcctctagagaagagctcaactctctcccaacctcaccatggaaagaaaataattatgaatgccactgaggcactgaggccctacctcatgccaaacaaagggttcaaggctgggtctagcgaggatgctgaaggaagggaggtatgagaccgtaggtcaaaagcaccatcctcgtactgttgtcactatgagcttaagaaatttgataccataaaatggtaaagacttgagttctgtgagatcattccccggagcaccatttttaggggagcacctggagagatggcaagaatttcctgagttaggcagggatcaggcattcattgacactcagggagtgtcacacatttctgttctgcaattaaagggagaatgaggttcatccaccaaattttaagcagaatataggaagggcaggggtggggagtttcagggtctgctggtcctggcaacttatattaaatccacctcctcaagataagccttagggatatttatggctgagggaagtgggatggtctaaggcatggggaagggtgattggctgtggggaaaatgaagtaataggttcattctgcccaagtgtacttggggttcatggcatttcataaggacatttgtgtagaaaattgttttgctggctgggcacggtggctcacgcctgtaatcccagcactttgggaggcggaggtaggcagatcatgaggtcaggagatcgagaccatcctggctaacatggtgaaaccccgtctctact

SEQ ID NO: 63957 - DNA, 2342 bp, Homo sapiens
acaaagtgctcgggacaaggacatagggctgagagtagccatgggctctggaggagacagcctcctggggggcaggggttccctgcctctgctgctcctgctcatcatgggaggcatggctcaggactccccgccccagatcctagtccacccccaggaccagctgttccagggccctggccctgccaggatgagctgccaagcctcaggccagccacctcccaccatccgctggttgctgaatgggcagcccctgagcatggtgcccccagacccacaccacctcctgcctgatgggacccttctgctgctacagccccctgcccggggacatgcccacgatggccaggccctgtccacagacctgggtgtctacacatgtgaggccagcaaccggcttggcacggcagtcagcagaggcgctcggctgtctgtggctgtcctccgggaggatttccagatccagcctcgggacatggtggctgtggtgggtgagcagtttactctggaatgtgggccgccctggggccacccagagcccacagtctcatggtggaaagatgggaaacccctggccctccagcccggaaggcacacagtgtccggggggtccctgctgatggcaagagcagagaagagtgacgaagggacctacatgtgtgtggccaccaacagcgcaggacatagggagagccgcgcagcccgggtttccatccaggagccccaggactacacggagcctgtggagcttctggctgtgcgaattcagctggaaaatgtgacactgctgaacccggatcctgcagagggccccaagcctagaccggcggtgtggctcagctggaaggtcagtggccctgctgcgcctgcccaatcttacacggccttgttcaggacccagactgccccgggaggccagggagctccgtgggcagaggagctgctggccggctggcagagcgcagagcttggaggcctccactggggccaagactacgagttcaaagtgagaccatcctctggccgggctcgaggccctgacagcaacgtgctgctcctgaggctgccggaaaaagtgcccagtgccccacctcaggaagtgactctaaagcctggcaatggcactgtctttgtgagctgggtcccaccacctgctgaaaaccacaatggcatcatccgtggctaccaggtctggagcctgggcaacacatcactgccaccagccaactggactgtagttggtgagcagacccagctggaaatcgccacccatatgccaggctcctactgcgtgcaagtggctgcagtcactggtgctggagctggggagcccagtagacctgtctgcctccttttagagcaggccatggagcgagccacccaagaacccagtgagcatggtccctggaccctggagcagctgagggctaccttgaagcggcctgaggtcattgccacctgcggtgttgcactctggctgctgcttctgggcaccgccgtgtgtatccaccgccggcgccgagctagggtgcacctgggcccaggtctgtacagatataccagtgaggatgccatcctaaaacacaggatggatcacagtgactcccagtggttggcagacacttggcgttccacctctggctctcgggacctgagcagcagcagcagcctcagcagtcggctgggggcggatgcccgggacccactagactgtcgtcgctccttgctctcctgggactcccgaagccccggcgtgcccctgcttccagacaccagcactttttatggctccctcatcgctgagctgccctccagtaccccagccaggccaagtccccaggtcccagctgtcaggcgcctcccaccccagctggcccagctctccagcccctgttccagctcagacagcctctgcagccgcaggggactctcttctccccgcttgtctctggcccctgcagaggcttggaaggccaaaaagaagcaggagctgcagcatgccaacagttccccactgctccggggcagccactccttggagctccgggcctgtgagttaggaaatagaggttccaagaacctttcccaaagcccaggagctgtgccccaagctctggttgcctggcgggccctgggaccgaaactcctcagctcctcaaatgagctggttactcgtcatctccctccagcacccctctttcctcatgaaactcccccaactcagagtcaacagacccatgctgaaggaagggaggtatgagaccgtaggtcaaaagcaccatcctcgtactgttgtcactatgagcttaagaaatttgataccataaaatggtaaagacttg

SEQ ID NO: 63958 - DNA, 1702 bp, Homo sapiens
acaaagtgctcgggacaaggacatagggctgagagtagccatgggctctggaggagacagcctcctggggggcaggggttccctgcctctgctgctcctgctcatcatgggctcagcctctgaggacaatgccgccagcgccagagccagccttgtcagctcctccgatggctccttcctcgctgatgctcactttgcccgggccctggcagtggctgtggatagctttggtttcggtctagagcccagggaggcagactgcgtcttcatagatgcctcatcacctccctccccacgggatgagatcttcctgacccccaacctctccctgcccctgtgggagtggaggccagactggttggaagacatggaggtcagccacacccagcggctgggaagggggatgcctccctggccccctgactctcagatctcttcccagagaagtcagctccactgtcgtatgcccaaggctggtgcttctcctgtagattactcctgaaccgtgtccctgagacttcccagacgggaatcagaaccacttctcctgtccacccacaagacctgggctgtggtgtgtgggtcttggcctgtgtttctctgcagctggggtccaccttcccaagcctccagagagttctccctccacgattgtgaaaacaaatgaaaacaaaattagagcaaagctgacctggagccctcagggagcaaaacatcatctccacctgactcctagccactgctttctcctctgtgccatccactcccaccaccaggttgttttggcctgaggagcagccctgcctgctgctcttcccccaccatttggatcacaggaagtggaggagccagaggtgcctttgtggaggacagcagtggctgctgggagagggctgtggaggaaggagcttctcggagccccctctcagccttacctgggcccctcctctagagaagagctcaactctctcccaacctcaccatggaaagaaaataattatgaatgccactgaggcactgaggccctacctcatgccaaacaaagggttcaaggctgggtctagcgaggatgctgaaggaagggaggtatgagaccgtaggtcaaaagcaccatcctcgtactgttgtcactatgagcttaagaaatttgataccataaaatggtaaagacttgagttctgtgagatcattccccggagcaccatttttaggggagcacctggagagatggcaagaatttcctgagttaggcagggatcaggcattcattgacactcagggagtgtcacacatttctgttctgcaattaaagggagaatgaggttcatccaccaaattttaagcagaatataggaagggcaggggtggggagtttcagggtctgctggtcctggcaacttatattaaatccacctcctcaagataagccttagggatatttatggctgagggaagtgggatggtctaaggcatggggaagggtgattggctgtggggaaaatgaagtaataggttcattctgcccaagtgtacttggggttcatggcatttcataaggacatttgtgtagaaaattgttttgctggctgggcacggtggctcacgcctgtaatcccagcactttgggaggcggaggtaggcagatcatgaggtcaggagatcgagaccatcctggctaacatggtgaaaccccgtctctact

SEQ ID NO: 63959 - DNA, 2467 bp, Homo sapiens
agttagctagtacgagacgggtttgaatcggccgagggttccctgtgtgtgtgtccgctcgccctctgctccgtcctgcggctgcccactgccctcctacggtccaccatggccctgctgcactccggccgcgtcctccccgggatcgccgccgccttccacccgggcctcgccgccgcggcctctgccagagccagctcctggtggacccatgtggaaatgggacctccagatcccattctgggagtcactgaagcctttaagagggacaccaatagcaaaaagatgaatctgggagttggtgcctaccgggatgataacggaaagccttacgtgctgcctagcgtccgcaaggcagaggcccagattgccgcaaaaaatttggacaaggaatacctgcccattgggggactggctgaattttgcaaggcatctgcagaactagccctgggtgagaacagcgaagtcttgaagagtggccggtttgtcactgtgcagaccatttctggaactggagccttaaggatcggagccagttttctgcaaagattttttaagttcagccgagatgtctttctgcccaaaccaacctggggaaaccacacacccatcttcagggatgctggcatgcagctacaaggttatcggtattatgaccccaagacttgcggttttgacttcacaggcgctgtggaggatatttcaaaaataccagagcagagtgttcttcttctgcatgcctgcgcccacaatcccacgggagtggacccgcgtccggaacagtggaaggaaatagcaacagtggtgaagaaaaggaatctctttgcgttctttgacatggcctaccaaggctttgccagtggtgatggtgataaggatgcctgggctgtgcgccacttcatcgaacagggcattaatgtttgtctctgccaatcatatgccaagaacatgggcttatatggtgagcgtgtaggagccttcactatggtctgcaaagatgcggatgaagccaaaagggtagagtcacagttgaagatcttgatccgtcccatgtattccaaccctcccctcaatggggcccggattgctgctgccattctgaacaccccagatttgcgaaaacaatggctgcaagaagtgaaaggcatggctgaccgcatcattggcatgcggactcaactggtctccaacctcaagaaggagggttccacccacaattggcaacacatcaccgaccaaattggcatgttctgtttcacagggctaaagcctgaacaggtggagcggctgatcaaggagttctccatctacatgacaaaagatggccgcatctctgtggcaggggtcacctccagcaacgtgggctaccttgcccatgccattcaccaggtcaccaagtaatgtccctggtgcgaggaaacagagacaacctttctgtcttcagcctctgctattgagagcttcacacagacaatgagagagggtggatggtggtgagtggatcatttctttcagccacagtgtgtaacactcagcatttgaatgtttctcagaaaagaacatgtagtgacacagggcagaggcatccatggctggcgtctggaatattaaaccaaactctccccggtccttttttctccaacttttctcaaagagtttacatgtgcaagaaagtcatcgcaccaaaaaacctgtcaattatgccattgcaatatttcagaagctttaactgaagtgtcaggttcctcgtgagaaacagcacacgttagaggctttgagagaaggcctagttctgtcatgagtagtcggcctcgtgtctgtcctcccatcttggaacaaccttatcaacaggccgcactgcagaaatgatgttttatgaaaaccaatgaggctgctgccactccagcaagggaaataatgcagtttcctgtcttatttaagaaaaagagaaggctctcttttctcccttgtcattgccgttcttttccttacacgcaaagattttttaactattgcagattttcatcccattctactgcttgattgaccatcaactccatcctatcgagatttatttaagaatgaagaacataattttctgctgatgccgtaccctcacccttttcagcaaagaatagtggagagtaggaaactgtactttatctcggcatcctcttgaatgatagtgcaagtttctccagttgggatgttgtctctgcccggttggacctcctccctttgttgaatgtggtgtgcagcctctcatctcacactgtgagtccagcggcgcagggtggtaccaggaaagaggatattctaggctttgcgtgctgctagctgggttcaggcttcacccactggaaagaaccaccatctgctctaaccatgtagacttattgcggcctggtttctctgttacaataaaattactgtagacccaaaaaaaaaaaacggcacgagctcgtgc

SEQ ID NO: 63960 - DNA, 2461 bp, Homo sapiens
ttcggctgcggctgcgtgtaatcggacgagggttccctgtgtgtgtgtccgctcgccctctgctccgtcctgcggctgcccactgccctcctacggtccaccatggccctgctgcactccggccgcgtcctccccgggatcgccgccgccttccacccgggcctcgccgccgcggcctctgccagagccagctcctggtggacccatgtggaaatgggacctccagatcccattctgggagtcactgaagcctttaagagggacaccaatagcaaaaagatgaatctgggagttggtgcctaccgggatgataacggaaagccttacgtgctgcctagcgtccgcaaggcagaggcccagattgccgcaaaaaatttggacaaggaatacctgcccattgggggactggctgaattttgcaaggcatctgcagaactagccctgggtgagaacagcgaagtcttgaagagtggccggtttgtcactgtgcagaccatttctggaactggagccttaaggatcggagccagttttctgcaaagattttttaagttcagccgagatgtctttctgcccaaaccaacctggggaaaccacacacccatcttcagggatgctggcatgcagctacaaggttatcggtattatgaccccaagacttgcggttttgacttcacaggcgctgtggaggatatttcaaaaataccagagcagagtgttcttcttctgcatgcctgcgcccacaatcccacgggagtggacccgcgtccggaacagtggaaggaaatagcaacagtggtgaagaaaaggaatctctttgcgttctttgacatggcctaccaaggctttgccagtggtgatggtgataaggatgcctgggctgtgcgccacttcatcgaacagggcattaatgtttgtctctgccaatcatatgccaagaacatgggcttatatggtgagcgtgtaggagccttcactatggtctgcaaagatgcggatgaagccaaaagggtagagtcacagttgaagatcttgatccgtcccatgtattccaaccctcccctcaatggggcccggattgctgctgccattctgaacaccccagatttgcgaaaacaatggctgcaagaagtgaaaggcatggctgaccgcatcattggcatgcggactcaactggtctccaacctcaagaaggagggttccacccacaattggcaacacatcaccgaccaaattggcatgttctgtttcacagggctaaagcctgaacaggtggagcggctgatcaaggagttctccatctacatgacaaaagatggccgcatctctgtggcaggggtcacctccagcaacgtgggctaccttgcccatgccattcaccaggtcaccaagtaatgtccctggtgcgaggaaacagagacaacctttctgtcttcagcctctgctattgagagcttcacacagacaatgagagagggtggatggtggtgagtggatcatttctttcagccacagtgtgtaacactcagcatttgaatgtttctcagaaaagaacatgtagtgacacagggcagaggcatccatggctggcgtctggaatattaaaccaaactctccccggtccttttttctccaacttttctcaaagagtttacatgtgcaagaaagtcatcgcaccaaaaaacctgtcaattatgccattgcaatatttcagaagctttaactgaagtgtcaggttcctcgtgagaaacagcacacgttagaggctttgagagaaggcctagttctgtcatgagtagtcggcctcgtgtctgtcctcccatcttggaacaaccttatcaacaggccgcactgcagaaatgatgttttatgaaaaccaatgaggctgctgccactccagcaagggaaataatgcagtttcctgtcttatttaagaaaaagagaaggctctcttttctcccttgtcattgccgttcttttccttacacgcaaagattttttaactattgcagattttcatcccattctactgcttgattgaccatcaactccatcctatcgagatttatttaagaatgaagaacataattttctgctgatgccgtaccctcacccttttcagcaaagaatagtggagagtaggaaactgtactttatctcggcatcctcttgaatgatagtgcaagtttctccagttgggatgttgtctctgcccggttggacctcctccctttgttgaatgtggtgtgcagcctctcatctcacactgtgagtccagcggcgcagggtggtaccaggaaagaggatattctaggctttgcgtgctgctagctgggttcaggcttcacccactggaaagaaccaccatctgctctaaccatgtagacttattgcggcctggtttctctgttacaataaaattactgtagacccaaaaaaaaaaaacggcacgagctcgtgc

SEQ ID NO: 63961 - DNA, 2414 bp, Homo sapiens
agttagctagtacgagacgggtttgaatcggccgagggttccctgtgtgtgtgtccgctcgccctctgctccgtcctgcggctgcccactgccctcctacggtccaccatggccctgctgcactccggccgcgtcctccccgggatcgccgccgccttccacccgggcctcgccgccgcggcctctgccagagccagctcctggtggacccatgtggaaatgggacctccagatcccattctgggagtcactgaagcctttaagagggacaccaatagcaaaaagatgaatctgggagttggtgcctaccgggatgataacggaaagccttacgtgctgcctagcgtccgcaaggcagaggcccagattgccgcaaaaaatttggacaaggaatacctgcccattgggggactggctgaattttgcaaggcatctgcagaactagccctgggtgagaacagcgaagtcttgaagagtggccggtttgtcactgtgcagaccatttctggaactggagccttaaggatcggagccagttttctgcaaagattttttaagttcagccgagatgtctttctgcccaaaccaacctggggaaaccacacacccatcttcagggatgctggcatgcagctacaaggttatcggtattatgaccccaagacttgcggttttgacttcacaggcgctgtggaggatatttcaaaaataccagagcagagtgttcttcttctgcatgcctgcgcccacaatcccacgggagtggacccgcgtccggaacagtggaaggaaatagcaacagtggtgaagaaaaggaatctctttgcgttctttgacatggcctaccaaggctttgccagtggtgatggtgataaggatgcctgggctgtgcgccacttcatcgaacagggcattaatgtttgtctctgccaatcatatgccaagaacatgggcttatatggtgagcgtgtaggagccttcactatggtctgcaaagatgcggatgaagccaaaagggtagagtcacagttgaagatcttgatccgtcccatgtattccaaccctcccctcaatggggcccggattgctgctgccattctgaacaccccagatttgcgaaaacaatggctgcaagaagtgaaaggcatggctgaccgcatcattggcatgcggactcaactggtctccaacctcaagaaggagggttccacccacaattggcaacacatcaccgaccaaattggcatgttctgtttcacagggctaaagcctgaacaggtggagcggctgatcaaggagttctccatctacatgacttgcccatgccattcaccaggtcaccaagtaatgtccctggtgcgaggaaacagagacaacctttctgtcttcagcctctgctattgagagcttcacacagacaatgagagagggtggatggtggtgagtggatcatttctttcagccacagtgtgtaacactcagcatttgaatgtttctcagaaaagaacatgtagtgacacagggcagaggcatccatggctggcgtctggaatattaaaccaaactctccccggtccttttttctccaacttttctcaaagagtttacatgtgcaagaaagtcatcgcaccaaaaaacctgtcaattatgccattgcaatatttcagaagctttaactgaagtgtcaggttcctcgtgagaaacagcacacgttagaggctttgagagaaggcctagttctgtcatgagtagtcggcctcgtgtctgtcctcccatcttggaacaaccttatcaacaggccgcactgcagaaatgatgttttatgaaaaccaatgaggctgctgccactccagcaagggaaataatgcagtttcctgtcttatttaagaaaaagagaaggctctcttttctcccttgtcattgccgttcttttccttacacgcaaagattttttaactattgcagattttcatcccattctactgcttgattgaccatcaactccatcctatcgagatttatttaagaatgaagaacataattttctgctgatgccgtaccctcacccttttcagcaaagaatagtggagagtaggaaactgtactttatctcggcatcctcttgaatgatagtgcaagtttctccagttgggatgttgtctctgcccggttggacctcctccctttgttgaatgtggtgtgcagcctctcatctcacactgtgagtccagcggcgcagggtggtaccaggaaagaggatattctaggctttgcgtgctgctagctgggttcaggcttcacccactggaaagaaccaccatctgctctaaccatgtagacttattgcggcctggtttctctgttacaataaaattactgtagacccaaaaaaaaaaaacggcacgagctcgtgc

SEQ ID NO: 63962 - DNA, 2413 bp, Homo sapiens
agttagctagtacgagacgggtttgaatcggccgagggttccctgtgtgtgtgtccgctcgccctctgctccgtcctgcggctgcccactgccctcctacggtccaccatggccctgctgcactccggccgcgtcctccccgggatcgccgccgccttccacccgggcctcgccgccgcggcctctgccagagccagctcctggtggacccatgtggaaatgggacctccagatcccattctgggagtcactgaagcctttaagagggacaccaatagcaaaaagatgaatctgggagttggtgcctaccgggatgataacggaaagccttacgtgctgcctagcgtccgcaaggcagaggcccagattgccgcaaaaaatttggacaaggaatacctgcccattgggggactggctgaattttgcaaggcatctgcagaactagccctgggtgagaacagcgaagtcttgaagagtggccggtttgtcactgtgcagaccatttctggaactggagccttaaggatcggagccagttttctgcaaagattttttaagttcagccgagatgtctttctgcccaaaccaacctggggaaaccacacacccatcttcagggatgctggcatgcagctacaaggttatcggtattatgaccccaagacttgcggttttgacttcacaggcgctgtggaggatatttcaaaaataccagagcagagtgttcttcttctgcatgcctgcgcccacaatcccacgggagtggacccgcgtccggaacagtggaaggaaatagcaacagtggtgaagaaaaggaatctctttgcgttctttgacatggcctaccaaggctttgccagtggtgatggtgataaggatgcctgggctgtgcgccacttcatcgaacagggcattaatgtttgtctctgccaatcatatgccaagaacatgggcttatatggtgagcgtgtaggagccttcactatggtctgcaaagatgcggatgaagccaaaagggtagagtcacagttgaagatcttgatccgtcccatgtattccaaccctcccctcaatggggcccggattgctgctgccattctgaacaccccagatttgcgaaaacaatggctgcaagaagtgaaaggcatggctgaccgcatcattggcatgcggactcaactggtctccaacctcaagaaggagggttccacccacaattggcaacacatcaccgaccaaattggcatgttctgtttcacagggctaaagcctgaacaggtggagcggctgatcaaggagttctccatctacatgacaaaagatggccgcatctctgtggcaggggtcacctccagcaacgtgggctaccttgcccatgccattcaccaggtcaccaagtaatgtccctggtgcgaggaaacagagacaacctttctgtcttcagcctctgctattgagagcttcacacagacaatgagagagggtggatggtggtgagtggatcatttctttcagccacagtgtgtaacactcagcatttgaatgtttctcaattaaaccaaactctccccggtccttttttctccaacttttctcaaagagtttacatgtgcaagaaagtcatcgcaccaaaaaacctgtcaattatgccattgcaatatttcagaagctttaactgaagtgtcaggttcctcgtgagaaacagcacacgttagaggctttgagagaaggcctagttctgtcatgagtagtcggcctcgtgtctgtcctcccatcttggaacaaccttatcaacaggccgcactgcagaaatgatgttttatgaaaaccaatgaggctgctgccactccagcaagggaaataatgcagtttcctgtcttatttaagaaaaagagaaggctctcttttctcccttgtcattgccgttcttttccttacacgcaaagattttttaactattgcagattttcatcccattctactgcttgattgaccatcaactccatcctatcgagatttatttaagaatgaagaacataattttctgctgatgccgtaccctcacccttttcagcaaagaatagtggagagtaggaaactgtactttatctcggcatcctcttgaatgatagtgcaagtttctccagttgggatgttgtctctgcccggttggacctcctccctttgttgaatgtggtgtgcagcctctcatctcacactgtgagtccagcggcgcagggtggtaccaggaaagaggatattctaggctttgcgtgctgctagctgggttcaggcttcacccactggaaagaaccaccatctgctctaaccatgtagacttattgcggcctggtttctctgttacaataaaattactgtagacccaaaaaaaaaaaacggcacgagctcgtgc

SEQ ID NO: 63963 - DNA, 2442 bp, Homo sapiens
agttagctagtacgagacgggtttgaatcggccgagggttccctgtgtgtgtgtccgctcgccctctgctccgtcctgcggctgcccactgccctcctacggtccaccatggccctgctgcactccggccgcgtcctccccgggatcgccgccgccttccacccgggcctcgccgccgcggcctctgccagagccagctcctggtggacccatgtggaaatgggacctccagatcccattctgggagtcactgaagcctttaagagggacaccaatagcaaaaagatgaatctgggagttggtgcctaccgggatgataacggaaagccttacgtgctgcctagcgtccgcaaggcagaggcccagattgccgcaaaaaatttggacaaggaatacctgcccattgggggactggctgaattttgcaaggcatctgcagaactagccctgggtgagaacagcgaagtcttgaagagtggccggtttgtcactgtgcagaccatttctggaactggagccttaaggatcggagccagttttctgcaaagattttttaagttcagccgagatgtctttctgcccaaaccaacctggggaaaccacacacccatcttcagggatgctggcatgcagctacaaggttatcggtattatgaccccaagacttgcggttttgacttcacaggcgctgtggaggatatttcaaaaataccagagcagagtgttcttcttctgcatgcctgcgcccacaatcccacgggagtggacccgcgtccggaacagtggaaggaaatagcaacagtggtgaagaaaaggaatctctttgcgttctttgacatggcctaccaaggctttgccagtggtgatggtgataaggatgcctgggctgtgcgccacttcatcgaacagggcattaatgtttgtctctgccaatcatatgccaagaacatgggcttatatggtgagcgtgtaggagccttcactatggtctgcaaagatgcggatgaagccaaaagggtagagtcacagttgaagatcttgatccgtcccatgtattccaaccctcccctcaatggggcccggattgctgctgccattctgaacaccccagatttgcgaaaacaatggctgcaagaagtgaaaggcatggctgaccgcatcattggcatgcggactcaactggtctccaacctcaagaaggagggttccacccacaattggcaacacatcaccgaccaaattggcatgttctgtttcacagggctaaagcctgaacaggtggagcggctgatcaaggagttctccatctacatgacaaaagatggccgcatctctgtggcaggggtcacctccagcaacgtgggctaccttgcccatgccattcaccaggtcaccaagtaatgtccctggtgcgaggaaacagagacaacctttctgtcttcagcctctgctattgagagcttcacacagacaatgagagagggtggatggtggtgagtggatcatttctttcagccacagtgtgtaacactcagcatttgaatgtttctcagaaaagaacatgtagtgacacagggcagaggcatccatggctggcgtctggaatattaaaccaaactctccccggtccttttttctccaacttttctcaaagagtttacatgtgcaagaaagtcatcgcaccaaaaaacctgtcaattatgccattgcaatatttcagaagctttaactgaagtgtcaggttcctcgtgagaaacagcacacgttagaggctttgagagaaggcctagttctgtcatgagtagtcggcctcgtgtctgtcctcccatcttggaacaacatgatgttttatgaaaaccaatgaggctgctgccactccagcaagggaaataatgcagtttcctgtcttatttaagaaaaagagaaggctctcttttctcccttgtcattgccgttcttttccttacacgcaaagattttttaactattgcagattttcatcccattctactgcttgattgaccatcaactccatcctatcgagatttatttaagaatgaagaacataattttctgctgatgccgtaccctcacccttttcagcaaagaatagtggagagtaggaaactgtactttatctcggcatcctcttgaatgatagtgcaagtttctccagttgggatgttgtctctgcccggttggacctcctccctttgttgaatgtggtgtgcagcctctcatctcacactgtgagtccagcggcgcagggtggtaccaggaaagaggatattctaggctttgcgtgctgctagctgggttcaggcttcacccactggaaagaaccaccatctgctctaaccatgtagacttattgcggcctggtttctctgttacaataaaattactgtagacccaaaaaaaaaaaacggcacgagctcgtgc

SEQ ID NO: 63964 - DNA, 2332 bp, Homo sapiens
ttcggctgcggctgcgtgtaatcggacgagggttccctgtgtgtgtgtccgctcgccctctgctccgtcctgcggctgcccactgccctcctacggtccaccatggccctgctgcactccggccgcgtcctccccgggatcgccgccgccttccacccgggcctcgccgccgcggcctctgccagagccagctcctggtggacccatgtggaaatgggacctccagatcccattctgggagtcactgaagcctttaagagggacaccaatagcaaaaagatgaatctgggagttggtgcctaccgggatgataacggaaagccttacgtgctgcctagcgtccgcaagtttgtcactgtgcagaccatttctggaactggagccttaaggatcggagccagttttctgcaaagattttttaagttcagccgagatgtctttctgcccaaaccaacctggggaaaccacacacccatcttcagggatgctggcatgcagctacaaggttatcggtattatgaccccaagacttgcggttttgacttcacaggcgctgtggaggatatttcaaaaataccagagcagagtgttcttcttctgcatgcctgcgcccacaatcccacgggagtggacccgcgtccggaacagtggaaggaaatagcaacagtggtgaagaaaaggaatctctttgcgttctttgacatggcctaccaaggctttgccagtggtgatggtgataaggatgcctgggctgtgcgccacttcatcgaacagggcattaatgtttgtctctgccaatcatatgccaagaacatgggcttatatggtgagcgtgtaggagccttcactatggtctgcaaagatgcggatgaagccaaaagggtagagtcacagttgaagatcttgatccgtcccatgtattccaaccctcccctcaatggggcccggattgctgctgccattctgaacaccccagatttgcgaaaacaatggctgcaagaagtgaaaggcatggctgaccgcatcattggcatgcggactcaactggtctccaacctcaagaaggagggttccacccacaattggcaacacatcaccgaccaaattggcatgttctgtttcacagggctaaagcctgaacaggtggagcggctgatcaaggagttctccatctacatgacaaaagatggccgcatctctgtggcaggggtcacctccagcaacgtgggctaccttgcccatgccattcaccaggtcaccaagtaatgtccctggtgcgaggaaacagagacaacctttctgtcttcagcctctgctattgagagcttcacacagacaatgagagagggtggatggtggtgagtggatcatttctttcagccacagtgtgtaacactcagcatttgaatgtttctcagaaaagaacatgtagtgacacagggcagaggcatccatggctggcgtctggaatattaaaccaaactctccccggtccttttttctccaacttttctcaaagagtttacatgtgcaagaaagtcatcgcaccaaaaaacctgtcaattatgccattgcaatatttcagaagctttaactgaagtgtcaggttcctcgtgagaaacagcacacgttagaggctttgagagaaggcctagttctgtcatgagtagtcggcctcgtgtctgtcctcccatcttggaacaaccttatcaacaggccgcactgcagaaatgatgttttatgaaaaccaatgaggctgctgccactccagcaagggaaataatgcagtttcctgtcttatttaagaaaaagagaaggctctcttttctcccttgtcattgccgttcttttccttacacgcaaagattttttaactattgcagattttcatcccattctactgcttgattgaccatcaactccatcctatcgagatttatttaagaatgaagaacataattttctgctgatgccgtaccctcacccttttcagcaaagaatagtggagagtaggaaactgtactttatctcggcatcctcttgaatgatagtgcaagtttctccagttgggatgttgtctctgcccggttggacctcctccctttgttgaatgtggtgtgcagcctctcatctcacactgtgagtccagcggcgcagggtggtaccaggaaagaggatattctaggctttgcgtgctgctagctgggttcaggcttcacccactggaaagaaccaccatctgctctaaccatgtagacttattgcggcctggtttctctgttacaataaaattactgtagacccaaaaaaaaaaaacggcacgagctcgtgc

SEQ ID NO: 63965 - DNA, 2473 bp, Homo sapiens
ttcggctgcggctgcgtgtaatcggacgagggttccctgtgtgtgtgtccgctcgccctctgctccgtcctgcggctgcccactgccctcctacggtccaccatggccctgctgcactccggccgcgtcctccccgggatcgccgccgccttccacccgggcctcgccgccgcggcctctgccagagccagctcctggtggacccatgtggaaatgggacctccagatcccattctgggagtcactgaagcctttaagagggacaccaatagcaaaaagatgaatctgggagttggtgcctaccgggatgataacggaaagccttacgtgctgcctagcgtccgcaaggcagaggcccagattgccgcaaaaaatttggacaaggaatacctgcccattgggggactggctgaattttgcaaggcatctgcagaactagccctgggtgagaacagcgaagtcttgaagagtggccggtttgtcactgtgcagaccatttctggaactggagccttaaggatcggagccagttttctgcaaagattttttaagttcagccgagatgtctttctgcccaaaccaacctggggaaaccacacacccatcttcagggatgctggcatgcagctacaaggttatcggtattaaaataccagagcagagtgttcttcttctgcatgcctgcgcccacaatcccacgggagtggacccgcgtccggaacagtggaaggaaatagcaacagtggtgaagggaactctgataaaacctgtccactggccccaggatgtctgctgttgatgcctatattcgccctgaaaaggaatctctttgcgttctttgacatggcctaccaaggctttgccagtggtgatggtgataaggatgcctgggctgtgcgccacttcatcgaacagggcattaatgtttgtctctgccaatcatatgccaagaacatgggcttatatggtgagcgtgtaggagccttcactatggtctgcaaagatgcggatgaagccaaaagggtagagtcacagttgaagatcttgatccgtcccatgtattccaaccctcccctcaatggggcccggattgctgctgccattctgaacaccccagatttgcgaaaacaatggctgcaagaagtgaaaggcatggctgaccgcatcattggcatgcggactcaactggtctccaacctcaagaaggagggttccacccacaattggcaacacatcaccgaccaaattggcatgttctgtttcacagggctaaagcctgaacaggtggagcggctgatcaaggagttctccatctacatgacaaaagatggccgcatctctgtggcaggggtcacctccagcaacgtgggctaccttgcccatgccattcaccaggtcaccaagtaatgtccctggtgcgaggaaacagagacaacctttctgtcttcagcctctgctattgagagcttcacacagacaatgagagagggtggatggtggtgagtggatcatttctttcagccacagtgtgtaacactcagcatttgaatgtttctcagaaaagaacatgtagtgacacagggcagaggcatccatggctggcgtctggaatattaaaccaaactctccccggtccttttttctccaacttttctcaaagagtttacatgtgcaagaaagtcatcgcaccaaaaaacctgtcaattatgccattgcaatatttcagaagctttaactgaagtgtcaggttcctcgtgagaaacagcacacgttagaggctttgagagaaggcctagttctgtcatgagtagtcggcctcgtgtctgtcctcccatcttggaacaaccttatcaacaggccgcactgcagaaatgatgttttatgaaaaccaatgaggctgctgccactccagcaagggaaataatgcagtttcctgtcttatttaagaaaaagagaaggctctcttttctcccttgtcattgccgttcttttccttacacgcaaagattttttaactattgcagattttcatcccattctactgcttgattgaccatcaactccatcctatcgagatttatttaagaatgaagaacataattttctgctgatgccgtaccctcacccttttcagcaaagaatagtggagagtaggaaactgtactttatctcggcatcctcttgaatgatagtgcaagtttctccagttgggatgttgtctctgcccggttggacctcctccctttgttgaatgtggtgtgcagcctctcatctcacactgtgagtccagcggcgcagggtggtaccaggaaagaggatattctaggctttgcgtgctgctagctgggttcaggcttcacccactggaaagaaccaccatctgctctaaccatgtagacttattgcggcctggtttctctgttacaataaaattactgtagacccaaaaaaaaaaaacggcacgagctcgtgc

SEQ ID NO: 63966 - DNA, 2441 bp, Homo sapiens
  misc_feature (2417)..(2417): n is a, c, g, or t
agttagctagtacgagacgggtttgaatcggccgagggttccctgtgtgtgtgtccgctcgccctctgctccgtcctgcggctgcccactgccctcctacggtccaccatggccctgctgcactccggccgcgtcctccccgggatcgccgccgccttccacccgggcctcgccgccgcggcctctgccagagccagctcctggtggacccatgtggaaatgggacctccagatcccattctgggagtcactgaagcctttaagagggacaccaatagcaaaaagatgaatctgggagttggtgcctaccgggatgataacggaaagccttacgtgctgcctagcgtccgcaaggcagaggcccagattgccgcaaaaaatttggacaaggaatacctgcccattgggggactggctgaattttgcaaggcatctgcagaactagccctgggtgagaacagcgaagtcttgaagagtggccggtttgtcactgtgcagaccatttctggaactggagccttaaggatcggagccagttttctgcaaagattttttaagttcagccgagatgtctttctgcccaaaccaacctggggaaaccacacacccatcttcagggatgctggcatgcagctacaaggttatcggtattatgaccccaagacttgcggttttgacttcacaggcgctgtggaggatatttcaaaaataccagagcagagtgttcttcttctgcatgcctgcgcccacaatcccacgggagtggacccgcgtccggaacagtggaaggaaatagcaacagtggtgaagaaaaggaatctctttgcgttctttgacatggcctaccaaggctttgccagtggtgatggtgataaggatgcctgggctgtgcgccacttcatcgaacagggcattaatgtttgtctctgccaatcatatgccaagaacatgggcttatatggtgagcgtgtaggagccttcactatggtctgcaaagatgcggatgaagccaaaagggtagagtcacagttgaagatcttgatccgtcccatgtattccaaccctcccctcaatggggcccggattgctgctgccattctgaacaccccagatttgcgaaaacaatggctgcaagaagtgaaaggcatggctgaccgcatcattggcatgcggactcaactggtctccaacctcaagaaggagggttccacccacaattggcaacacatcaccgaccaaattggcatgttctgtttcacagggctaaagcctgaacaggtggagcggctgatcaaggagttctccatctacatgacaaaagatggccgcatctctgtggcaggggtcacctccagcaacgtgggctaccttgcccatgccattcaccaggtcaccaagtaatgtccctggtgcgaggaaacagagacaacctttctgtcttcagcctctgctattgagagcttcacacagacaatgagagagggtggatggtggtgagtggatcatttctttcagccacagtgtgtaacactcagcatttgaatgtttctcagaaaagaacatgtagtgacacagggcagaggcatccatggctggcgtctggaatattaaaccaaactctccccggtccttttttctccaacttttctcaaagagtttacatgtgcaagaaagtcatcgcaccaaaaaacctgtcaattatgccattgcaatatttcagaagctttaactgaagtgtcaggttcctcgtgagaaacagcacacgttagaggctttgagagaaggcctagttctgtcatgagtagtcggcctcgtgtctgtcctcccatcttggaacaaccttatcaacaggccgcactgcagaaatgatgttttatgaaaaccaatgaggctgctgccactccagcaagggaaataatgcagtttcctgtcttatttaagaaaaagagaaggctctcttttctcccttgtcattgccgttcttttccttacacgcaaagattttttaactattgcagattttcatcccattctactgcttgattgaccatcaactccatcctatcgagatttatttaagaatgaagaacataattttctgctgatgccgtaccctcacccttttcagcaaagaatagtggagagtaggaaactgtactttatctcggcatcctcttgaatgatagtgcaagtttctccagttgggatgttgtctctgcccggttggacctcctccctttgttgaatgtggtgtgcagcctctcatctcacactgtgagtccagcggcgcagggtggtaccaggaaagaggatattctaggctttgcgtgctgctagctgggttcaggcttcacccactggaaagaaccaccaaagcctacattccctgctaacacagtctacagcgttcaacaacntagtacaacaaatagtcagcgcag

SEQ ID NO: 63967 - DNA, 1496 bp, Homo sapiens
ttcggctgcggctgcgtgtaatcggacgagggttccctgtgtgtgtgtccgctcgccctctgctccgtcctgcggctgcccactgccctcctacggtccaccatggccccggattgctgctgccattctgaacaccccagatttgcgaaaacaatggctgcaagaagtgaaaggcatggctgaccgcatcattggcatgcggactcaactggtctccaacctcaagaaggagggttccacccacaattggcaacacatcaccgaccaaattggcatgttctgtttcacagggctaaagcctgaacaggtggagcggctgatcaaggagttctccatctacatgacaaaagatggccgcatctctgtggcaggggtcacctccagcaacgtgggctaccttgcccatgccattcaccaggtcaccaagtaatgtccctggtgcgaggaaacagagacaacctttctgtcttcagcctctgctattgagagcttcacacagacaatgagagagggtggatggtggtgagtggatcatttctttcagccacagtgtgtaacactcagcatttgaatgtttctcagaaaagaacatgtagtgacacagggcagaggcatccatggctggcgtctggaatattaaaccaaactctccccggtccttttttctccaacttttctcaaagagtttacatgtgcaagaaagtcatcgcaccaaaaaacctgtcaattatgccattgcaatatttcagaagctttaactgaagtgtcaggttcctcgtgagaaacagcacacgttagaggctttgagagaaggcctagttctgtcatgagtagtcggcctcgtgtctgtcctcccatcttggaacaaccttatcaacaggccgcactgcagaaatgatgttttatgaaaaccaatgaggctgctgccactccagcaagggaaataatgcagtttcctgtcttatttaagaaaaagagaaggctctcttttctcccttgtcattgccgttcttttccttacacgcaaagattttttaactattgcagattttcatcccattctactgcttgattgaccatcaactccatcctatcgagatttatttaagaatgaagaacataattttctgctgatgccgtaccctcacccttttcagcaaagaatagtggagagtaggaaactgtactttatctcggcatcctcttgaatgatagtgcaagtttctccagttgggatgttgtctctgcccggttggacctcctccctttgttgaatgtggtgtgcagcctctcatctcacactgtgagtccagcggcgcagggtggtaccaggaaagaggatattctaggctttgcgtgctgctagctgggttcaggcttcacccactggaaagaaccaccatctgctctaaccatgtagacttattgcggcctggtttctctgttacaataaaattactgtagacccaaaaaaaaaaaacggcacgagctcgtgc

SEQ ID NO: 63968 - DNA, 2336 bp, Homo sapiens
  misc_feature (2290)..(2290): n is a, c, g, or t
  misc_feature (2295)..(2296): n is a, c, g, or t
agttagctagtacgagacgggtttgaatcggccgagggttccctgtgtgtgtgtccgctcgccctctgctccgtcctgcggctgcccactgccctcctacggtccaccatggccctgctgcactccggccgcgtcctccccgggatcgccgccgccttccacccgggcctcgccgccgcggcctctgccagagccagctcctggtggacccatgtggaaatgggacctccagatcccattctgggagtcactgaagcctttaagagggacaccaatagcaaaaagatgaatctgggagttggtgcctaccgggatgataacggaaagccttacgtgctgcctagcgtccgcaaggcagaggcccagattgccgcaaaaaatttggacaaggaatacctgcccattgggggactggctgaattttgcaaggcatctgcagaactagccctgggtgagaacagcgaagtcttgaagagtggccggtttgtcactgtgcagaccatttctggaactggagccttaaggatcggagccagttttctgcaaagattttttaagttcagccgagatgtctttctgcccaaaccaacctggggaaaccacacacccatcttcagggatgctggcatgcagctacaaggttatcggtattatgaccccaagacttgcggttttgacttcacaggcgctgtggaggatatttcaaaaataccagagcagagtgttcttcttctgcatgcctgcgcccacaatcccacgggagtggacccgcgtccggaacagtggaaggaaatagcaacagtggtgaagaaaaggaatctctttgcgttctttgacatggcctaccaaggctttgccagtggtgatggtgataaggatgcctgggctgtgcgccacttcatcgaacagggcattaatgtttgtctctgccaatcatatgccaagaacatgggcttatatggtgagcgtgtaggagccttcactatggtctgcaaagatgcggatgaagccaaaagggtagagtcacagttgaagatcttgatccgtcccatgtattccaaccctcccctcaatggggcccggattgctgctgccattctgaacaccccagatttgcgaaaacaatggctgcaagaagtgaaaggcatggctgaccgcatcattggcatgcggactcaactggtctccaacctcaagaaggagggttccacccacaattggcaacacatcaccgaccaaattggcatgttctgtttcacagggctaaagcctgaacaggtggagcggctgatcaaggagttctccatctacatgacaaaagatggccgcatctctgtggcaggggtcacctccagcaacgtgggctaccttgcccatgccattcaccaggtcaccaagtaatgtccctggtgcgaggaaacagagacaacctttctgtcttcagcctctgctattgagagcttcacacagacaatgagagagggtggatggtggtgagtggatcatttctttcagccacagtgtgtaacactcagcatttgaatgtttctcagaaaagaacatgtagtgacacagggcagaggcatccatggctggcgtctggaatattaaaccaaactctccccggtccttttttctccaacttttctcaaagagtttacatgtgcaagaaagtcatcgcaccaaaaaacctgtcaattatgccattgcaatatttcagaagctttaactgaagtgtcaggttcctcgtgagaaacagcacacgttagaggctttgagagaaggcctagttctgtcatgagtagtcggcctcgtgtctgtcctcccatcttggaacaaccttatcaacaggccgcactgcagaaatgatgttttatgaaaaccaatgaggctgctgccactccagcaagggaaataatgcagtttcctgtcttatttaagaaaaagagaaggctctcttttctcccttgtcattgccgttcttttccttacacgcaaagattttttaactattgcagattttcatcccattctactgcttgattgaccatcaactccatcctatcgagatttatttaagaatgaagaacataattttctgctgatgccgtaccctcacccttttcagcaaagaatagtggagagtaggaaactgtactttatctcggcatcctcttgaatgatagtgcaagtttctccagttgggatgttgtctctgcccggttggacctcctccctttgttgaatgtggtgtgcagcctctcatctcacactgtgagtccccgctcanctatnngacacacatcccctttttttggataaaatttggaaaatgg

SEQ ID NO: 63969 - DNA, 2181 bp, Homo sapiens
agttagctagtacgagacgggtttgaatcggccgagggttccctgtgtgtgtgtccgctcgccctctgctccgtcctgcggctgcccactgccctcctacggtccaccatggccctgctgcactccggccgcgtcctccccgggatcgccgccgccttccacccgggcctcgccgccgcggcctctgccagagccagctcctggtggacccatgtggaaatgggacctccagatcccattctgggagtcactgaagcctttaagagggacaccaatagcaaaaagatgaatctgggagttggtgcctaccgggatgataacggaaagccttacgtgctgcctagcgtccgcaaggcagaggcccagattgccgcaaaaaatttggacaaggaatacctgcccattgggggactggctgaattttgcaaggcatctgcagaactagccctgggtgagaacagcgaagtcttgaagagtggccggtttgtcactgtgcagaccatttctggaactggagccttaaggatcggagccagttttctgcaaagattttttaagttcagccgagatgtctttctgcccaaaccaacctggggaaaccacacacccatcttcagggatgctggcatgcagctacaaggttatcggtattatgaccccaagacttgcggttttgacttcacaggcgctgtggaggatatttcaaaaataccagagcagagtgttcttcttctgcatgcctgcgcccacaatcccacgggagtggacccgcgtccggaacagtggaaggaaatagcaacagtggtgaagaaaaggaatctctttgcgttctttgacatggcctaccaaggctttgccagtggtgatggtgataaggatgcctgggctgtgcgccacttcatcgaacagggcattaatgtttgtctctgccaatcatatgccaagaacatgggcttatatggtgagcgtgtaggagccttcactatggtctgcaaagatgcggatgaagccaaaagggtagagtcacagttgaagatcttgatccgtcccatgtattccaaccctcccctcaatggggcccggattgctgctgccattctgaacaccccagatttgcgaaaacaatggctgcaagaagtgaaaggcatggctgaccgcatcattggcatgcggactcaactggtctccaacctcaagaaggagggttccacccacaattggcaacacatcaccgaccaaattggcatgttctgtttcacagggctaaagcctgaacaggtggagcggctgatcaaggagttctccatctacatgacaaaagatggccgcatctctgtggcaggggtcacctccagcaacgtgggctaccttgcccatgccattcaccaggtcaccaagtaatgtccctggtgcgaggaaacagagacaacctttctgtcttcagcctctgctattgagagcttcacacagacaatgagagagggtggatggtggtgagtggatcatttctttcagccacagtgtgtaacactcagcatttgaatgtttctcagaaaagaacatgtagtgacacagggcagaggcatccatggctggcgtctggaatattaaaccaaactctccccggtccttttttctccaacttttctcaaagagtttacatgtgcaagaaagtcatcgcaccaaaaaacctgtcaattatgccattgcaatatttcagaagctttaactgaagtgtcaggttcctcgtgagaaacagcacacgttagaggctttgagagaaggcctagttctgtcatgagtagtcggcctcgtgtctgtcctcccatcttggaacaaccttatcaacaggccgcactgcagaaatgatgttttatgaaaaccaatgaggctgctgccactccagcaagggaaataatgcagtttcctgtcttatttaagaaaaagagaaggctctcttttctcccttgtcattgccgttcttttccttacacgcaaagattttttaactattgcagattttcatcccattctactgcttgattgaccatcaactccatcctatcgagatttatttaagaatgaagaacataattttctgctgatgccgtaccctcaccctgctggaggagaggctaggtgcctgctcctgtgaggacaacagcctggcctcggcgtcat

SEQ ID NO: 63970 - DNA, 1253 bp, Homo sapiens
gagcggccgcccgggcaggtacgcgggtggcatgttctgtttcacagggctaaagcctgaacaggtggagcggctgatcaaggagttctccatctacatgacaaaagatggccgcatctctgtggcaggggtcacctccagcaacgtgggctaccttgcccatgccattcaccaggtcaccaagtaatgtccctggtgcgaggaaacagagacaacctttctgtcttcagcctctgctattgagagcttcacacagacaatgagagagggtggatggtggtgagtggatcatttctttcagccacagtgtgtaacactcagcatttgaatgtttctcagaaaagaacatgtagtgacacagggcagaggcatccatggctggcgtctggaatattaaaccaaactctccccggtccttttttctccaacttttctcaaagagtttacatgtgcaagaaagtcatcgcaccaaaaaacctgtcaattatgccattgcaatatttcagaagctttaactgaagtgtcaggttcctcgtgagaaacagcacacgttagaggctttgagagaaggcctagttctgtcatgagtagtcggcctcgtgtctgtcctcccatcttggaacaaccttatcaacaggccgcactgcagaaatgatgttttatgaaaaccaatgaggctgctgccactccagcaagggaaataatgcagtttcctgtcttatttaagaaaaagagaaggctctcttttctcccttgtcattgccgttcttttccttacacgcaaagattttttaactattgcagattttcatcccattctactgcttgattgaccatcaactccatcctatcgagatttatttaagaatgaagaacataattttctgctgatgccgtaccctcacccttttcagcaaagaatagtggagagtaggaaactgtactttatctcggcatcctcttgaatgatagtgcaagtttctccagttgggatgttgtctctgcccggttggacctcctccctttgttgaatgtggtgtgcagcctctcatctcacactgtgagtccagcggcgcagggtggtaccaggaaagaggatattctaggctttgcgtgctgctagctgggttcaggcttcacccactggaaagaaccaccatctgctctaaccatgtagacttattgcggcctggtttctctgttacaataaaattactgtagacccaaaaaaaaaaaacggcacgagctcgtgc

SEQ ID NO: 63971 - DNA, 1435 bp, Homo sapiens
agttagctagtacgagacgggtttgaatcggccgagggttccctgtgtgtgtgtccgctcgccctctgctccgtcctgcggctgcccactgccctcctacggtccaccatggccctgctgcactccggccgcgtcctccccgggatcgccgccgccttccacccgggcctcgccgccgcggcctctgccagagccagctcctggtggacccatgtggaaatgggacctccagatcccattctgggagtcactgaagcctttaagagggacaccaatagcaaaaagatgaatctgggagttggtgcctaccgggatgataacggaaagccttacgtgctgcctagcgtccgcaaggcagaggcccagattgccgcaaaaaatttggacaaggaatacctgcccattgggggactggctgaattttgcaaggcatctgcagaactagccctgggtgagaacagcgaagtcttgaagagtggccggtttgtcactgtgcagaccatttctggaactggagccttaaggatcggagccagttttctgcaaagattttttaagttcagccgagatgtctttctgcccaaaccaacctggggaaaccacacacccatcttcagggatgctggcatgcagctacaaggttatcggtattatgaccccaagacttgcggttttgacttcacaggcgctgtggaggatatttcaaaaataccagagcagagtgttcttcttctgcatgcctgcgcccacaatcccacgggagtggacccgcgtccggaacagtggaaggaaatagcaacagtggtgaagtgaaggtgaggacgatgaactcactggcgacagttctgtgtttagtaaccagctttggaggcttaatttggcaatgtctcaacagagagtcttaacctcgaacctgcgtgaaatgtccacacaggtggataagctgccagaaaagggctccccatttgcgtgattagcagttctgggattgatgacgcatgagtatttgaaagtaattttttttggctgggcgcggtggctcacgcctgtaatcccagcactttgggaggtcgaggcaggtggatcacctgaggtcagttcgagaccagcctggccaacatggtgaaaccccgtctctactaaaactacaaaattagctgggcgtagtggcccatgcctgtaatcctagctacttgggaggctgaggcaggagaatcacttgaacccaggaggtggagattgtggtgagccgagattgtgccactgcactccagcctgggcaacaagagcaaaactctgtctctaaaaaagaaaagactttacctctaaaacttaacttataaaactttaaacattaatcatagtaattccaagtaaggagaagaaattcatggatgtattttctcttgtctagcatacgcccagtagcagggcc

SEQ ID NO: 63972 - DNA, 719 bp, Homo sapiens
aggccataaagaatgagcttctgaagtatgaaaggtcctggacaaagcagtggccctgggtctgggcctgtatagagagtgttgcacatcactgaccgtgggtatctctccttcagtttgtcactgtgcagaccatttctggaactggagccttaaggatcggagccagttttctggtgagtctggaagcttcttcaggaaagaattataaattccagatgacagggcttcctgttgtgtgtgtatttgactgttgatgcagaagtagatttcttctttccgtgaagtttgcagatgtcctattctcatgaaaaaatgaaaggactttgaagaaattacaggaaagatatattagtgatgatgataaattcagttcactaggaacttactatttactagggagcttttgcattttaacttgtttaatccctatgagagaggtacaattaaccccctttacaagtgaagaaagcaagacccagaaaggtccttggctacatggccagtataactgtcagagactattccaacccaggcagtcttactgctgagtcaatactgcttctcaaccatagagagaaactgggtttcagcagagaaaaatgttctctcaataaaacacatcaacatttttttgcctctcctttgttcatttttctgtttcctttcgtcccatcttttagcaaagattttttaagttcagccgagatgtctttctg

SEQ ID NO: 63973 - DNA, 801 bp, Homo sapiens
cccgggggtgaatcggccgagggttccctgtgtgtgtgtccgctcgccctctgctccgtcctgcggctgcccactgccctcctacggtccaccatggccctgctgcactccggccgcgtcctccccgggatcgccgccgccttccacccgggcctcgccgccgcggcctctgccagagccagctcctggtggacccatgtggaaatgggacctccagatcccattctgggagtcactgaagcctttaagagggacaccaatagcaaaaagatgaatctgggagttggtgcctaccgggatgataacggaaagccttacgtgctgcctagcgtccgcaaggcagaggcccagattgccgcaaaaaatttggacaaggaatacctgcccattgggggactggctgaattttgcaaggcatctgcagaactagccctgggtgagaacagcgaagtcttgaagagtggccggcaaagattttttaagttcagccgagatgtctttctgcccaaaccaacctggggaaaccacacacccatcttcagggatgctggcatgcagctacaaggttatcggtattatgaccccaagacttgcggttttgacttcacaggcgctgtggaggatatttcaaaaataccagagcagagtgttcttcttctgcatgcctgcgcccacaatcccacgggagtggacccgcgtccggaacagtggaaggaaatagcaacagtggtgaagccggggggggaatgcccggggtacgaagggtccttggtcttggtggctaccggttgcctggagggc

SEQ ID NO: 63974 - DNA, 2991 bp, Homo sapiens
agttagctagtacgagacgggtttgaatcggccgagggttccctgtgtgtgtgtccgctcgccctctgctccgtcctgcggctgcccactgccctcctacggtccaccatggccctgctgcactccggccgcgtcctccccgggatcgccgccgccttccacccgggcctcgccgccgcggcctctgccagagccagctcctggtggacccatgtggaaatgggacctccagatcccattctgggagtcactgaagcctttaagagggacaccaatagcaaaaagatgaatctgggagttggtgcctaccgggatgataacggaaagccttacgtgctgcctagcgtccgcaaggcagaggcccagattgccgcaaaaaatttggacaaggaatacctgcccattgggggactggctgaattttgcaaggcatctgcagaactagccctgggtgagaacagcgaagtcttgaagagtggccggtttgtcactgtgcagaccatttctggaactggagccttaaggatcggagccagttttctgcaaagattttttaagttcagccgagatgtctttctgcccaaaccaacctggggaaaccacacacccatcttcagggatgctggcatgcagctacaaggttatcggtattatgaccccaagacttgcggttttgacttcacaggcgctgtggaggatatttcaaaaataccagagcagagtgttcttcttctgcatgcctgcgcccacaatcccacgggagtggacccgcgtccggaacagtggaaggaaatagcaacagtggtgaagaaaaggaatctctttgcgttctttgacatggcctaccaaggctttgccagtggtgatggtgataaggatgcctgggctgtgcgccacttcatcgaacagggcattaatgtttgtctctgccaatcatatgccaagaacatgggcttatatggtgagcgtgtaggagccttcactatggtctgcaaagatgcggatgaagccaaaagggtagagtcacagttgaagatcttgatccgtcccatgtattccaaccctcccctcaatggggcccggattgctgctgccattctgaacaccccagatttgcgaaaacaatggctgcaagaagtgaaaggcatggctgaccgcatcattggcatgcggactcaactggtctccaacctcaagaaggagggttccacccacaattggcaacacatcaccgaccaaattggcatgttctgtttcacagggctaaagcctgaacaggtggagcggctgatcaaggagttctccatctacatgacaaaagatggccgcatctctgtggcaggggtcacctccagcaacgtgggctaccttgcccatgccattcaccaggtcaccaagtaatgtccctggtgcgaggaaacagagacaacctttctgtcttcagcctctgctattgagagcttcacacagacaatgagagagggtggatggtggtgagtggatcatttctttcagccacagtgtgtaacactcagcatttgaatgtttctcagaaaagaacatgtagtgacacagggcagaggcatccatggctggcgtctggaatattaaaccaaactctccccggtccttttttctccaacttttctcaaagagtttacatgtgcaagaaagtcatcgcaccaaaaaacctgtcaattatgccattgcaatatttcagaagctttaactgaagtgtcaggttcctcgtgagaaacagcacacgttagaggctttgagagaaggcctagttctgtcatgagtagtcggcctcgtgtctgtcctcccatcttggaacaaccttatcaacaggccgcactgcagaaatgatgttttatgaaaaccaatgaggctgctgccactccagcaagggaaataatgcagtttcctgtcttatttaagaaaaagagaaggctctcttttctcccttgtcattgccgttcttttccttacacgcaaagattttttaactattgcagattttcatcccattctactgcttgattgaccatcaactccatcctatcgagatttatttaagaatgaagaacataattttctgctgatgccgtaccctcacccttttcagcaaagaatagtggagagtaggaaactgtactttatctcggcatcctcttgaatgatagtgcaagtttctccagttgggatgttgtctctgcccggttggacctcctccctttgttgaatgtggtgtgcagcctctcatctcacactgtgagtccagcggcgcagggtggtaccaggaaagaggatattctaggctttgcgtgctgctagctgggttcaggcttcacccactggaaagaaccaccatctgctctaaccatgtagacttattgcggcctggtttctctgttacaataaaattactgtagacccaaaaaaaaaaaaaaaaaaaaaaaaaaaaaaaaaaaaaaaaaaaaaaaaaaaaaaaaaaaaaaaaaaaagaaaaaaaaaaaaaaaaaaaaaaaaccttagggggggccccgaaacccaattggccgtccgggacccatttacaacttacggcccccgtttaaaaccatgggactggaaacccctggggtcccgaataaactggctggaccaaattatcttttctccagcctggttaacattgaaaaggcccgccccaatggcatttgcaaaatttggccaccttaatggcaaaagcgaaactgaaagggctaatgttatttaaaatcgccttaaaattttgacaaaccgctaattttttcccaaaggccgaatttcccaaatccgttaaaatggaaaaacctccgaaatagggtcatttctcgtcaagtgggaaacaggtgtcctttttaaaacacgtggcccacacgaaaagggcggacaaccgccttaaggccaaaaccccttccggggccttcccccatatctaggttaacgccaaatcgggactggggc

SEQ ID NO: 63975 - DNA, 2300 bp, Homo sapiens
agttagctagtacgagacgggtttgaatcggccgagggttccctgtgtgtgtgtccgctcgccctctgctccgtcctgcggctgcccactgccctcctacggtccaccatggccctgctgcactccggccgcgtcctccccgggatcgccgccgccttccacccgggcctcgccgccgcggcctctgccagagccagctcctggtggacccatgtggaaatgggacctccagatcccattctgggagtcactgaagcctttaagagggacaccaatagcaaaaagatgaatctgggagttggtgcctaccgggatgataacggaaagccttacgtgctgcctagcgtccgcaaggcagaggcccagattgccgcaaaaaatttggacaaggaatacctgcccattgggggactggctgaattttgcaaggcatctgcagaactagccctgggtgagaacagcgaagtcttgaagagtggccggtttgtcactgtgcagaccatttctggaactggagccttaaggatcggagccagttttctgcaaagattttttaagttcagccgagatgtctttctgcccaaaccaacctggggaaaccacacacccatcttcagggatgctggcatgcagctacaaggttatcggtattatgaccccaagacttgcggttttgacttcacaggcgctgtggaggatatttcaaaaataccagagcagagtgttcttcttctgcatgcctgcgcccacaatcccacgggagtggacccgcgtccggaacagtggaaggaaatagcaacagtggtgaagaaaaggaatctctttgcgttctttgacatggcctaccaaggctttgccagtggtgatggtgataaggatgcctgggctgtgcgccacttcatcgaacagggcattaatgtttgtctctgccaatcatatgccaagaacatgggcttatatggtgagcgtgtaggagccttcactatggtctgcaaagatgcggatgaagccaaaagggtagagtcacagttgaagatcttgatccgtcccatgtattccaaccctcccctcaatggggcccggattgctgctgccattctgaacaccccagatttgcgaaaacaatggctgcaagaagtgaaaggcatggctgaccgcatcattggcatgcggactcaactggtctccaacctcaagaaggagggttccacccacaattggcaacacatcaccgaccaaattggcatgttctgtttcacagggctaaagcctgaacagctctgctattgagagcttcacacagacaatgagagagggtggatggtggtgagtggatcatttctttcagccacagtgtgtaacactcagcatttgaatgtttctcagaaaagaacatgtagtgacacagggcagaggcatccatggctggcgtctggaatattaaaccaaactctccccggtccttttttctccaacttttctcaaagagtttacatgtgcaagaaagtcatcgcaccaaaaaacctgtcaattatgccattgcaatatttcagaagctttaactgaagtgtcaggttcctcgtgagaaacagcacacgttagaggctttgagagaaggcctagttctgtcatgagtagtcggcctcgtgtctgtcctcccatcttggaacaaccttatcaacaggccgcactgcagaaatgatgttttatgaaaaccaatgaggctgctgccactccagcaagggaaataatgcagtttcctgtcttatttaagaaaaagagaaggctctcttttctcccttgtcattgccgttcttttccttacacgcaaagattttttaactattgcagattttcatcccattctactgcttgattgaccatcaactccatcctatcgagatttatttaagaatgaagaacataattttctgctgatgccgtaccctcacccttttcagcaaagaatagtggagagtaggaaactgtactttatctcggcatcctcttgaatgatagtgcaagtttctccagttgggatgttgtctctgcccggttggacctcctccctttgttgaatgtggtgtgcagcctctcatctcacactgtgagtccagcggcgcagggtggtaccaggaaagaggatattctaggctttgcgtgctgctagctgggttcaggcttcacccactggaaagaaccaccatctgctctaaccatgtagacttattgcggcctggtttctctgttacaataaaattactgtagacccaaaaaaaaaaaacggcacgagctcgtgc

SEQ ID NO: 63976 - DNA, 2403 bp, Homo sapiens
ttcggctgcggctgcgtgtaatcggacgagggttccctgtgtgtgtgtccgctcgccctctgctccgtcctgcggctgcccactgccctcctacggtccaccatggccctgctgcactccggccgcgtcctccccgggatcgccgccgccttccacccgggcctcgccgccgcggcctctgccagagccagctcctggtggacccatgtggaaatgggacctccagatcccattctgggagtcactgaagcctttaagagggacaccaatagcaaaaagatgaatctgggagttggtgcctaccgggatgataacggaaagccttacgtgctgcctagcgtccgcaagtggctgaattttgcaaggcatctgcagaactagccctgggtgagaacagcgaagtcttgaagagtggccggtttgtcactgtgcagaccatttctggaactggagccttaaggatcggagccagttttctgcaaagattttttaagttcagccgagatgtctttctgcccaaaccaacctggggaaaccacacacccatcttcagggatgctggcatgcagctacaaggttatcggtattatgaccccaagacttgcggttttgacttcacaggcgctgtggaggatatttcaaaaataccagagcagagtgttcttcttctgcatgcctgcgcccacaatcccacgggagtggacccgcgtccggaacagtggaaggaaatagcaacagtggtgaagaaaaggaatctctttgcgttctttgacatggcctaccaaggctttgccagtggtgatggtgataaggatgcctgggctgtgcgccacttcatcgaacagggcattaatgtttgtctctgccaatcatatgccaagaacatgggcttatatggtgagcgtgtaggagccttcactatggtctgcaaagatgcggatgaagccaaaagggtagagtcacagttgaagatcttgatccgtcccatgtattccaaccctcccctcaatggggcccggattgctgctgccattctgaacaccccagatttgcgaaaacaatggctgcaagaagtgaaaggcatggctgaccgcatcattggcatgcggactcaactggtctccaacctcaagaaggagggttccacccacaattggcaacacatcaccgaccaaattggcatgttctgtttcacagggctaaagcctgaacaggtggagcggctgatcaaggagttctccatctacatgacaaaagatggccgcatctctgtggcaggggtcacctccagcaacgtgggctaccttgcccatgccattcaccaggtcaccaagtaatgtccctggtgcgaggaaacagagacaacctttctgtcttcagcctctgctattgagagcttcacacagacaatgagagagggtggatggtggtgagtggatcatttctttcagccacagtgtgtaacactcagcatttgaatgtttctcagaaaagaacatgtagtgacacagggcagaggcatccatggctggcgtctggaatattaaaccaaactctccccggtccttttttctccaacttttctcaaagagtttacatgtgcaagaaagtcatcgcaccaaaaaacctgtcaattatgccattgcaatatttcagaagctttaactgaagtgtcaggttcctcgtgagaaacagcacacgttagaggctttgagagaaggcctagttctgtcatgagtagtcggcctcgtgtctgtcctcccatcttggaacaaccttatcaacaggccgcactgcagaaatgatgttttatgaaaaccaatgaggctgctgccactccagcaagggaaataatgcagtttcctgtcttatttaagaaaaagagaaggctctcttttctcccttgtcattgccgttcttttccttacacgcaaagattttttaactattgcagattttcatcccattctactgcttgattgaccatcaactccatcctatcgagatttatttaagaatgaagaacataattttctgctgatgccgtaccctcacccttttcagcaaagaatagtggagagtaggaaactgtactttatctcggcatcctcttgaatgatagtgcaagtttctccagttgggatgttgtctctgcccggttggacctcctccctttgttgaatgtggtgtgcagcctctcatctcacactgtgagtccagcggcgcagggtggtaccaggaaagaggatattctaggctttgcgtgctgctagctgggttcaggcttcacccactggaaagaaccaccatctgctctaaccatgtagacttattgcggcctggtttctctgttacaataaaattactgtagacccaaaaaaaaaaaacggcacgagctcgtgc

SEQ ID NO: 63977 - DNA, 2359 bp, Homo sapiens
agttagctagtacgagacgggtttgaatcggccgagggttccctgtgtgtgtgtccgctcgccctctgctccgtcctgcggctgcccactgccctcctacggtccaccatggccctgctgcactccggccgcgtcctccccgggatcgccgccgccttccacccgggcctcgccgccgcggcctctgccagagccagctcctggtggacccatgtggaaatgggacctccagatcccattctgggagtcactgaagcctttaagagggacaccaatagcaaaaagatgaatctgggagttggtgcctaccgggatgataacggaaagccttacgtgctgcctagcgtccgcaaggcagaggcccagattgccgcaaaaaatttggacaaggaatacctgcccattgggggactggctgaattttgcaaggcatctgcagaactagccctgggtgagaacagcgaagtcttgaagagtggccggtttgtcactgtgcagaccatttctggaactggagccttaaggatcggagccagttttctgcaaagattttttaagttcagccgagatgtctttctgcccaaaccaacctggggaaaccacacacccatcttcagggatgctggcatgcagctacaaggttatcggtattatgaccccaagacttgcggttttgacttcacaggcgctgtggaggatatttcaaaaataccagagcagagtgttcttcttctgcatgcctgcgcccacaatcccacgggagtggacccgcgtccggaacagtggaaggaaatagcaacagtggtgaagaaaaggaatctctttgcgttctttgacatggcctaccaaggctttgccagtggtgatggtgataaggatgcctgggctgtgcgccacttcatcgaacagggcattaatgtttgtctctgccaatcatatgccaagaacatgggcttatatggtgagcgtgtaggagccttcactatggtctgcaaagatgcggatgaagccaaaagggtagagtcacagttgaagatcttgatccgtcccatgtattccaaccctcccctcaatggggcccggattgctgctgccattctgaacaccccagatttgcgaaaacaatggctgcaagaagtgaaaggcatggctgaccgcatcattggcatgcggactcaactggtctccaacctcaagaaggagggttccacccacaattggcaacacatcaccgaccaaattggcatgttctgtttcacagggctaaagcctgaacaggtggagcggctgatcaaggagttctccatctacatgacaaaagatggccgcatctctgtggcaggggtcacctccagcaacgtgggctaccttgcccatgccattcaccaggtcaccaagtaatgtccctggtgcgaggaaacagagacaacctttctgtcttcagcctctgctattgagagcttcacacagacaatgagagagggtggatggtggtgagtggatcatttctttcagccacagtgtgtaacactcagcatttgaatgtttctcagaaaagaacatgtagtgacacagggcagaggcatccatggctggcgtctggaatattaaaccaaactctccccggtccttttttctccaacttttctcaaagagtttacatgtgcaagaaagtcatcgcaccaaaaaacctgtcaattatgccattgcaatatttcagaagctttaactgaagtgtcaggttcctcgtgagaaacatgatgttttatgaaaaccaatgaggctgctgccactccagcaagggaaataatgcagtttcctgtcttatttaagaaaaagagaaggctctcttttctcccttgtcattgccgttcttttccttacacgcaaagattttttaactattgcagattttcatcccattctactgcttgattgaccatcaactccatcctatcgagatttatttaagaatgaagaacataattttctgctgatgccgtaccctcacccttttcagcaaagaatagtggagagtaggaaactgtactttatctcggcatcctcttgaatgatagtgcaagtttctccagttgggatgttgtctctgcccggttggacctcctccctttgttgaatgtggtgtgcagcctctcatctcacactgtgagtccagcggcgcagggtggtaccaggaaagaggatattctaggctttgcgtgctgctagctgggttcaggcttcacccactggaaagaaccaccatctgctctaaccatgtagacttattgcggcctggtttctctgttacaataaaattactgtagacccaaaaaaaaaaaacggcacgagctcgtgc

SEQ ID NO: 63978 - DNA, 2448 bp, Homo sapiens
  misc_feature (2397)..(2398): n is a, c, g, or t
  misc_feature (2406)..(2406): n is a, c, g, or t
agttagctagtacgagacgggtttgaatcggccgagggttccctgtgtgtgtgtccgctcgccctctgctccgtcctgcggctgcccactgccctcctacggtccaccatggccctgctgcactccggccgcgtcctccccgggatcgccgccgccttccacccgggcctcgccgccgcggcctctgccagagccagctcctggtggacccatgtggaaatgggacctccagatcccattctgggagtcactgaagcctttaagagggacaccaatagcaaaaagatgaatctgggagttggtgcctaccgggatgataacggaaagccttacgtgctgcctagcgtccgcaaggcagaggcccagattgccgcaaaaaatttggacaaggaatacctgcccattgggggactggctgaattttgcaaggcatctgcagaactagccctgggtgagaacagcgaagtcttgaagagtggccggtttgtcactgtgcagaccatttctggaactggagccttaaggatcggagccagttttctgcaaagattttttaagttcagccgagatgtctttctgcccaaaccaacctggggaaaccacacacccatcttcagggatgctggcatgcagctacaaggttatcggtattatgaccccaagacttgcggttttgacttcacaggcgctgtggaggatatttcaaaaataccagagcagagtgttcttcttctgcatgcctgcgcccacaatcccacgggagtggacccgcgtccggaacagtggaaggaaatagcaacagtggtgaagaaaaggaatctctttgcgttctttgacatggcctaccaaggctttgccagtggtgatggtgataaggatgcctgggctgtgcgccacttcatcgaacagggcattaatgtttgtctctgccaatcatatgccaagaacatgggcttatatggtgagcgtgtaggagccttcactatggtctgcaaagatgcggatgaagccaaaagggtagagtcacagttgaagatcttgatccgtcccatgtattccaaccctcccctcaatggggcccggattgctgctgccattctgaacaccccagatttgcgaaaacaatggctgcaagaagtgaaaggcatggctgaccgcatcattggcatgcggactcaactggtctccaacctcaagaaggagggttccacccacaattggcaacacatcaccgaccaaattggcatgttctgtttcacagggctaaagcctgaacaggtggagcggctgatcaaggagttctccatctacatgacaaaagatggccgcatctctgtggcaggggtcacctccagcaacgtgggctaccttgcccatgccattcaccaggtcaccaagtaatgtccctggtgcgaggaaacagagacaacctttctgtcttcagcctctgctattgagagcttcacacagacaatgagagagggtggatggtggtgagtggatcatttctttcagccacagtgtgtaacactcagcatttgaatgtttctcagaaaagaacatgtagtgacacagggcagaggcatccatggctggcgtctggaatattaaaccaaactctccccggtccttttttctccaacttttctcaaagagtttacatgtgcaagaaagtcatcgcaccaaaaaacctgtcaattatgccattgcaatatttcagaagctttaactgaagtgtcaggttcctcgtgagaaacagcacacgttagaggctttgagagaaggcctagttctgtcatgagtagtcggcctcgtgtctgtcctcccatcttggaacaaccttatcaacaggccgcactgcagaaatgatgttttatgaaaaccaatgaggctgctgccactccagcaagggaaataatgcagtttcctgtcttatttaagaaaaagagaaggctctcttttctcccttgtcattgccgttcttttccttacacgcaaagattttttaactattgcagattttcatcccattctactgcttgattgaccatcaactccatcctatcgagatttatttaagaatgaagaacataattttctgctgatgccgtaccctcacccttttcagcaaagaatagtggagagtaggaaactgtactttatctcggcatcctcttgaatgatagtgcaagtttctccagttgggatgttgtctctgcccggttggacctcctccctttgttgaatgtggtgtgcagcctctcatctcacactgtgagtccagcggcgcagggtggtaccaggaaagaggatattctaggctttgcgtgctgctagctgggttcaggcttcacccactggaaagaaccaccatctgctctaaccatgtagactatnnaaccgggntcgtacaccatgagagcgccgcccgggcggcggcgcgcccgc

SEQ ID NO: 63979 - DNA, 1475 bp, Homo sapiens
caaccctcccctcaatggggcccggattggaatacatgggacggatcaagatcttcaactgtattccaaccctcccctcaatggggcccggattgctgctgccattctgaacaccccagatttgcgaaaacaatggctgcaagaagtgaaaggcatggctgaccgcatcattggcatgcggactcaactggtctccaacctcaagaaggagggttccacccacaattggcaacacatcaccgaccaaattggcatgttctgtttcacagggctaaagcctgaacaggtggagcggctgatcaaggagttctccatctacatgacaaaagatggccgcatctctgtggcaggggtcacctccagcaacgtgggctaccttgcccatgccattcaccaggtcaccaagtaatgtccctggtgcgaggaaacagagacaacctttctgtcttcagcctctgctattgagagcttcacacagacaatgagagagggtggatggtggtgagtggatcatttctttcagccacagtgtgtaacactcagcatttgaatgtttctcagaaaagaacatgtagtgacacagggcagaggcatccatggctggcgtctggaatattaaaccaaactctccccggtccttttttctccaacttttctcaaagagtttacatgtgcaagaaagtcatcgcaccaaaaaacctgtcaattatgccattgcaatatttcagaagctttaactgaagtgtcaggttcctcgtgagaaacagcacacgttagaggctttgagagaaggcctagttctgtcatgagtagtcggcctcgtgtctgtcctcccatcttggaacaaccttatcaacaggccgcactgcagaaatgatgttttatgaaaaccaatgaggctgctgccactccagcaagggaaataatgcagtttcctgtcttatttaagaaaaagagaaggctctcttttctcccttgtcattgccgttcttttccttacacgcaaagattttttaactattgcagattttcatcccattctactgcttgattgaccatcaactccatcctatcgagatttatttaagaatgaagaacataattttctgctgatgccgtaccctcacccttttcagcaaagaatagtggagagtaggaaactgtactttatctcggcatcctcttgaatgatagtgcaagtttctccagttgggatgttgtctctgcccggttggacctcctccctttgttgaatgtggtgtgcagcctctcatctcacactgtgagtccagcggcgcagggtggtaccaggaaagaggatattctaggctttgcgtgctgctagctgggttcaggcttcacccactggaaagaaccaccatctgctctaaccatgtagacttattgcggcctggtttctctgttacaataaaattactgtagacccaaaaaaaaaaaacggcacgagctcgtgc

SEQ ID NO: 63980 - DNA, 2321 bp, Homo sapiens
  misc_feature (2251)..(2251): n is a, c, g, or t
  misc_feature (2274)..(2274): n is a, c, g, or t
  misc_feature (2285)..(2285): n is a, c, g, or t
  misc_feature (2295)..(2295): n is a, c, g, or t
  misc_feature (2297)..(2297): n is a, c, g, or t
agttagctagtacgagacgggtttgaatcggccgagggttccctgtgtgtgtgtccgctcgccctctgctccgtcctgcggctgcccactgccctcctacggtccaccatggccctgctgcactccggccgcgtcctccccgggatcgccgccgccttccacccgggcctcgccgccgcggcctctgccagagccagctcctggtggacccatgtggaaatgggacctccagatcccattctgggagtcactgaagcctttaagagggacaccaatagcaaaaagatgaatctgggagttggtgcctaccgggatgataacggaaagccttacgtgctgcctagcgtccgcaaggcagaggcccagattgccgcaaaaaatttggacaaggaatacctgcccattgggggactggctgaattttgcaaggcatctgcagaactagccctgggtgagaacagcgaagtcttgaagagtggccggtttgtcactgtgcagaccatttctggaactggagccttaaggatcggagccagttttctgcaaagattttttaagttcagccgagatgtctttctgcccaaaccaacctggggaaaccacacacccatcttcagggatgctggcatgcagctacaaggttatcggtattatgaccccaagacttgcggttttgacttcacaggcgctgtggaggatatttcaaaaataccagagcagagtgttcttcttctgcatgcctgcgcccacaatcccacgggagtggacccgcgtccggaacagtggaaggaaatagcaacagtggtgaagaaaaggaatctctttgcgttctttgacatggcctaccaaggctttgccagtggtgatggtgataaggatgcctgggctgtgcgccacttcatcgaacagggcattaatgtttgtctctgccaatcatatgccaagaacatgggcttatatggtgagcgtgtaggagccttcactatggtctgcaaagatgcggatgaagccaaaagggtagagtcacagttgaagatcttgatccgtcccatgtattccaaccctcccctcaatggggcccggattgctgctgccattctgaacaccccagatttgcgaaaacaatggctgcaagaagtgaaaggcatggctgaccgcatcattggcatgcggactcaactggtctccaacctcaagaaggagggttccacccacaattggcaacacatcaccgaccaaattggcatgttctgtttcacagggctaaagcctgaacaggtggagcggctgatcaaggagttctccatctacatgacaaaagatggccgcatctctgtggcaggggtcacctccagcaacgtgggctaccttgcccatgccattcaccaggtcaccaagtaatgtccctggtgcgaggaaacagagacaacctttctgtcttcagcctctgctattgagagcttcacacagacaatgagagagggtggatggtggtgagtggatcatttctttcagccacagtgtgtaacactcagcatttgaatgtttctcagaaaagaacatgtagtgacacagggcagaggcatccatggctggcgtctggaatattaaaccaaactctccccggtccttttttctccaacttttctcaaagagtttacatgtgcaagaaagtcatcgcaccaaaaaacctgtcaattatgccattgcaatatttcagaagctttaactgaagtgtcaggttcctcgtgagaaacagcacacgttagaggctttgagagaaggcctagttctgtcatgagtagtcggcctcgtgtctgtcctcccatcttggaacaaccttatcaacaggccgcactgcagaaatgatgttttatgaaaaccaatgaggctgctgccactccagcaagggaaataatgcagtttcctgtcttatttaagaaaaagagaaggctctcttttctcccttgtcattgccgttcttttccttacacgcaaagattttttaactattgcagattttcatcccattctactgcttgattgaccatcaactccatcctatcgagatttatttaagaatgaagaacataattttctgctgatgccgtaccctcacccttttcagcaaagaatagtggagagtaggaaactgtactttatctcggcatcctcttgaatgatagtgcaagtttctccagttgggatgttgtctctgcccggttggacctcctcccaaactaccatcagngaatactacaaacacctctacgnaaataaactangaaatctagnanaaatggataaattcctctacacat

SEQ ID NO: 63981 - DNA, 1264 bp, Homo sapiens
agttagctagtacgagacgggtttgaatcggccgagggttccctgtgtgtgtgtccgctcgccctctgctccgtcctgcggctgcccactgccctcctacggtccaccatggccctgctgcactccggccgcgtcctccccgggatcgccgccgccttccacccgggcctcgccgccgcggcctctgccagagccagctcctggtggacccatgtggaaatgggacctccagatcccattctgggagtcactgaagcctttaagagggacaccaatagcaaaaagatgaatctgggagttggtgcctaccgggatgataacggaaagccttacgtgctgcctagcgtccgcaaggcagaggcccagattgccgcaaaaaatttggacaaggaatacctgcccattgggggactggctgaattttgcaaggcatctgcagaactagccctgggtgagaacagcgaagtcttgaagagtggccggtttgtcactgtgcagaccatttctggaactggagccttaaggatcggagccagttttctgcaaagattttttaagttcagccgagatgtctttctgcccaaaccaacctggggaaaccacacacccatcttcagggatgctggcatgcagctacaaggttatcggtattatgaccccaagacttgcggttttgacttcacaggcgctgtggaggatatttcaaaaataccagagcagagtgttcttcttctgcatgcctgcgcccacaatcccacgggagtggacccgcgtccggaacagtggaaggaaatagcaacagtggtgaagaaaaggaatctctttgcgttctttgacatggcctaccaaggctttgccagtggtgatggtgataaggatgcctgggctgtgcgccacttcatcgaacagggcattaatgtttgtctctgccaatcatatgccaagaacatgggcttatatggtaagctacagcatccagcatgacacatgctctcatgctgggagagaatgccacgagggcatagagcttgtgggtgtgtgtgtgtgtgtgtgtgtgtgtgtgtccatccatgtccatgtccctccctaccctaagatgaaagaccagtatcgtagattttactgattttcttagccatatattcttcggtgtccttaagtttttccagcaaaggaaactgattactgcttctctaaacaaaaagtaacaaatccgtgagccaagaagatagatacaataaaaaatacctttgaatactctgag

SEQ ID NO: 63982 - DNA, 1143 bp, Homo sapiens
ttcggctgcggctgcgtgtaatcggacgagggttccctgtgtgtgtgtccgctcgccctctgctccgtcctgcggctgcccactgccctcctacggtccaccatggccctgctgcactccggccgcgtcctccccgggatcgccgccgccttccacccgggcctcgccgccgcggcctctgccagagccagctcctggtggacccatgtggaaatgggacctccagatcccattctgggagtcactgaagcctttaagagggacaccaatagcaaaaagatgaatctgggagttggtgcctaccgggatgataacggaaagccttacgtgctgcctagcgtccgcaaggcagaggcccagattgccgcaaaaaatttggacctcctccctttgttgaatgtggtgtgcagcctctcatctcacactgtgagtccagcggcgcagggtggtaccaggaaagaggatattctaggctttgcgtgctgctagctgggttcaggcttcacccactggaaagaaccaccatctgctctaaccatgtagacttattgcggcctggtttctctgttacaataaaattactgtagacccaaaaaaaaaaaaaaaaaaaaaaaaaaaaaaaaaaaaaaaaaaaaaaaaaaaaaaaaaaaaaaaaaaaagaaaaaaaaaaaaaaaaaaaaaaaaccttagggggggccccgaaacccaattggccgtccgggacccatttacaacttacggcccccgtttaaaaccatgggactggaaacccctggggtcccgaataaactggctggaccaaattatcttttctccagcctggttaacattgaaaaggcccgccccaatggcatttgcaaaatttggccaccttaatggcaaaagcgaaactgaaagggctaatgttatttaaaatcgccttaaaattttgacaaaccgctaattttttcccaaaggccgaatttcccaaatccgttaaaatggaaaaacctccgaaatagggtcatttctcgtcaagtgggaaacaggtgtcctttttaaaacacgtggcccacacgaaaagggcggacaaccgccttaaggccaaaaccccttccggggccttcccccatatctaggttaacgccaaatcgggactggggc

SEQ ID NO: 63983 - DNA, 1957 bp, Homo sapiens
agcggagttggagggaggcagggaatctggcttgattggcgtgctgagacgcacctggcgcaaccctcccttctgaatcgaagttcaagtcccgcggacactgcaaccatgaaggagagacgggccccccagccagtcgtggccagatgtaagctcgttctggtcggggacgtgcagtgtgggaagaccgcgatgttgcaagtgttagcgaaggattgctatccagaggtgagctgcccgcccgcccgctggccggcttttctccctgcctgcccgccttggggtagatttccacctgctcaggagacgtggctcccccagccccagcccatcctcagccgctttctgaggctttaccatcctcagctgctttttggctggaggactgccctgccttagcttcccctgagacctgttccacttctgccgccccgctggctcctcctcacctcttcacccagaggccccatcagatcccctccaccttcctgcgtccctggagtctgctctcagacctatgtgcccaccgtgttcgaaaattacacagcctgtttggagacagaggaacagagggtggagcttagtctctgggatacctcaggatctccctactacgataatgtccgtccactctgctacagcgactcggatgcagtattactatgttttgacatcagccgtccagagacagtggacagcgcactcaagaagtggaggacagaaatcctagattattgtcccagcacccgcgttttgctcattggctgcaagacagacctgcgaacagacctgagtactctgatggagctgtcccaccagaagcaggcgcccatctcctatgagcagggttgtgcaatagcaaagcagctgggtgcagaaatctacctggaaggctcagctttcacctcagaaaagagcatccacagcatctttcggacggcatccatgctgtgtctgaacaagcctagcccactgccccagaagagccctgtccgaagcctctccaaacgactgctccacctccccagtcgctctgaactcatctcttctaccttcaagaaggaaaaggccaaaagctgttccattatgtgaagtggaaattggaggggggagacaaccccctacttcctcccttggggtgcagaggcacggggagagggaggatgagacaatttaggacactggacatgagtttttcagatggccacggtgagggcttggaaggagacaggaatggggcgaggaaggagccaggcccggcatgaggacctgacgctgagagagaaccatcataccccaagccaggcactagattttggagggggcgactaccccagtgccccccccgctccagaggaaggaaagctgtgggggacggggggcatgctggcctcatgggcttgggggcctacagcagcctcaccttcagcttcatgcctcttccacacagcgtttccatgcaggtcaggggatgggaggggtccctgagcccttcccttcccctctaaggaggcagcaacggagagtggggaagtggagcggcagctcccttgggggcttagcccaggtgcttcgtaactgcaatcggaagtgcaggagctggtcagagccaatgagaaggaaacctcatctttgcatagcccatgcctcatggagaggtgacatcatacattcacatgcttctcacctaagtccccagggtccaagggagaagccccagacccccttctcttgcagagtgtgggggtggtggtgctgcaggggcagggctgggtgggggtcaccagactttttctgcccttagggtagtacagctggcatttgttttatagactcttgtctttggaattggggggagggggggagtgtttcaatctgttatatgttctgtgtttaatgaagaaaacctatttattaatgaaaaatataatacatataaagaatttggctccgtatt

SEQ ID NO: 63984 - DNA, 1127 bp, Homo sapiens
aggcactgaacgaggagaaggtggcctatgaccgcagctgggtgcagaaatctacctggaaggctcagctttcacctcagaaaagagcatccacagcatctttcggacggcatccatgctgtgtctgaacaagcctagcccactgccccagaagagccctgtccgaagcctctccaaacgactgctccacctccccagtcgctctgaactcatctcttctaccttcaagaaggaaaaggccaaaagctgttccattatgtgaagtggaaattggaggggggagacaaccccctacttcctcccttggggtgcagaggcacggggagagggaggatgagacaatttaggacactggacatgagtttttcagatggccacggtgagggcttggaaggagacaggaatggggcgaggaaggagccaggcccggcatgaggacctgacgctgagagagaaccatcataccccaagccaggcactagattttggagggggcgactaccccagtgccccccccgctccagaggaaggaaagctgtgggggacggggggcatgctggcctcatgggcttgggggcctacagcagcctcaccttcagcttcatgcctcttccacacagcgtttccatgcaggtcaggggatgggaggggtccctgagcccttcccttcccctctaaggaggcagcaacggagagtggggaagtggagcggcagctcccttgggggcttagcccaggtgcttcgtaactgcaatcggaagtgcaggagctggtcagagccaatgagaaggaaacctcatctttgcatagcccatgcctcatggagaggtgacatcatacattcacatgcttctcacctaagtccccagggtccaagggagaagccccagacccccttctcttgcagagtgtgggggtggtggtgctgcaggggcagggctgggtgggggtcaccagactttttctgcccttagggtagtacagctggcatttgttttatagactcttgtctttggaattggggggagggggggagtgtttcaatctgttatatgttctgtgtttaatgaagaaaacctatttattaatgaaaaatataatacatataaagaatttggctccgtatt

SEQ ID NO: 63985 - DNA, 1672 bp, Homo sapiens
agcggagttggagggaggcagggaatctggcttgattggcgtgctgagacgcacctggcgcaaccctcccttctgaatcgaagttcaagtcccgcggacactgcaaccatgaaggagagacgggccccccagccagtcgtggccagatgtaagctcgttctggtcggggacgtgcagtgtgggaagaccgcgatgttgcaagtgttagcgaaggattgctatccagagacctatgtgcccaccgtgttcgaaaattacacagcctgtttggagacagaggaacagagggtggagcttagtctctgggatacctcaggatctccctactacgataatgtccgtccactctgctacagcgactcggatgcagtattactatgttttgacatcagccgtccagagacagtggacagcgcactcaagaagtggaggacagaaatcctagattattgtcccagcacccgcgttttgctcattggctgcaagacagacctgcgaacagacctgagtactctgatggagctgtcccaccagaagcaggcgcccatctcctatgagcagggttgtgcaatagcaaagcagctgggtgcagaaatctacctggaaggctcagctttcacctcagaaaagagcatccacagcatctttcggacggcatccatgctgtgtctgaacaagcctagcccactgccccagaagagccctgtccgaagcctctccaaacgactgctccacctccccagtcgctctgaactcatctcttctaccttcaagaaggaaaaggccaaaagctgttccattatgtgaagtggaaattggaggggggagacaaccccctacttcctcccttggggtgcagaggcacggggagagggaggatgagacaatttaggacactggacatgagtttttcagatggccacggtgagggcttggaaggagacaggaatggggcgaggaaggagccaggcccggcatgaggacctgacgctgagagagaaccatcataccccaagccaggcactagattttggagggggcgactaccccagtgccccccccgctccagaggaaggaaagctgtgggggacggggggcatgctggcctcatgggcttgggggcctacagcagcctcaccttcagcttcatgcctcttccacacagcgtttccatgcaggtcaggggatgggaggggtccctgagcccttcccttcccctctaaggaggcagcaacggagagtggggaagtggagcggcagctcccttgggggcttagcccaggtgcttcgtaactgcaatcggaagtgcaggagctggtcagagccaatgagaaggaaacctcatctttgcatagcccatgcctcatggagaggtgacatcatacattcacatgcttctcacctaagtccccagggtccaagggagaagccccagacccccttctcttgcagagtgtgggggtggtggtgctgcaggggcagggctgggtgggggtcaccagactttttctgcccttagggtagtacagctggcatttgttttatagactcttgtctttggaattggggggagggggggagtgtttcaatctgttatatgttctgtgtttaatgaagaaaacctatttattaatgaaaaatataatacatataaagaatttggctccgtatt

SEQ ID NO: 63986 - DNA, 1460 bp, Homo sapiens
gatcctcagggattgaggatggtattcccagggctttagggcttaggcctattggggaaggaaaacaccatggctcaccatcagctctttctggcctacaccaggatctccctactacgataatgtccgtccactctgctacagcgactcggatgcagtattactatgttttgacatcagccgtccagagacagtggacagcgcactcaagaagtggaggacagaaatcctagattattgtcccagcacccgcgttttgctcattggctgcaagacagacctgcgaacagacctgagtactctgatggagctgtcccaccagaagcaggcgcccatctcctatgagcagggttgtgcaatagcaaagcagctgggtgcagaaatctacctggaaggctcagctttcacctcagaaaagagcatccacagcatctttcggacggcatccatgctgtgtctgaacaagcctagcccactgccccagaagagccctgtccgaagcctctccaaacgactgctccacctccccagtcgctctgaactcatctcttctaccttcaagaaggaaaaggccaaaagctgttccattatgtgaagtggaaattggaggggggagacaaccccctacttcctcccttggggtgcagaggcacggggagagggaggatgagacaatttaggacactggacatgagtttttcagatggccacggtgagggcttggaaggagacaggaatggggcgaggaaggagccaggcccggcatgaggacctgacgctgagagagaaccatcataccccaagccaggcactagattttggagggggcgactaccccagtgccccccccgctccagaggaaggaaagctgtgggggacggggggcatgctggcctcatgggcttgggggcctacagcagcctcaccttcagcttcatgcctcttccacacagcgtttccatgcaggtcaggggatgggaggggtccctgagcccttcccttcccctctaaggaggcagcaacggagagtggggaagtggagcggcagctcccttgggggcttagcccaggtgcttcgtaactgcaatcggaagtgcaggagctggtcagagccaatgagaaggaaacctcatctttgcatagcccatgcctcatggagaggtgacatcatacattcacatgcttctcacctaagtccccagggtccaagggagaagccccagacccccttctcttgcagagtgtgggggtggtggtgctgcaggggcagggctgggtgggggtcaccagactttttctgcccttagggtagtacagctggcatttgttttatagactcttgtctttggaattggggggagggggggagtgtttcaatctgttatatgttctgtgtttaatgaagaaaacctatttattaatgaaaaatataatacatataaagaatttggctccgtatt

SEQ ID NO: 63987 - DNA, 494 bp, Homo sapiens
tccccagtttatagctgactgtgcatcaaggcttatgccagctaagcttaaactttctccaggtccgaagattcataacaaatatttataattattattcatggtgtcaaaactgccctgtcagttggggacaggaagatcaggttagaggcagcctatgaggatagaaactcacatctgagtggtaggagaaaatgtatctgttcaggctgggtgccatggcttacacctgtaatcccagcaatttgggaggctgtggcaggcagatcacatgaagtcagaagtttgagaccagcctggccaacacggtgaaaccccatctctacaaaaaatacaaaaattagccaggcatggtgacacacgcctgtaatccctgctacttgggaggctgaggtaggagagttgcttgaaactgggaggtggaggttgcagtgagccgagatggtgccactgcagtccagcctgggtttcagagtgagactctgtctcaaaaa

SEQ ID NO: 63988 - DNA, 290 bp, Homo sapiens
attttcaaaaaacctttctatcctcacatggtagaagaggaaatggagccttagaaagttaaatatcccaaggtcaaaactcagccacccaatattctaaattcaatgttctatcaagacatgttgactatttattgcattatacaaagtcacaactttaaccaaataacattcacattttcagaagaccacaggactttgcctttctgcaaatctcttaagagtattactcatttaggtgtttttgagacagagtcttgctctgtcacccagggtggagtgcagtggca

SEQ ID NO: 63989 - DNA, 246 bp, Homo sapiens
cgttcaccttacaggcagaagattggacataccttctctgggaaacctgactagctcaagaggaaacatcttaagatattgacattgggagttccagccagatcaccctataaagaaactatattcaacaagacccatccatgttttgaagcctttaatcagttttttagtgcctcaaacatgtaaacataagcaaagaccatcagacatatgaggaaagcttctaatgtgagcaatagaaatact

SEQ ID NO: 63990 - DNA, 483 bp, Homo sapiens
cttatgacatgcctttatgtggtttttgtttatttatttatatttttaattttaatttttatttttgagacagggtctcactttgttgctgaggctgttgtgatcatagctcactgcaaccttggactcctgggctcaagcgaacctcctgcctcagcctcctgaatagctgggattacaggtgtgcaataaaaagtattcctggctaatttttactttttttttttttttttggtagagacaaggtcttgctatattgcccagctgatcttgaacttcttggccttgaacagtcctcctgccttagcctcccaaagtgctgggactgcaggcatgcactaccatgcctaattttcttttattttttatattcatataataaatacgatttatttatttatttattttgtttgagacagggtcttgctctgttgcccaggctggagtgtggtggcacgatcatagcttactgcagctttgact

SEQ ID NO: 63991 - DNA, 490 bp, Homo sapiens
tcaacataaattatttatgtttattcaagagtgtgttatgagaaaaatgatagctatagcaaatttttaatacaattttcatgtgtttttctcatcattgatatccaaacctgagtttttctctgaaatgattttcaagagactttaaaaataatgtgtgtatatatatagaaaaaaagaatgagcaaaatgggggggaatctgggttgaggtctgggagaagagtaaaaaaaatcagcgagattcttctcatagatttcagtttatctcaagaattttatacatgtaatttttataaaaggttagcatattacttcagagaaatatctaaaggcttacatcttgagctattagttgctgtattgtagggcttaagaacttatattagacaagtgtgtataaatcatatactactttaaatatatttcaagttcttaaaaaatattacctaaggtaggataatagttttcattaaaacactgatcattta

SEQ ID NO: 63992 - DNA, 461 bp, Homo sapiens
tgtaattcataaaatttccacaagctgtttattgaaattctgtttacacttgtcagaaataagcatttccttgtttaatgaaagatggctagcttcagttaagaccacacctgacaggccgggcatactggctcacatctgtaatcccaaaatgaaaaatggaaaaaaagtaaaaaagaaaaaaagaggccaggcatggcggctcacacctgtaatccctgggaggccaaaatgggaggatcacttgagtccaggagttgaagaccagcctaggcaacatagtgagaccccatctctacaaaaaaaaaagcattagcctggtgtgatagcacacacctgtagtcccacttaggtgggatactgaagcatgagaactgcctgagcctgggaggtcaaggctaaagtgagctgtgattgcaccactgcactccagcctgggcaagaaagcaagatcctgcctc

SEQ ID NO: 63993 - DNA, 476 bp, Homo sapiens
agccttgccagctgaggcagatgcacctgagtgtgagggcggcaattgacctgttcctccatgtgccctgttcctaccacctgaagggtaaccttcattaagttccctaccctgttccctacccacgtgaagggtagcttcattaagagaaagtgcagtcgaggtagatagaaacagcctctcagaaatggctctcatgcggattcggcttgctgctcgtattgtgggcgagccttggagactgagggaaggtgagtacttgtgagttcctaggcagagtgagtaccctgcgttgaatgtagaattttcctattaagagcagaacaaaacaggtttttagattagcactctgacgtgggctggaaatgcccggcaaatatttaccctagatgtaaaacactcacaaagtcaaatgttgtttggaaaaccctaaaatagaaaatttttactcagggttttatatttggtaattgtaa

SEQ ID NO: 63994 - DNA, 753 bp, Homo sapiens
ggtggggtgcacctgctgacggtcctcggctgcaaggcaggctcagttcaggctcccgcaggagctgcctttggtagtacaagttgacatggaaagagaacaatgttctcactgacataggggattaaaccccaactcctggctcttaacgtaagttttttcttccttttgacttgtgctcctctctctttccccctccaggtacaggctgagaggctgagaaatcatcccctgaataactttttcctctcgattcccatccccaatttaatattaaattaacaggcaagccggcccccacctctccctgggggtctcagggagaacctttcacggcaccctttccctaccttttccttctttaatctcctggtttaccattgatgacttcgcctctgcatctactgacttgatttttcattctgccactccatcttcaaaccccctcacctttcccatcctactcctgccatgcattgaagggtcaatgcattttggggtgagctctgggtttaggggccccctccatccctcagctaccctggatctttgcccacctcttcctcagagcccccactgaggggccgtagccctatctagggctgtggaaggagcagactggttcctaactctctccctcctcctgcccacacacatcaaaagaatcttccctacacccttctctgcctttattttttgatttgtgcaacttgtaactaggtgtttatggaataaaggagaatggaaaaaaga

SEQ ID NO: 63995 - DNA, 586 bp, Homo sapiens
  misc_feature (1)..(1): n is a, c, g, or t
nattcggcatgaggcccgggcctcagcctctcttgtacaggctgagaggctgagaaatcatcccctgaataactttttcctctcgattcccatccccaatttaatattaaattaacaggcaagccggcccccacctctccctgggggtctcagggagaacctttcacggcaccctttccctaccttttccttctttaatctcctggtttaccattgatgacttcgcctctgcatctactgacttgatttttcattctgccactccatcttcaaaccccctcacctttcccatcctactcctgccatgcattgaagggtcaatgcattttggggtgagctctgggtttaggggccccctccatccctcagctaccctggatctttgcccacctcttcctcagagcccccactgaggggccgtagccctatctagggctgtggaaggagcagactggttcctaactctctccctcctcctgcccacacacatcaaaagaatcttccctacacccttctctgcctttattttttgatttgtgcaacttgtaactaggtgtttatggaataaaggagaatggaaaaaaga

SEQ ID NO: 63996 - DNA, 1969 bp, Homo sapiens
aaagctccccccagggatccgccccgcctcgtcgcccacagagcgcccgcctctccccaaggggcatctgcccctcgtcctccagtttccccttgaggagggagagagaacgtgctgcactgcgcccccaggttcaacctccaacccggtccctcccgaagaatggattcctcttctccttctcctcccctgccttatgggagcctcttccagtccacagaacccaaatcgaggttactaatgagctccccttcttcgtgcccaggggacccctctcggcctcaggctctgctcccctgagcttggcccatggccccggcgcccctgggactcggccccagccatctcaccacccgcgccagggggcggggctcccacggcccggccccgggtgggcgggtctatcgtgacgtcacttccgcccgggcctggccgaggttcgggctccgttggccgagggggccgtacggaggtggcagctgtgggaggaggcggcgtggaaggccgaggagctcaagcccggaccaatccccacgttccgggccgcgaccctgaccctgcagcgtaccgggaagcgaaaccggccggatgggccgctgagcccgaatcgggcactgtgtggagccccctggagctgagatcaggatgttccgcttcatgagggacgtggagcctgaggatcccatgttcctgatggatccctttgctattcaccgtcagcatatgagccgtatgttgtcaggtggctttggatatagccccttcctcagcatcacagatggcaacatgccagggaccaggcctgccagccgccggatgcagcaggctggagctgtctccccctttgggatgctgggaatgtcgggtggtttcatggacatgtttgggatgatgaatgacatgattggaaacatggaacacatgacagctggaggcaattgccagaccttctcatcttccactgtcatctcctactccaatacgggtgatggtgcccccaaggtctaccaagagacatcagagatgcgctcggcaccaggcgggatccgggagacacggaggactgttcgggattcagacagtggactggagcagatgtccattgggcatcacatccgggacagggctcacatcctccagcgctcccgaaaccatcgcacgggggaccaggaggagcggcaggactatatcaacctggatgagagtgaggccgcagcgtttgatgacgagtggcggcgggagacctcccgattccggcagcagcgtcccctggagtttcggcggcttgagtcctcaggggctgggggacgaagggcggaggggcctccccgcctggccatccagggacctgaggactccccttcccgacagtcccgccgctatgactggtgagggccccgggccctcagcctctcttgtacaggctgagaggctgagaaatcatcccctgaataactttttcctctcgattcccatccccaatttaatattaaattaacaggcaagccggcccccacctctccctgggggtctcagggagaacctttcacggcaccctttccctaccttttccttctttaatctcctggtttaccattgatgacttcgcctctgcatctactgacttgatttttcattctgccactccatcttcaaaccccctcacctttcccatcctactcctgccatgcattgaagggtcaatgcattttggggtgagctctgggtttaggggccccctccatccctcagctaccctggatctttgcccacctcttcctcagagcccccactgaggggccgtagccctatctagggctgtggaaggagcagactggttcctaactctctccctcctcctgcccacacacatcaaaagaatcttccctacacccttctctgcctttattttttgatttgtgcaacttgtaactaggtgtttatggaataaaggagaatggaaaaaaga

SEQ ID NO: 63997 - DNA, 580 bp, Homo sapiens
atccttaattaaattaatctccccccccgtacaggctgagaggctgagaaatcatcccctgaataactttttcctctcgattcccatccccaatttaatattaaattaacaggcaagccggcccccacctctccctgggggtctcagggagaacctttcacggcaccctttccctaccttttccttctttaatctcctggtttaccattgatgacttcgcctctgcatctactgacttgatttttcattctgccactccatcttcaaaccccctcacctttcccatcctactcctgccatgcattgaagggtcaatgcattttggggtgagctctgggtttaggggccccctccatccctcagctaccctggatctttgcccacctcttcctcagagcccccactgaggggccgtagccctatctagggctgtggaaggagcagactggttcctaactctctccctcctcctgcccacacacatcaaaagaatcttccctacacccttctctgcctttattttttgatttgtgcaacttgtaactaggtgtttatggaataaaggagaatggaaaaaaga

SEQ ID NO: 63998 - DNA, 474 bp, Homo sapiens
ccctttccctgagacccccaggagaggcctgggggtctcagggagaacctttcacggcaccctttccctaccttttccttctttaatctcctggtttaccattgatgacttcgcctctgcatctactgacttgatttttcattctgccactccatcttcaaaccccctcacctttcccatcctactcctgccatgcattgaagggtcaatgcattttggggtgagctctgggtttaggggccccctccatccctcagctaccctggatctttgcccacctcttcctcagagcccccactgaggggccgtagccctatctagggctgtggaaggagcagactggttcctaactctctccctcctcctgcccacacacatcaaaagaatcttccctacacccttctctgcctttattttttgatttgtgcaacttgtaactaggtgtttatggaataaaggagaatggaaaaaaga

SEQ ID NO: 63999 - DNA, 380 bp, Homo sapiens
aaaaaaaaaaaaaaaaaaaaaaaaaaaaaaaaaaaaaaaaaaaaaaaaaaaaaaaaaaaaaaaaaaaaaaaaaacacctttcccatcctactcctgccatgcattgaagggtcaatgcattttggggtgagctctgggtttaggggccccctccatccctcagctaccctggatctttgcccacctcttcctcagagcccccactgaggggccgtagccctatctagggctgtggaaggagcagactggttcctaactctctccctcctcctgcccacacacatcaaaagaatcttccctacacccttctctgcctttattttttgatttgtgcaacttgtaactaggtgtttatggaataaaggagaatggaaaaaaga

SEQ ID NO: 64000 - DNA, 302 bp, Homo sapiens
acaaccacaataccttctaaggttcaggaaacgatgccgccgtgatatacccatgagcccgaatcgggcactgagtggagctcagctaccctggatctttgcccacctcttcctcagagcccccactgaggggccgtagccctatctagggctgtggaaggagcagactggttcctaactctctccctcctcctgcccacacacatcaaaagaatcttccctacacccttctctgcctttattttttgatttgtgcaacttgtaactaggtgtttatggaataaaggagaatggaaaaaaga

SEQ ID NO: 64001 - DNA, 1536 bp, Homo sapiens
ccaccgggcgttttgacctcaggccggggccgtacggaggtggcagctgtgggaggaggcggcgtggaaggccgaggagctcaagcccggaccaatccccacgttccgggccgcgaccctgaccctgcagcgtaccgggaagcgaaaccggccggatgggccgctgagcccgaatcgggcactgtgtggagccccctggagctgagatcaggatgttccgcttcatgagggacgtggagcctgaggatcccatgttcctgatggatccctttgctattcaccgtcagcatatgagccgtatgttgtcaggtggctttggatatagccccttcctcagcatcacagatggcaacatgccagggaccaggcctgccagccgccggatgcagcaggctggagctgtctccccctttgggatgctgggaatgtcgggtggtttcatggacatgtttgggatgatgaatgacatgattggaaacatggaacacatgacagctggaggcaattgccagaccttctcatcttccactgtcatctcctactccaatacgggtgatggtgcccccaaggtctaccaagagacatcagagatgcgctcggcaccaggcgggatccgggagacacggaggactgttcgggattcagacagtggactggagcagatgtccattgggcatcacatccgggacagggctcacatcctccagcgctcccgaaaccatcgcacgggggaccaggaggagcggcaggactatatcaacctggatgagagtgaggccgcagcgtttgatgacgagtggcggcgggagacctcccgattccggcagcagcgtcccctggagtttcggcggcttgagtcctcaggggctgggggacgaagggcggaggggcctccccgcctggccatccagggacctgaggactccccttcccgacagtcccgccgctatgactggtgagggccccgggccctcagcctctcttgtacaggctgagaggctgagaaatcatcccctgaataactttttcctctcgattcccatccccaatttaatattaaattaacaggcaagccggcccccacctctccctgggggtctcagggagaacctttcacggcaccctttccctaccttttccttctttaatctcctggtttaccattgatgacttcgcctctgcatctactgacttgatttttcattctgccactccatcttcaaaccccctcacctttcccatcctactcctgccatgcattgaagggtcaatgcattttggggtgagctctgggtttaggggccccctccatccctcagctaccctggatctttgcccacctcttcctcagagcccccactgaggggccgtagccctatctagggctgtggaaggagcagactggttcctaactctctccctcctcctgcccacacacatcaaaagaatcttccctacacccttctctgcctttattttttgatttgtgcaacttgtaactaggtgtttatggaataaaggagaatggaaaaaaga

SEQ ID NO: 64002 - DNA, 1825 bp, Homo sapiens
aaagggaaactttcacaagtgtccggagccctgatgtcctgcaaatgaaggaggaggatgtccttaagttccttgcagcaggaacccacttaggtggcaccaatcttgacttccagatggaacagtacatctataaaaggaaaagtgatggcatctatatcataaatctcaagaggacctgggagaagcttctgctggcagctcgtgcaattgttgccattgaaaaccctgcgtgatgtcagtgttatatcctccaggaatactggccagagggctgtgctgaagttgctgctgccactggagccactccaattggggccgtacggaggtggcagctgtgggaggaggcggcgtggaaggccgaggagctcaagcccggaccaatccccacgttccgggccgcgaccctgaccctgcagcgtaccgggaagcgaaaccggccggatgggccgctgagcccgaatcgggcactgtgtggagccccctggagctgagatcaggatgttccgcttcatgagggacgtggagcctgaggatcccatgttcctgatggatccctttgctattcaccgtcagcatatgagccgtatgttgtcaggtggctttggatatagccccttcctcagcatcacagatggcaacatgccagggaccaggcctgccagccgccggatgcagcaggctggagctgtctccccctttgggatgctgggaatgtcgggtggtttcatggacatgtttgggatgatgaatgacatgattggaaacatggaacacatgacagctggaggcaattgccagaccttctcatcttccactgtcatctcctactccaatacgggtgatggtgcccccaaggtctaccaagagacatcagagatgcgctcggcaccaggcgggatccgggagacacggaggactgttcgggattcagacagtggactggagcagatgtccattgggcatcacatccgggacagggctcacatcctccagcgctcccgaaaccatcgcacgggggaccaggaggagcggcaggactatatcaacctggatgagagtgaggccgcagcgtttgatgacgagtggcggcgggagacctcccgattccggcagcagcgtcccctggagtttcggcggcttgagtcctcaggggctgggggacgaagggcggaggggcctccccgcctggccatccagggacctgaggactccccttcccgacagtcccgccgctatgactggtgagggccccgggccctcagcctctcttgtacaggctgagaggctgagaaatcatcccctgaataactttttcctctcgattcccatccccaatttaatattaaattaacaggcaagccggcccccacctctccctgggggtctcagggagaacctttcacggcaccctttccctaccttttccttctttaatctcctggtttaccattgatgacttcgcctctgcatctactgacttgatttttcattctgccactccatcttcaaaccccctcacctttcccatcctactcctgccatgcattgaagggtcaatgcattttggggtgagctctgggtttaggggccccctccatccctcagctaccctggatctttgcccacctcttcctcagagcccccactgaggggccgtagccctatctagggctgtggaaggagcagactggttcctaactctctccctcctcctgcccacacacatcaaaagaatcttccctacacccttctctgcctttattttttgatttgtgcaacttgtaactaggtgtttatggaataaaggagaatggaaaaaaga

SEQ ID NO: 64003 - DNA, 2882 bp, Homo sapiens
  misc_feature (2061)..(2061): n is a, c, g, or t
  misc_feature (2065)..(2065): n is a, c, g, or t
  misc_feature (2067)..(2067): n is a, c, g, or t
  misc_feature (2080)..(2080): n is a, c, g, or t
aaagctccccccagggatccgccccgcctcgtcgcccacagagcgcccgcctctccccaaggggcatctgcccctcgtcctccagtttccccttgaggagggagagagaacgtgctgcactgcgcccccaggttcaacctccaacccggtccctcccgaagaatggattcctcttctccttctcctcccctgccttatgggagcctcttccagtccacagaacccaaatcgaggttactaatgagctccccttcttcgtgcccaggggacccctctcggcctcaggctctgctcccctgagcttggcccatggccccggcgcccctgggactcggccccagccatctcaccacccgcgccagggggcggggctcccacggcccggccccgggtgggcgggtctatcgtgacgtcacttccgcccgggcctggccgaggttcgggctccgttggccgagggggccgtacggaggtggcagctgtgggaggaggcggcgtggaaggccgaggagctcaagcccggaccaatccccacgttccgggccgcgaccctgaccctgcagcgtaccgggaagcgaaaccggccggatgggccgctgagcccgaatcgggcactgtgtggagccccctggagctgagatcaggatgttccgcttcatgagggacgtggagcctgaggatcccatgttcctgatggatccctttgctattcaccgtcagcatatgagccgtatgttgtcaggtggctttggatatagccccttcctcagcatcacagatggcaacatgccagggaccaggcctgccagccgccggatgcagcaggctggagctgtctccccctttgggatgctgggaatgtcgggtggtttcatggacatgtttgggatgatgaatgacatgattggaaacatggaacacatgacagctggaggcaattgccagaccttctcatcttccactgtcatctcctactccaatacgggtgatggtgcccccaaggtctaccaagagacatcagagatgcgctcggcaccaggcgggatccgggagacacggaggactgttcgggattcagacagtggactggagcagatgtccattgggcatcacatccgggacagggctcacatcctccagcgctcccgaaaccatcgcacgggggaccaggaggagcggcaggactatatcaacctggatgagagtgaggccgcagcgtttgatgacgagtggcggcgggagacctcccgattccggcagcagcgtcccctggagtttcggcggcttgagtcctcaggggctgggggacgaagggcggaggggcctccccgcctggccatccagggacctgaggactccccttcccgacagtcccgccgctatgactggtgagggccccgggccctcagcctctcttgtacaggctgagaggctgagaaatcatcccctgaataactttttcctctcgattcccatccccaatttaatattaaattaacaggcaagccggcccccacctctccctgggggtctcagggagaacctttcacggcaccctttccctaccttttccttctttaatctcctggtttaccattgatgacttcgcctctgcatctactgacttgatttttcattctgccactccatcttcaaaccccctcacctttcccatcctactcctgccatgcattgaagggtcaatgcattttggggtgagctctgggtttaggggccccctccatccctcagctaccctggatctttgcccacctcttcctcagagcccccactgaggggccgtagccctatctagggctgtggaaggagcagactggttcctaactctctccctcctcctgcccacacacatcaaaagaatcttccctacacccttctctgcctttattttttgatttgtgcaacttgtaactaggtgtttatggaataaaggagaatggaaaaaagaaaaaaaaaaaaaaaaaaagaaaaaaaaacaacaacaaaacaaaacacaaaacaaaaacaacacaacaaaaacaaaacaaacacacaccaacnaaananacaacaaacaaanaacagcggggcgcccccgccccaaacaacctcccacaccggagggcgacccaccagcgagccgcccgccccacccagttcacgttcgacaacaaaagcgggcgcgccccacaaggagggcggcgtcaatatacacgaccaacaagcgagcggagcggcgcgatacaaaccacaaacagcgcgaggacgggaaaaaacaccgcgcgcaggcctgagggccctcttagtggacagaacgaggcgacctcacttatgtcgtcggggggggcggcagcacccatctggtgtggaggagaccaacaccacgcaccaagaaagacatcacaaaccgcgtcgcccaggcgacgaaaatctaaaacccaccacacggccggcgcggctacacgccccgcggtggcgcatcaaacaccaccccaactaatccttcctccctgcctctccatcaacatcacacccaacttcaccccccacactatcatttttcttttacataacccaatctcctacccaccaacactcttcttactgctaaacaatcacaccacaaccacctcccctgatctagctaacaactcactctcccctttcagagaaacagtagaaacagaccgcgacgggggcatggcgcgtggggaccggcaggctggtgggtgctggcgagagcttgagcgtgcaggtagccgcaagaggaggtgcccgcccggcagcgcaccagcacccgcaaagaggagtagctcacaacatagcaggggaggagtcgagtgggttgggatccacggagcgcaggcgagcaagcgccgaac

SEQ ID NO: 64004 - DNA, 2147 bp, Homo sapiens
aaagctccccccagggatccgccccgcctcgtcgcccacagagcgcccgcctctccccaaggggcatctgcccctcgtcctccagtttccccttgaggagggagagagaacgtgctgcactgcgcccccaggttcaacctccaacccggtccctcccgaagaatggattcctcttctccttctcctcccctgccttatgggagcctcttccagtccacagaacccaaatcgaggttactaatgagctccccttcttcgtgcccaggggacccctctcggcctcaggctctgctcccctgagcttggcccatggccccggcgcccctgggactcggccccagccatctcaccacccgcgccagggggcggggctcccacggcccggccccgggtgggcgggtctatcgtgacgtcacttccgcccgggcctggccgaggttcgggctccgttggccgagggggccgtacggaggtggcagctgtgggaggaggcggcgtggaaggccgaggagctcaagcccggaccaatccccacgttccgggccgcgaccctgaccctgcagcgtaccgggaagcgaaaccggccggatgggccgctgagcccgaatcgggcactgtgtggagccccctggagctgagatcaggatgttccgcttcatgagggacgtggagcctgaggatcccatgttcctgatggatccctttgctattcaccgtcagcatatgagccgtatgttgtcaggtggctttggatatagccccttcctcagcatcacagatggcaacatgccagggaccaggcctgccagccgccggatgcagcaggctggagctgtctccccctttgggatgctgggaatgtcgggtggtttcatggacatgtttgggatgatgaatgacatgattggaaacatggaacacatgacagctggaggcaattgccagaccttctcatcttccactgtcatctcctactccaatacgggtgatggtgcccccaaggtctaccaagagacatcagagatgcgctcggcaccaggcgggatccgggagacacggaggactgttcgggattcagacagtggactggagcagatgtccattgggcatcacatccgggacagggctcacatcctccagcgctcccgaaaccatcgcacgggggaccaggaggagcggcaggactatatcaacctggatgagagtgaggccgcagcgtttgatgacgagtggcggcgggagacctcccgattccggcagcagcgtcccctggagtttcggcggcttgagtcctcaggggctgggggacgaagggcggaggggcctccccgcctggccatccagggacctgaggactccccttcccgacagtcccgccgctatgactggtgagggccccgggccctcagcctctcttgtacaggctgagaggctgagaaatcatcccctgaataactttttcctctcgattcccatccccaatttaatattaaattaacaggcaagccggcccccacctctccctgggggtctcagggagaacctttcacggcaccctttccctaccttttccttctttaatctcctggtttaccattgatgacttcgcctctgcatctactgacttgatttttcattctgccactccatcttcaaaccccctcacctttcccatcctactcctgccatgcattgaagggtcaatgcattttggggtgagctctgggtttaggggccccctccatccctcagctaccctggatctttgcccacctcttcctcagagcccccactgaggggccgtagccctatctagggctgtggaaggagcagactggttcctaactctctccctcctcctgcccacacacatcaaaagaatcttccctacacccttctctgcctttattttttgatttgtgcaacttgtaactaggtgtttatggaataaaggagaatggaaaaaagaaaaaacaaaaaaaaaatgaacggttgcaaacgttgccacaatcagaaacccacccatcctgatgcctctcttggcttccccttgagaaggatgcctgaggcgggatgtccccccaaactccaggggacaactggggaagacatggggtatgcagagatatgatgccacgggacagggg

SEQ ID NO: 64005 - DNA, 2018 bp, Homo sapiens
aaagctccccccagggatccgccccgcctcgtcgcccacagagcgcccgcctctccccaaggggcatctgcccctcgtcctccagtttccccttgaggagggagagagaacgtgctgcactgcgcccccaggttcaacctccaacccggtccctcccgaagaatggattcctcttctccttctcctcccctgccttatgggagcctcttccagtccacagaacccaaatcgaggttactaatgagctccccttcttcgtgcccaggggacccctctcggcctcaggctctgctcccctgagcttggcccatggccccggcgcccctgggactcggccccagccatctcaccacccgcgccagggggcggggctcccacggcccggccccgggtgggcgggtctatcgtgacgtcacttccgcccgggcctggccgaggttcgggctccgttggccgagggggccgtacggaggtggcagctgtgggaggaggcggcgtggaaggccgaggagctcaagcccggaccaatccccacgttccgggccgcgaccctgaccctgcagcgtaccgggaagcgaaaccggccggatgggccgctgagcccgaatcgggcactgtgtggagccccctggagctgagatcaggatgttccgcttcatgagggacgtggagcctgaggatcccatgttcctgatggatccctttgctattcaccgtcagcatatgagccgtatgttgtcaggtggctttggatatagccccttcctcagcatcacagatggcaacatgccagggaccaggcctgccagccgccggatgcagcaggctggagctgtctccccctttgggatgctgggaatgtcgggtggtttcatggacatgtttgggatgatgaatgacatgattggaaacatggaacacatgacagctggaggcaattgccagaccttctcatcttccactgtcatctcctactccaatacgggtgatggtgcccccaaggtctaccaagagacatcagagatgcgctcggcaccaggcgggatccgggagacacggaggactgttcgggattcagacagtggactggagcagatgtccattgggcatcacatccgggacagggctcacatcctccagcgctcccgaaaccatcgcacgggggaccaggaggagcggcaggactatatcaacctggatgagagtgaggccgcagcgtttgatgacgagtggcggcgggagacctcccgattccggcagcagcgtcccctggagtttcggcggcttgagtcctcaggggctgggggacgaagggcggaggggcctccccgcctggccatccagggacctgaggactccccttcccgacagtcccgccgctatgactggtgagggccccgggccctcagcctctcttgtacaggctgagaggctgagaaatcatcccctgaataactttttcctctcgattcccatccccaatttaatattaaattaacaggcaagccggcccccacctctccctgggggtctcagggagaacctttcacggcaccctttccctaccttttccttctttaatctcctggtttaccattgatgacttcgcctctgcatctactgacttgatttttcattctgccactccatcttcaaaccccctcacctttcccatcctactcctgccatgcattgaagggtcaatgcattttggggtgagctctgggtttaggggccccctccatccctcagctaccctggatctttgcccacctcttcctcagagcccccactgaggggccgtagccctatctagggctgtggaaggagcagactggttcctaactctctccctcctcctgcccacacacatcaaaagaatcttccctacacccttctccctaccttttccttctttaatctcctggtttaccattgatgacttcgcctctgcatctactgacttgatttttcattctggcactccatcttcaaagcccctcacctttcccatccta

SEQ ID NO: 64006 - DNA, 2791 bp, Homo sapiens
  misc_feature (1970)..(1970): n is a, c, g, or t
  misc_feature (1974)..(1974): n is a, c, g, or t
  misc_feature (1976)..(1976): n is a, c, g, or t
  misc_feature (1989)..(1989): n is a, c, g, or t
aaagctccccccagggatccgccccgcctcgtcgcccacagagcgcccgcctctccccaaggggcatctgcccctcgtcctccagtttccccttgaggagggagagagaacgtgctgcactgcgcccccaggttcaacctccaacccggtccctcccgaagaatggattcctcttctccttctcctcccctgccttatgggagcctcttccagtccacagaacccaaatcgaggttactaatgagctccccttcttcgtgcccaggggacccctctcggcctcaggctctgctcccctgagcttggcccatggccccggcgcccctgggactcggccccagccatctcaccacccgcgccagggggcggggctcccacggcccggccccgggtgggcgggtctatcgtgacgtcacttccgcccgggcctggccgaggttcgggctccgttggccgagggggccgtacggaggtggcagctgtgggaggaggcggcgtggaaggccgaggagctcaagcccggaccaatccccacgttccgggccgcgaccctgaccctgcagcgtaccgggaagcgaaaccggccggatgggccgctgagcccgaatcgggcactgtgtggagccccctggagctgagatcaggatgttccgcttcatgagggacgtggagcctgaggatcccatgttcctgatggatccctttgctattcaccgtcagcatatgagccgtatgttgtcaggtggctttggatatagccccttcctcagcatcacagatggcaacatgccagggaccaggcctgccagccgccggatgcagcaggctggagctgtctccccctttgggatgctgggaatgtcgggtggtttcatggacatgtttgggatgatgaatgacatgattggaaacatggaacacatgacagctggaggcaattgccagaccttctcatcttccactgtcatctcctactccaatacgggtgatggtgcccccaaggtctaccaagagacatcagagatgcgctcggcaccaggcgggatccgggagacacggaggactgttcgggattcagacagtggactggagcagatgtccattgggcatcacatccgggacagggctcacatcctccagcgctcccgaaaccatcgcacgggggaccaggaggagcggcaggactatatcaacctggatgagagtgaggccgcagcgtttgatgacgagtggcggcgggagacctcccgattccggcagcagcgtcccctggagtttcggcggcttgagtcctcaggggctgggggacgaagggcggaggggcctccccgcctggccatccagggacctgaggactccccttcccgacagtcccgccgctatgactggtgagggccccgggccctcagcctctcttgtacaggctgagaggctgagaaatcatcccctgaataactttttcctctcgattcccatccccaatttaatattaaattaacaggcaagccggcccccacctctccctgggggtctcagggagaacctttcacggcaccctttccctaccttttccttctttaatctcctggtttaccattgatgacttcgcctctgcatctactgacttgatttttcattctgccactccatcttcaaaccccctcacctttcccatcctactcctgccatgcattgaagggtcaatgcattttggggtgagctctgggtttaggggccccctccatccctcagctaccctggatctttgcccacctcttcctcagagcccccactgaggggccgtagccctatctagggctgtggaaggagcagactggttcctaactctctccctcctcctgcccacacacatcaaaaaaaaaaaaaaaaaaaaaagaaaaaaaaacaacaacaaaacaaaacacaaaacaaaaacaacacaacaaaaacaaaacaaacacacaccaacnaaananacaacaaacaaanaacagcggggcgcccccgccccaaacaacctcccacaccggagggcgacccaccagcgagccgcccgccccacccagttcacgttcgacaacaaaagcgggcgcgccccacaaggagggcggcgtcaatatacacgaccaacaagcgagcggagcggcgcgatacaaaccacaaacagcgcgaggacgggaaaaaacaccgcgcgcaggcctgagggccctcttagtggacagaacgaggcgacctcacttatgtcgtcggggggggcggcagcacccatctggtgtggaggagaccaacaccacgcaccaagaaagacatcacaaaccgcgtcgcccaggcgacgaaaatctaaaacccaccacacggccggcgcggctacacgccccgcggtggcgcatcaaacaccaccccaactaatccttcctccctgcctctccatcaacatcacacccaacttcaccccccacactatcatttttcttttacataacccaatctcctacccaccaacactcttcttactgctaaacaatcacaccacaaccacctcccctgatctagctaacaactcactctcccctttcagagaaacagtagaaacagaccgcgacgggggcatggcgcgtggggaccggcaggctggtgggtgctggcgagagcttgagcgtgcaggtagccgcaagaggaggtgcccgcccggcagcgcaccagcacccgcaaagaggagtagctcacaacatagcaggggaggagtcgagtgggttgggatccacggagcgcaggcgagcaagcgccgaac

SEQ ID NO: 64007 - DNA, 1885 bp, Homo sapiens
aaagctccccccagggatccgccccgcctcgtcgcccacagagcgcccgcctctccccaaggggcatctgcccctcgtcctccagtttccccttgaggagggagagagaacgtgctgcactgcgcccccaggttcaacctccaacccggtccctcccgaagaatggattcctcttctccttctcctcccctgccttatgggagcctcttccagtccacagaacccaaatcgaggttactaatgagctccccttcttcgtgcccaggggacccctctcggcctcaggctctgctcccctgagcttggcccatggccccggcgcccctgggactcggccccagccatctcaccacccgcgccagggggcggggctcccacggcccggccccgggtgggcgggtctatcgtgacgtcacttccgcccgggcctggccgaggttcgggctccgttggccgagggggccgtacggaggtggcagctgtgggaggaggcggcgtggaaggccgaggagctcaagcccggaccaatccccacgttccgggccgcgaccctgaccctgcagcgtaccgggaagcgaaaccggccggatgggccgctgagcccgaatcgggcactgtgtggagccccctggagctgagatcaggatgttccgcttcatgagggacgtggagcctgaggatcccatgttcctgatggatccctttgctattcaccgtcagcatatgagccgtatgttgtcaggtggctttggatatagccccttcctcagcatcacagatggcaacatgccagggaccaggcctgccagccgccggatgcagcaggctggagctgtctccccctttgggatgctgggaatgtcgggtggtttcatggacatgtttgggatgatgaatgacatgattggaaacatggaacacatgacagctggaggcaattgccagaccttctcatcttccactgtcatctcctactccaatacgggtgatggtgcccccaaggtctaccaagagacatcagagatgcgctcggcaccaggcgggatccgggagacacggaggactgttcgggattcagacagtggactggagcagatgtccattgggcatcacatccgggacagggctcacatcctccagcgctcccgaaaccatcgcacgggggaccaggaggagcggcaggactatatcaacctggatgagagtgaggccgcagcgtttgatgacgagtggcggcgggagacctcccgattccggcagcagcgtcccctggagtttcggcggcttgagtcctcaggggctgggggacgaagggcggaggggcctccccgcctggccatccagggacctgaggactccccttcccgacagtcccgccgctatgactggtgagggccccgggccctcagcctctcttgtacaggctgagaggctgagaaatcatcccctgaataactttttcctctcgattcccatccccaatttaatattaaattaacaggcaagccggcccccacctctccctgggggtctcagggagaacctttcacggcaccctttccctaccttttccttctttaatctcctggtttaccattgatgacttcgcctctgcatctactgacttgatttttcattctgccactccatcttcaaaccccctctcagctaccctggatctttgcccacctcttcctcagagcccccactgaggggccgtagccctatctagggctgtggaaggagcagactggttcctaactctctccctcctcctgcccacacacatcaaaagaatcttccctacacccttctctgcctttattttttgatttgtgcaacttgtaactaggtgtttatggaataaaggagaatggaaaaaaga

SEQ ID NO: 64008 - DNA, 1825 bp, Homo sapiens
  misc_feature (1683)..(1683): n is a, c, g, or t
aaagctccccccagggatccgccccgcctcgtcgcccacagagcgcccgcctctccccaaggggcatctgcccctcgtcctccagtttccccttgaggagggagagagaacgtgctgcactgcgcccccaggttcaacctccaacccggtccctcccgaagaatggattcctcttctccttctcctcccctgccttatgggagcctcttccagtccacagaacccaaatcgaggttactaatgagctccccttcttcgtgcccaggggacccctctcggcctcaggctctgctcccctgagcttggcccatggccccggcgcccctgggactcggccccagccatctcaccacccgcgccagggggcggggctcccacggcccggccccgggtgggcgggtctatcgtgacgtcacttccgcccgggcctggccgaggttcgggctccgttggccgagggggccgtacggaggtggcagctgtgggaggaggcggcgtggaaggccgaggagctcaagcccggaccaatccccacgttccgggccgcgaccctgaccctgcagcgtaccgggaagcgaaaccggccggatgggccgctgagcccgaatcgggcactgtgtggagccccctggagctgagatcaggatgttccgcttcatgagggacgtggagcctgaggatcccatgttcctgatggatccctttgctattcaccgtcagcatatgagccgtatgttgtcaggtggctttggatatagccccttcctcagcatcacagatggcaacatgccagggaccaggcctgccagccgccggatgcagcaggctggagctgtctccccctttgggatgctgggaatgtcgggtggtttcatggacatgtttgggatgatgaatgacatgattggaaacatggaacacatgacagctggaggcaattgccagaccttctcatcttccactgtcatctcctactccaatacgggtgatggtgcccccaaggtctaccaagagacatcagagatgcgctcggcaccaggcgggatccgggagacacggaggactgttcgggattcagacagtggactggagcagatgtccattgggcatcacatccgggacagggctcacatcctccagcgctcccgaaaccatcgcacgggggaccaggaggagcggcaggactatatcaacctggatgagagtgaggccgcagcgtttgatgacgagtggcggcgggagacctcccgattccggcagcagcgtcccctggagtttcggcggcttgagtcctcaggggctgggggacgaagggcggaggggcctccccgcctggccatccagggacctgaggactccccttcccgacagtcccgccgctatgactggtgagggccccgggccctcagcctctcttgtacaggctgagaggctgagaaatcatcccctgaataactttttcctctcgattcccatccccaatttaatattaaattaacaggcaagccggcccccacctctccctgggggtctcagggagaacctttcacggcaccctttccctaccttttccttctttaatctcctggtttaccattgatgacttcgcctctgcatctactgacttgatttttcattctgccactccatcttcaaacccccttcacttctctatctgcatgntgaggtcatgcttgggggggcccggttggggcccatcctgtaccgtttttgcccctttccacccctggggcccttggtgggggagttcccctgcaaaatcactctcttttgggccgggggggaacccacttgggggtcctct

SEQ ID NO: 64009 - DNA, 1855 bp, Homo sapiens
aaagctccccccagggatccgccccgcctcgtcgcccacagagcgcccgcctctccccaaggggcatctgcccctcgtcctccagtttccccttgaggagggagagagaacgtgctgcactgcgcccccaggttcaacctccaacccggtccctcccgaagaatggattcctcttctccttctcctcccctgccttatgggagcctcttccagtccacagaacccaaatcgaggttactaatgagctccccttcttcgtgcccaggggacccctctcggcctcaggctctgctcccctgagcttggcccatggccccggcgcccctgggactcggccccagccatctcaccacccgcgccagggggcggggctcccacggcccggccccgggtgggcgggtctatcgtgacgtcacttccgcccgggcctggccgaggttcgggctccgttggccgagggggccgtacggaggtggcagctgtgggaggaggcggcgtggaaggccgaggagctcaagcccggaccaatccccacgttccgggccgcgaccctgaccctgcagcgtaccgggaagcgaaaccggccggatgggccgctgagcccgaatcgggcactgtgtggagccccctggagctgagatcaggatgttccgcttcatgagggacgtggagcctgaggatcccatgttcctgatggatccctttgctattcaccgtcagcatatgagccgtatgttgtcaggtggctttggatatagccccttcctcagcatcacagatggcaacatgccagggaccaggcctgccagccgccggatgcagcaggctggagctgtctccccctttgggatgctgggaatgtcgggtggtttcatggacatgtttgggatgatgaatgacatgattggaaacatggaacacatgacagctggaggcaattgccagaccttctcatcttccactgtcatctcctactccaatacgggtgatggtgcccccaaggtctaccaagagacatcagagatgcgctcggcaccaggcgggatccgggagacacggaggactgttcgggattcagacagtggactggagcagatgtccattgggcatcacatccgggacagggctcacatcctccagcgctcccgaaaccatcgcacgggggaccaggaggagcggcaggactatatcaacctggatgagagtgaggccgcagcgtttgatgacgagtggcggcgggagacctcccgattccggcagcagcgtcccctggagtttcggcggcttgagtcctcaggggctgggggacgaagggcggaggggcctccccgcctggccatccagggacctgaggactccccttcccgacagtcccgccgctatgactggtgagggccccgggccctcagcctctcttgtacaggctgagaggctgagaaatcatcccctgaataactttttcctctcgattcccatccccaatttaatattaaattaacaggcaagccggcccccacctctccctgggggtctcagggagaacctttcacacctttcccatcctactcctgccatgcattgaagggtcaatgcattttggggtgagctctgggtttaggggccccctccatccctcagctaccctggatctttgcccacctcttcctcagagcccccactgaggggccgtagccctatctagggctgtggaaggagcagactggttcctaactctctccctcctcctgcccacacacatcaaaagaatcttccctacacccttctctgcctttattttttgatttgtgcaacttgtaactaggtgtttatggaataaaggagaatggaaaaaaga

SEQ ID NO: 64010 - DNA, 1776 bp, Homo sapiens
aaagctccccccagggatccgccccgcctcgtcgcccacagagcgcccgcctctccccaaggggcatctgcccctcgtcctccagtttccccttgaggagggagagagaacgtgctgcactgcgcccccaggttcaacctccaacccggtccctcccgaagaatggattcctcttctccttctcctcccctgccttatgggagcctcttccagtccacagaacccaaatcgaggttactaatgagctccccttcttcgtgcccaggggacccctctcggcctcaggctctgctcccctgagcttggcccatggccccggcgcccctgggactcggccccagccatctcaccacccgcgccagggggcggggctcccacggcccggccccgggtgggcgggtctatcgtgacgtcacttccgcccgggcctggccgaggttcgggctccgttggccgagggggccgtacggaggtggcagctgtgggaggaggcggcgtggaaggccgaggagctcaagcccggaccaatccccacgttccgggccgcgaccctgaccctgcagcgtaccgggaagcgaaaccggccggatgggccgctgagcccgaatcgggcactgtgtggagccccctggagctgagatcaggatgttccgcttcatgagggacgtggagcctgaggatcccatgttcctgatggatccctttgctattcaccgtcagcatatgagccgtatgttgtcaggtggctttggatatagccccttcctcagcatcacagatggcaacatgccagggaccaggcctgccagccgccggatgcagcaggctggagctgtctccccctttgggatgctgggaatgtcgggtggtttcatggacatgtttgggatgatgaatgacatgattggaaacatggaacacatgacagctggaggcaattgccagaccttctcatcttccactgtcatctcctactccaatacgggtgatggtgcccccaaggtctaccaagagacatcagagatgcgctcggcaccaggcgggatccgggagacacggaggactgttcgggattcagacagtggactggagcagatgtccattgggcatcacatccgggacagggctcacatcctccagcgctcccgaaaccatcgcacgggggaccaggaggagcggcaggactatatcaacctggatgagagtgaggccgcagcgtttgatgacgagtggcggcgggagacctcccgattccggcagcagcgtcccctggagtttcggcggcttgagtcctcaggggctgggggacgaagggcggaggggcctccccgcctggccatccagggacctgaggactccccttcccgacagtcccgccgctatgactggtgagggccccgggccctcagcctctcttgtacaggctgagaggctgagaaatcatcccctgaataactttttcctctcgattcccatccccaatttaatattaaattaacaggcaagccggcccccacctctccctgggggtctcagggagaacctttcacggcaccctttccctaccttttccttctttaatctcctggtttaccattgatgacttcgcctctgcatctactgacttgatttttcattctgccactccatcttcaaaccccctctcctgcccacacacatcaaaagaatcttccctacacccttctctgcctttattttttgatttgtgcaacttgtaactaggtgtttatggaataaaggagaatggaaaaaaga

SEQ ID NO: 64011 - DNA, 1578 bp, Homo sapiens
aaagctccccccagggatccgccccgcctcgtcgcccacagagcgcccgcctctccccaaggggcatctgcccctcgtcctccagtttccccttgaggagggagagagaacgtgctgcactgcgcccccaggttcaacctccaacccggtccctcccgaagaatggattcctcttctccttctcctcccctgccttatgggagcctcttccagtccacagaacccaaatcgaggttactaatgagctccccttcttcgtgcccaggggacccctctcggcctcaggctctgctcccctgagcttggcccatggccccggcgcccctgggactcggccccagccatctcaccacccgcgccagggggcggggctcccacggcccggccccgggtgggcgggtctatcgtgacgtcacttccgcccgggcctggccgaggttcgggctccgttggccgagggggccgtacggaggtggcagctgtgggaggaggcggcgtggaaggccgaggagctcaagcccggaccaatccccacgttccgggccgcgaccctgaccctgcagcgtaccgggaagcgaaaccggccggatgggccgctgagcccgaatcgggcactgtgtggagccccctggagctgagatcaggatgttccgcttcatgagggacgtggagcctgaggatcccatgttcctgatggatccctttgctattcaccgtcagcatatgagccgtatgttgtcaggtggctttggatatagccccttcctcagcatcacagatggcaacatgccagggaccaggcctgccagccgccggatgcagcaggctggagctgtctccccctttgggatgctgggaatgtcgggtggtttcatggacatgtttgggatgatgaatgacatgattggaaacatggaacacatgacagctggaggcaattgccagaccttctcatcttccactgtcatctcctactccaatacgggtgatggtgcccccaaggtctaccaagagacatcagagatgcgctcggcaccaggcgggatccgggagacacggaggactgttcgggattcagacagtggactggagcagatgtccattgggcatcacatccgggacagggctcacatcctccagcgctcccgaaaccatcgcacgggggaccaggaggagcggcaggactatatcaacctggatgagagtgaggccgcagcgtttgatgacgagtggcggcgggagacctcccgattccggcagcagcgtcccctggagtttcggcggcttgagtcctcaggggctgggggacgaagggcggaggggcctccccgcctggccatccagggacctgaggactccccttcccgacagtcccgccgctatgactggtgagggccccgggccctcagcctctcttgtacaggctgagaggctgagaaatcatcccctgaataactttttcctctcgattcccatccccaatttaatattaaattaacaggcaagccggcccccacctctcgtcatgagaggtgggttctcctgtgccggctctgccaccccacagcacgctcctct

SEQ ID NO: 64012 - DNA, 1510 bp, Homo sapiens
  misc_feature (14)..(14): n is a, c, g, or t
  misc_feature (17)..(17): n is a, c, g, or t
  misc_feature (24)..(25): n is a, c, g, or t
ttcaggtggtacgnccngcggtanntggatatcgtcgaccaggccgtcgggagctcaagcccggaccaatccccacgttccgggccgcgaccctgaccctgcagcgtaccgggaagcgaaaccggccggatgggccgctgagcccgaatcgggcactgtgtggagccccctggagctgagatcaggatgttccgcttcatgagggacgtggagcctgaggatcccatgttcctgatggatccctttgctattcaccgtcagcatatgagccgtatgttgtcaggtggctttggatatagccccttcctcagcatcacagatggcaacatgccagggaccaggcctgccagccgccggatgcagcaggctggagctgtctccccctttgggatgctgggaatgtcgggtggtttcatggacatgtttgggatgatgaatgacatgattggaaacatggaacacatgacagctggaggcaattgccagaccttctcatcttccactgtcatctcctactccaatacgggtgatggtgcccccaaggtctaccaagagacatcagagatgcgctcggcaccaggcgggatccgggagacacggaggactgttcgggattcagacagtggactggagcagatgtccattgggcatcacatccgggacagggctcacatcctccagcgctcccgaaaccatcgcacgggggaccaggaggagcggcaggactatatcaacctggatgagagtgaggccgcagcgtttgatgacgagtggcggcgggagacctcccgattccggcagcagcgtcccctggagtttcggcggcttgagtcctcaggggctgggggacgaagggcggaggggcctccccgcctggccatccagggacctgaggactccccttcccgacagtcccgccgctatgactggtgagggccccgggccctcagcctctcttgtacaggctgagaggctgagaaatcatcccctgaataactttttcctctcgattcccatccccaatttaatattaaattaacaggcaagccggcccccacctctccctgggggtctcagggagaacctttcacggcaccctttccctaccttttccttctttaatctcctggtttaccattgatgacttcgcctctgcatctactgacttgatttttcattctgccactccatcttcaaaccccctcacctttcccatcctactcctgccatgcattgaagggtcaatgcattttggggtgagctctgggtttaggggccccctccatccctcagctaccctggatctttgcccacctcttcctcagagcccccactgaggggccgtagccctatctagggctgtggaaggagcagactggttcctaactctctccctcctcctgcccacacacatcaaaagaatcttccctacacccttctctgcctttattttttgatttgtgcaacttgtaactaggtgtttatggaataaaggagaatggaaaaaaga

SEQ ID NO: 64013 - DNA, 2001 bp, Homo sapiens
aaagctccccccagggatccgccccgcctcgtcgcccacagagcgcccgcctctccccaaggggcatctgcccctcgtcctccagtttccccttgaggagggagagagaacgtgctgcactgcgcccccaggttcaacctccaacccggtccctcccgaagaatggattcctcttctccttctcctcccctgccttatgggagcctcttccagtccacagaacccaaatcgaggttactaatgagctccccttcttcgtgcccaggggacccctctcggcctcaggctctgctcccctgagcttggcccatggccccggcgcccctgggactcggccccagccatctcaccacccgcgccagggggcggggctcccacggcccggccccgggtgggcgggtctatcgtgacgtcacttccgcccgggcctggccgaggttcgggctccgttggccgagggggccgtacggaggtggcagctgtgggaggaggcggcgtggaaggccgaggagctcaagcccggaccaatccccacgttccgggccgcgaccctgaccctgcagcgtaccgggaagcgaaaccggccggatgggccgctgagcccgaatcgggcactgtgtggagccccctggagctgagatcaggatgttccgcttcatgagggacgtggagcctgaggatcccatgttcctgatggatccctttgctattcaccgtcagcatatgagccgtatgttgtcaggtggctttggatatagccccttcctcagcatcacagatggcaacatgccagggaccaggcctgccagccgccggatgcagcaggctggagctgtctccccctttgggatgctgggaatgtcgggtggtttcatggacatgtttgggatgatgaatgacatgattggaaacatggaacacatgacagctggaggcaattgccagaccttctcatcttccactgtcatctcctactccaatacgggtgatggtgcccccaaggtctaccaagagacatcagagatgcgctcggcaccaggcggggtgagttggggagccctcctgtcccagagaagatccgggagacacggaggactgttcgggattcagacagtggactggagcagatgtccattgggcatcacatccgggacagggctcacatcctccagcgctcccgaaaccatcgcacgggggaccaggaggagcggcaggactatatcaacctggatgagagtgaggccgcagcgtttgatgacgagtggcggcgggagacctcccgattccggcagcagcgtcccctggagtttcggcggcttgagtcctcaggggctgggggacgaagggcggaggggcctccccgcctggccatccagggacctgaggactccccttcccgacagtcccgccgctatgactggtgagggccccgggccctcagcctctcttgtacaggctgagaggctgagaaatcatcccctgaataactttttcctctcgattcccatccccaatttaatattaaattaacaggcaagccggcccccacctctccctgggggtctcagggagaacctttcacggcaccctttccctaccttttccttctttaatctcctggtttaccattgatgacttcgcctctgcatctactgacttgatttttcattctgccactccatcttcaaaccccctcacctttcccatcctactcctgccatgcattgaagggtcaatgcattttggggtgagctctgggtttaggggccccctccatccctcagctaccctggatctttgcccacctcttcctcagagcccccactgaggggccgtagccctatctagggctgtggaaggagcagactggttcctaactctctccctcctcctgcccacacacatcaaaagaatcttccctacacccttctctgcctttattttttgatttgtgcaacttgtaactaggtgtttatggaataaaggagaatggaaaaaaga

SEQ ID NO: 64014 - DNA, 1101 bp, Homo sapiens
gaattccggtgttcatgactttttggttatattacatattgatatatgaacacatgacagctggaggcaattgccagaccttctcatcttccactgtcatctcctactccaatacgggtgatggtgcccccaaggtctaccaagagacatcagagatgcgctcggcaccaggcgggatccgggagacacggaggactgttcgggattcagacagtggactggagcagatgtccattgggcatcacatccgggacagggctcacatcctccagcgctcccgaaaccatcgcacgggggaccaggaggagcggcaggactatatcaacctggatgagagtgaggccgcagcgtttgatgacgagtggcggcgggagacctcccgattccggcagcagcgtcccctggagtttcggcggcttgagtcctcaggggctgggggacgaagggcggaggggcctccccgcctggccatccagggacctgaggactccccttcccgacagtcccgccgctatgactggtgagggccccgggccctcagcctctcttgtacaggctgagaggctgagaaatcatcccctgaataactttttcctctcgattcccatccccaatttaatattaaattaacaggcaagccggcccccacctctccctgggggtctcagggagaacctttcacggcaccctttccctaccttttccttctttaatctcctggtttaccattgatgacttcgcctctgcatctactgacttgatttttcattctgccactccatcttcaaaccccctcacctttcccatcctactcctgccatgcattgaagggtcaatgcattttggggtgagctctgggtttaggggccccctccatccctcagctaccctggatctttgcccacctcttcctcagagcccccactgaggggccgtagccctatctagggctgtggaaggagcagactggttcctaactctctccctcctcctgcccacacacatcaaaagaatcttccctacacccttctctgcctttattttttgatttgtgcaacttgtaactaggtgtttatggaataaaggagaatggaaaaaaga

SEQ ID NO: 64015 - DNA, 1536 bp, Homo sapiens
caaggagaccaggctgagcagtcgggtggtttcatggacatgtttgggatgatgaatgacatgattggaaacatggtgagacttgccccatacccttccccggccttgctctcagtgatggctgacaacaccttgcatcctctaaggcaagagggaaacagtatgctagtgaagggtaaagtactggataaagtaattgaaccagagagccttgggaccctgtacctgctgtcatgcctgcctgaagcagccggcagcagctctcttacgtagcatacaattaaggccctgtctcttcaggtccttcttgctcgtggttggactcagaggaatttgggagggtaatgatgaggcctgatgttttttcagttcttgcattttgtgagaaagatacaggctagaacaggcagctgaagggtgaaatcccttcaccaggggtgatgcctccccattcagccctcccctacctaccctgtcctcaggaacacatgacagctggaggcaattgccagaccttctcatcttccactgtcatctcctactccaatacgggtgatggtgcccccaaggtctaccaagagacatcagagatgcgctcggcaccaggcgggatccgggagacacggaggactgttcgggattcagacagtggactggagcagatgtccattgggcatcacatccgggacagggctcacatcctccagcgctcccgaaaccatcgcacgggggaccaggaggagcggcaggactatatcaacctggatgagagtgaggccgcagcgtttgatgacgagtggcggcgggagacctcccgattccggcagcagcgtcccctggagtttcggcggcttgagtcctcaggggctgggggacgaagggcggaggggcctccccgcctggccatccagggacctgaggactccccttcccgacagtcccgccgctatgactggtgagggccccgggccctcagcctctcttgtacaggctgagaggctgagaaatcatcccctgaataactttttcctctcgattcccatccccaatttaatattaaattaacaggcaagccggcccccacctctccctgggggtctcagggagaacctttcacggcaccctttccctaccttttccttctttaatctcctggtttaccattgatgacttcgcctctgcatctactgacttgatttttcattctgccactccatcttcaaaccccctcacctttcccatcctactcctgccatgcattgaagggtcaatgcattttggggtgagctctgggtttaggggccccctccatccctcagctaccctggatctttgcccacctcttcctcagagcccccactgaggggccgtagccctatctagggctgtggaaggagcagactggttcctaactctctccctcctcctgcccacacacatcaaaagaatcttccctacacccttctctgcctttattttttgatttgtgcaacttgtaactaggtgtttatggaataaaggagaatggaaaaaaga

SEQ ID NO: 64016 - DNA, 1012 bp, Homo sapiens
acgccaactctcttcacaatacatcgtgtgtagagctatacgaagtataacatgagacattcataatgctcaccgtgtcccgcgctcttcggccgacacgagttgacggtgcgccattcaaatcgagctgtggagcagatgtccattgggcatcacatccgggacagggctcacatcctccagcgctcccgaaaccatcgcacgggggaccaggaggagcggcaggactatatcaacctggatgagagtgaggccgcagcgtttgatgacgagtggcggcgggagacctcccgattccggcagcagcgtcccctggagtttcggcggcttgagtcctcaggggctgggggacgaagggcggaggggcctccccgcctggccatccagggacctgaggactccccttcccgacagtcccgccgctatgactggtgagggccccgggccctcagcctctcttgtacaggctgagaggctgagaaatcatcccctgaataactttttcctctcgattcccatccccaatttaatattaaattaacaggcaagccggcccccacctctccctgggggtctcagggagaacctttcacggcaccctttccctaccttttccttctttaatctcctggtttaccattgatgacttcgcctctgcatctactgacttgatttttcattctgccactccatcttcaaaccccctcacctttcccatcctactcctgccatgcattgaagggtcaatgcattttggggtgagctctgggtttaggggccccctccatccctcagctaccctggatctttgcccacctcttcctcagagcccccactgaggggccgtagccctatctagggctgtggaaggagcagactggttcctaactctctccctcctcctgcccacacacatcaaaagaatcttccctacacccttctctgcctttattttttgatttgtgcaacttgtaactaggtgtttatggaataaaggagaatggaaaaaaga

SEQ ID NO: 64017 - DNA, 600 bp, Homo sapiens
tcgagaggaaaaagttattcaggggatgatttctcagcctctcagcctgtacaggctgagaggctgagaaatcatcccctgaataactttttcctctcgattcccatccccaatttaatattaaattaacaggcaagccggcccccacctctccctgggggtctcagggagaacctttcacggcaccctttccctaccttttccttctttaatctcctggtttaccattgatgacttcgcctctgcatctactgacttgatttttcattctgccactccatcttcaaaccccctcacctttcccatcctactcctgccatgcattgaagggtcaatgcattttggggtgagctctgggtttaggggccccctccatccctcagctaccctggatctttgcccacctcttcctcagagcccccactgaggggccgtagccctatctagggctgtggaaggagcagactggttcctaactctctccctcctcctgcccacacacatcaaaagaatcttccctacacccttctctgcctttattttttgatttgtgcaacttgtaactaggtgtttatggaataaaggagaatggaaaaaaga

SEQ ID NO: 64018 - DNA, 1008 bp, Homo sapiens
aaagctccccccagggatccgccccgcctcgtcgcccacagagcgcccgcctctccccaaggggcatctgcccctcgtcctccagtttccccttgaggagggagagagaacgtgctgcactgcgcccccaggttcaacctccaacccggtccctcccgaagaatggattcctcttctccttctcctcccctgccttatgggagcctcttccagtccacagaacccaaatcgaggttactaatgagctccccttcttcgtgcccaggggacccctctcggcctcaggctctgctcccctgagcttggcccatggccccggcgcccctgggactcggccccagccatctcaccacccgcgccagggggcggggctcccacggcccggccccgggtgggcgggtctatcgtgacgtcacttccgcccgggcctggccgaggttcgggctccgttggccgagggggccgtacggaggtggcagctgtgggaggaggcggcgtggaaggccgaggagctcaagcccggaccaatccccacgttccgggccgcgaccctgaccctgcagcgtaccgggaagcgaaaccggccggatgggccgctgagcccgaatcgggcactgtgtggagccccctggagctgagatcaggatgttccgcttcatgagggacgtggagcctgaggatcccatgttcctgatggatccctttgctattcaccgtcagcatatgagccgtatgttgtcaggtggctttggatatagccccttcctcagcatcacagatggcaacatgccagggaccaggcctgccagccgccggatgcagcaggctggagctgtctccccctttgggatgctgggaatgtcgggtggtttcatggacatgtttgggatgatgaatgacatgattggaaacatggaacacatgacagctggaggcaattgcctttattttttgatttgtgcaacttgtaactaggtgtttatggaataaaggagaatggaaaaaaga

SEQ ID NO: 64019 - DNA, 917 bp, Homo sapiens
aaagctccccccagggatccgccccgcctcgtcgcccacagagcgcccgcctctccccaaggggcatctgcccctcgtcctccagtttccccttgaggagggagagagaacgtgctgcactgcgcccccaggttcaacctccaacccggtccctcccgaagaatggattcctcttctccttctcctcccctgccttatgggagcctcttccagtccacagaacccaaatcgaggttactaatgagctccccttcttcgtgcccaggggacccctctcggcctcaggctctgctcccctgagcttggcccatggccccggcgcccctgggactcggccccagccatctcaccacccgcgccagggggcggggctcccacggcccggccccgggtgggcgggtctatcgtgacgtcacttccgcccgggcctggccgaggttcgggctccgttggccgagggggccgtacggaggtggcagctgtgggaggaggcggcgtggaaggccgaggagctcaagcccggaccaatccccacgttccgggccgcgaccctgaccctgcagcgtaccgggaagcgaaaccggccggatgggccgctgagcccgaatcgggcactgtgtggagccccctggagctgagatcaggatgttccgcttcatgagggacgtggagcctgaggatcccatgttcctgatctcagctaccctggatctttgcccacctcttcctcagagcccccactgaggggccgtagccctatctagggctgtggaaggagcagactggttcctaactctctccctcctcctgcccacacacatcaaaagaatcttccctacacccttctctgcctttattttttgatttgtgcaacttgtaactaggtgtttatggaataaaggagaatggaaaaaaga

SEQ ID NO: 64020 - DNA, 1508 bp, Homo sapiens
aacttacgctaggtagcgaggctgggtgttgcggcgtggaaggccgaggagctcaagcccggaccaatccccacgttccgggccgcgaccctgaccctgcagcgtaccgggaagcgaaaccggccggatgggccgctgagcccgaatcgggcactgtgtggagccccctggagctgagatcaggatgttccgcttcatgagggacgtggagcctgaggatcccatgttcctgatggatccctttgctattcaccgtcagcatatgagccgtatgttgtcaggtggctttggatatagccccttcctcagcatcacagatggcaacatgccagggaccaggcctgccagccgccggatgcagcaggctggagctgtctccccctttgggatgctgggaatgtcgggtggtttcatggacatgtttgggatgatgaatgacatgattggaaacatggaacacatgacagctggaggcaattgccagaccttctcatcttccactgtcatctcctactccaatacgggtgatggtgcccccaaggtctaccaagagacatcagagatgcgctcggcaccaggcgggatccgggagacacggaggactgttcgggattcagacagtggactggagcagatgtccattgggcatcacatccgggacagggctcacatcctccagcgctcccgaaaccatcgcacgggggaccaggaggagcggcaggactatatcaacctggatgagagtgaggccgcagcgtttgatgacgagtggcggcgggagacctcccgattccggcagcagcgtcccctggagtttcggcggcttgagtcctcaggggctgggggacgaagggcggaggggcctccccgcctggccatccagggacctgaggactccccttcccgacagtcccgccgctatgactggtgagggccccgggccctcagcctctcttgtacaggctgagaggctgagaaatcatcccctgaataactttttcctctcgattcccatccccaatttaatattaaattaacaggcaagccggcccccacctctccctgggggtctcagggagaacctttcacggcaccctttccctaccttttccttctttaatctcctggtttaccattgatgacttcgcctctgcatctactgacttgatttttcattctgccactccatcttcaaaccccctcacctttcccatcctactcctgccatgcattgaagggtcaatgcattttggggtgagctctgggtttaggggccccctccatccctcagctaccctggatctttgcccacctcttcctcagagcccccactgaggggccgtagccctatctagggctgtggaaggagcagactggttcctaactctctccctcctcctgcccacacacatcaaaagaatcttccctacacccttctctgcctttattttttgatttgtgcaacttgtaactaggtgtttatggaataaaggagaatggaaaaaaga

SEQ ID NO: 64021 - DNA, 2376 bp, Homo sapiens
aaagctccccccagggatccgccccgcctcgtcgcccacagagcgcccgcctctccccaaggggcatctgcccctcgtcctccagtttccccttgaggagggagagagaacgtgctgcactgcgcccccaggttcaacctccaacccggtccctcccgaagaatggattcctcttctccttctcctcccctgccttatgggagcctcttccagtccacagaacccaaatcgaggttactaatgagctccccttcttcgtgcccaggggacccctctcggcctcaggctctgctcccctgagcttggcccatggccccggcgcccctgggactcggccccagccatctcaccacccgcgccagggggcggggctcccacggcccggccccgggtgggcgggtctatcgtgacgtcacttccgcccgggcctggccgaggttcgggctccgttggccgagggggccgtacggaggtggcagctgtgggaggaggcggcgtggaaggccgaggagctcaagcccggaccaatccccacgttccgggccgcgaccctgaccctgcagcgtaccgggaagcgaaaccggccggatgggccgctgagcccgaatcgggcactgtgtggagccccctggagctgagatcaggatgttccgcttcatgagggacgtggagcctgaggatcccatgttcctgatggatccctttgctattcaccgtcagcatatgagccgtatgttgtcaggtggctttggatatagccccttcctcagcatcacagatggcaacatgccagggaccaggcctgccagccgccggatgcagcaggctggagctgtctccccctttgggatgctgggaatgtcgggtggtttcatggacatgtttgggatgatgaatgacatgattggaaacatggtgagacttgccccatacccttccccggccttgctctcagtgatggctgacaacaccttgcatcctctaaggcaagagggaaacagtatgctagtgaagggtaaagtactggataaagtaattgaaccagagagccttgggaccctgtacctgctgtcatgcctgcctgaagcagccggcagcagctctcttacgtagcatacaattaaggccctgtctcttcaggtccttcttgctcgtggttggactcagaggaatttgggagggtaatgatgaggcctgatgttttttcagttcttgcattttgtgagaaagatacaggctagaacaggcagctgaagggtgaaatcccttcaccaggggtgatgcctccccattcagccctcccctacctaccctgtcctcaggaacacatgacagctggaggcaattgccagaccttctcatcttccactgtcatctcctactccaatacgggtgatggtgcccccaaggtctaccaagagacatcagagatgcgctcggcaccaggcgggatccgggagacacggaggactgttcgggattcagacagtggactggagcagatgtccattgggcatcacatccgggacagggctcacatcctccagcgctcccgaaaccatcgcacgggggaccaggaggagcggcaggactatatcaacctggatgagagtgaggccgcagcgtttgatgacgagtggcggcgggagacctcccgattccggcagcagcgtcccctggagtttcggcggcttgagtcctcaggggctgggggacgaagggcggaggggcctccccgcctggccatccagggacctgaggactccccttcccgacagtcccgccgctatgactggtgagggccccgggccctcagcctctcttgtacaggctgagaggctgagaaatcatcccctgaataactttttcctctcgattcccatccccaatttaatattaaattaacaggcaagccggcccccacctctccctgggggtctcagggagaacctttcacggcaccctttccctaccttttccttctttaatctcctggtttaccattgatgacttcgcctctgcatctactgacttgatttttcattctgccactccatcttcaaaccccctcacctttcccatcctactcctgccatgcattgaagggtcaatgcattttggggtgagctctgggtttaggggccccctccatccctcagctaccctggatctttgcccacctcttcctcagagcccccactgaggggccgtagccctatctagggctgtggaaggagcagactggttcctaactctctccctcctcctgcccacacacatcaaaagaatcttccctacacccttctctgcctttattttttgatttgtgcaacttgtaactaggtgtttatggaataaaggagaatggaaaaaaga

SEQ ID NO: 64022 - DNA, 1907 bp, Homo sapiens
aaagctccccccagggatccgccccgcctcgtcgcccacagagcgcccgcctctccccaaggggcatctgcccctcgtcctccagtttccccttgaggagggagagagaacgtgctgcactgcgcccccaggttcaacctccaacccggtccctcccgaagaatggattcctcttctccttctcctcccctgccttatgggagcctcttccagtccacagaacccaaatcgaggttactaatgagctccccttcttcgtgcccaggggacccctctcggcctcaggctctgctcccctgagcttggcccatggccccggcgcccctgggactcggccccagccatctcaccacccgcgccagggggcggggctcccacggcccggccccgggtgggcgggtctatcgtgacgtcacttccgcccgggcctggccgaggttcgggctccgttggccgagggggccgtacggaggtggcagctgtgggaggaggcggcgtggaaggccgaggagctcaagcccggaccaatccccacgttccgggccgcgaccctgaccctgcagcgtaccgggaagcgaaaccggccggatgggccgctgagcccgaatcgggcactgtgtggagccccctggagctgagatcaggatgttccgcttcatgagggacgtggagcctgaggatcccatgttcctgatggatccctttgctattcaccgtcagcatatgagccgtatgttgtcaggtggctttggatatagccccttcctcagcatcacagatggcaacatgccagggaccaggcctgccagccgccggatgcagcaggctggagctgtctccccctttgggatgctgggaatgtcgggtggtttcatggacatgtttgggatgatgaatgacatgattggaaacatggaacacatgacagctggaggcaattgccagaccttctcatcttccactgtcatctcctactccaatacgggtgatggtgcccccaaggtctaccaagagacatcagagatgcgctcggcaccaggcgggatccgggagacacggaggactgttcgggattcagacagtggactggagcagatgtccattgggcatcacatccgggacagggctcacatcctccagcggtgaggccgcagcgtttgatgacgagtggcggcgggagacctcccgattccggcagcagcgtcccctggagtttcggcggcttgagtcctcaggggctgggggacgaagggcggaggggcctccccgcctggccatccagggacctgaggactccccttcccgacagtcccgccgctatgactggtgagggccccgggccctcagcctctcttgtacaggctgagaggctgagaaatcatcccctgaataactttttcctctcgattcccatccccaatttaatattaaattaacaggcaagccggcccccacctctccctgggggtctcagggagaacctttcacggcaccctttccctaccttttccttctttaatctcctggtttaccattgatgacttcgcctctgcatctactgacttgatttttcattctgccactccatcttcaaaccccctcacctttcccatcctactcctgccatgcattgaagggtcaatgcattttggggtgagctctgggtttaggggccccctccatccctcagctaccctggatctttgcccacctcttcctcagagcccccactgaggggccgtagccctatctagggctgtggaaggagcagactggttcctaactctctccctcctcctgcccacacacatcaaaagaatcttccctacacccttctctgcctttattttttgatttgtgcaacttgtaactaggtgtttatggaataaaggagaatggaaaaaaga

SEQ ID NO: 64023 - DNA, 1624 bp, Homo sapiens
aaagctccccccagggatccgccccgcctcgtcgcccacagagcgcccgcctctccccaaggggcatctgcccctcgtcctccagtttccccttgaggagggagagagaacgtgctgcactgcgcccccaggttcaacctccaacccggtccctcccgaagaatggattcctcttctccttctcctcccctgccttatgggagcctcttccagtccacagaacccaaatcgaggttactaatgagctccccttcttcgtgcccaggggacccctctcggcctcaggctctgctcccctgagcttggcccatggccccggcgcccctgggactcggccccagccatctcaccacccgcgccagggggcggggctcccacggcccggccccgggtgggcgggtctatcgtgacgtcacttccgcccgggcctggccgaggttcgggctccgttggccgagggggccgtacggaggtggcagctgtgggaggaggcggcgtggaaggccgaggagctcaagcccggaccaatccccacgttccgggccgcgaccctgaccctgcagcgtaccgggaagcgaaaccggccggatgggccgctgagcccgaatcgggcactgtgtggagccccctggagctgagatcaggatgttccgcttcatgagggacgtggagcctgaggatcccatgttcctgatggatccctttgctattcaccgtcagcatatgagccgtatgttgtcaggtggctttggatatagccccttcctcagcatcacagatggcaacatgccagggaccaggcctgccagccgccggatgcagcaggctggagctgtctccccctttgggatgctgggaatgtcgggtggtttcatggacatgtttgggatgatgaatgacatgattggaaacatggaacacatgacagctggaggcaattgccagaccttctcatcttccactgtcatctcctactccaatacgggtgatggtgcccccaaggtctaccaagagacatcagagatgcgctcggcaccaggcgggatccgggagacacggaggactgttcgggattcagacagtggactggagcagatgtccattgggcatcacatccgggacagggctcacatcctccagcgctcccgaaaccatcgcacgggggaccaggaggagcggcaggactatatcaacctggatgagacggcaccctttccctaccttttccttctttaatctcctggtttaccattgatgacttcgcctctgcatctactgacttgatttttcattctgccactccatcttcaaaccccctcacctttcccatcctactcctgccatgcattgaagggtcaatgcattttggggtgagctctgggtttaggggccccctccatccctcagctaccctggatctttgcccacctcttcctcagagcccccactgaggggccgtagccctatctagggctgtggaaggagcagactggttcctaactctctccctcctcctgcccacacacatcaaaagaatcttccctacacccttctctgcctttattttttgatttgtgcaacttgtaactaggtgtttatggaataaaggagaatggaaaaaaga

SEQ ID NO: 64024 - DNA, 1430 bp, Homo sapiens
aaagctccccccagggatccgccccgcctcgtcgcccacagagcgcccgcctctccccaaggggcatctgcccctcgtcctccagtttccccttgaggagggagagagaacgtgctgcactgcgcccccaggttcaacctccaacccggtccctcccgaagaatggattcctcttctccttctcctcccctgccttatgggagcctcttccagtccacagaacccaaatcgaggttactaatgagctccccttcttcgtgcccaggggacccctctcggcctcaggctctgctcccctgagcttggcccatggccccggcgcccctgggactcggccccagccatctcaccacccgcgccagggggcggggctcccacggcccggccccgggtgggcgggtctatcgtgacgtcacttccgcccgggcctggccgaggttcgggctccgttggccgagggggccgtacggaggtggcagctgtgggaggaggcggcgtggaaggccgaggagctcaagcccggaccaatccccacgttccgggccgcgaccctgaccctgcagcgtaccgggaagcgaaaccggccggatgggccgctgagcccgaatcgggcactgtgtggagccccctggagctgagatcaggatgttccgcttcatgagggacgtggagcctgaggatcccatgttcctgatggatccctttgctattcaccgtcagcatatgagccgtatgttgtcaggtggctttggatatagccccttcctcagcatcacagatggcaacatgccagggaccaggcctgccagccgccggatgcagcaggctggagctgtctccccctttgggatgctgggaatgtcgggtggtttcatggacatgtttgggatgatgaatgacatgattggaaacatggtgagacttgccccatacccttccccggccttgctctcagtgatggctgacaacaccttgcatcctctaaggcaagagggaaacagtatgctagtgaagggtaaagtactggataaagtaattgaaccagagagccttgggaccctgtacctgctgtcatgcctgcctgaagcagccggcagcagctctcttacgtagcatacaattaaggccctgtctcttcaggtccttcttgctcgtggttggactcagaggaatttgggagggtaatgatgaggcctgatgttttttcactcagctaccctggatctttgcccacctcttcctcagagcccccactgaggggccgtagccctatctagggctgtggaaggagcagactggttcctaactctctccctcctcctgcccacacacatcaaaagaatcttccctacacccttctctgcctttattttttgatttgtgcaacttgtaactaggtgtttatggaataaaggagaatggaaaaaaga

SEQ ID NO: 64025 - DNA, 992 bp, Homo sapiens
aaagctccccccagggatccgccccgcctcgtcgcccacagagcgcccgcctctccccaaggggcatctgcccctcgtcctccagtttccccttgaggagggagagagaacgtgctgcactgcgcccccaggttcaacctccaacccggtccctcccgaagaatggattcctcttctccttctcctcccctgccttatgggagcctcttccagtccacagaacccaaatcgaggttactaatgagctccccttcttcgtgcccaggggacccctctcggcctcaggctctgctcccctgagcttggcccatggccccggcgcccctgggactcggccccagccatctcaccacccgcgccagggggcggggctcccacggcccggccccgggtgggcgggtctatcgtgacgtcacttccgcccgggcctggccgaggttcgggctccgttggccgagggggccgtacggaggtggcagctgtgggaggaggcggcgtggaaggccgaggagctcaagcccggaccaatccccacgttccgggccgcgaccctgaccctgcagcgtaccgggaagcgaaaccggccggatgggccgctgagcccgaatcgggcactgtgtggagccccctggagctgagatcaggatgttccgcttcatgagggacgtggagcctgaggatcccatgttcctgatggatccctttgctattcaccgtcagcatatgagccgtatgttgtcaggtggctttggatatagccccttcctcagctcagctaccctggatctttgcccacctcttcctcagagcccccactgaggggccgtagccctatctagggctgtggaaggagcagactggttcctaactctctccctcctcctgcccacacacatcaaaagaatcttccctacacccttctctgcctttattttttgatttgtgcaacttgtaactaggtgtttatggaataaaggagaatggaaaaaaga

SEQ ID NO: 64026 - DNA, 850 bp, Homo sapiens
cggccgagagctccaccgctgaggccaacgaggccacgctttatttttattgtcccatctctccagtaagcatttaaaacacagaatttttagttaataagcaatgtggatttgtgttgcatccattgttttttcttgaattatatcatcagcttcatagtatgtttcatttgttgcatttgatgctgcatttgaattgagggctttggtttttccatttgacttgccttcttgagtggaagaagcctctaagtgttgaagcttaaggccagtgtctaatctttgaggtttcgtatacagaaataaatagcaaaggacacagacactgatgacaaaggcgagtaaaacaagggcagcaattcctagtccaatcaaggcaccaatgctgtatttggaacatacgtcattgaaaagtaatgatctttttcttcattatcttcctggcttgcctttaggcttctgctctttctctgggattaggacactgacaagtttgacctgaggctccacatgtagctgtgcttgtaggggaagtagctgcccggctcgctgcagcagtacttgaggtcggcgaagccgcagcaatactggagcgctgccccctcgccgcgccgggggcactggaagggctccacgaagctctggttgaggctgtagtagccggagcacagtcggctggcctcgctcatcgcgggcaggggccgggagaggctcgcgagggccccggtctgctctcggatcgcacccgtccagcacctccagagcccgcggacccctctgcccggactcggctcttccgatctgggctctggctgcctgggcgctcagccttcgcgcgccacctctgatt

SEQ ID NO: 64027 - DNA, 2587 bp, Homo sapiens
gcgaaggccagtcttctgatctcagtatctcctcccaactcctctaaaaataggtagagtggcagagaattggggtgcctcttctatagcacaacccatgatgcatccagtcatgcctgaccccactatgcctttcccacaaattgggaggagttggggcagtgagcattttgctagctctgtctgtttcttgcttcttgtgcccatttatagtccttggccatggagcaacaaaagtagaatggtgccagtgccttaactaaatttttctcaacctagattttcacctgagacaatatggtaatattattaaattactgtaaagatagcaaattttctgggatactttaaaatcaaagttgtatcaaagatcaagaagcacccataaaagctttataaactttcacaaaaaataagtgaaaattctttgtttttatggccgtgtaaaatgtcatttttataatggaaatgtcttaattttcaaacttaacatatactttaagcaattttagtatttaaacctttgcaaaattgtatttttgaatgtgaagttcaactttggcagtaggttgttgcaatagtgactctggcactatggtgccagtatagccacatagggttatttaaattaattaaataaatgaaaaattttattttttcagttgcattagccacatcttaagtgttcagtagccacatgtgactggtggctaccatattagtgcagatatagaaagaacatttccatcatcacagaaacttctcttaattctggtctagaagataaccttagtacttggtagaaattttgacaggctaatgacgaaaagtttgtaaccctgagctttgcatgcccaagaaaaataaggtattcttttttatatatcagaccagagaagctgtattcagcacattttgaaatgctagtttttggctatggccataccaccctaaatgtgccagatcttgtctgaaatgctagtttctgactacaaaaactacaggacatagtagatatgctcagtagagctgcttaaaataattccctttttttttctgttgaattctgttacaaaaccaggtctgtgttataatagaaaacacacttatgaataaaaatctttaaaaattataatttgcagaaattagttttatttctagatttctaggtggtattaatgtgatagcattaggtgggaccagagaactcatttgttttgtagctttcattatacagattatttaggaaatatatcagcaaaggattttttgttatgcttatctcttgaaacaaaatatttattgtacagattatacattgtgatttttttgttactgagtatattgtttgtgcccagaaaaatctaaaaagatgtgggttgacttctaagagatttaagaacaagtcacctctagtttttaagacagttcccttgatatttacctatccagtaccatctcataagaataactgcctgtaagtatcagaaagttgagaaatgctggtaatgtgacataaacttctcactgttcttcactgagataggactgcttatcttgttattgataaattatttaatttctcctgaataattagcataatctcatgtgatacagaaacatcttaattagcaaataaatttatacaaaggaaaaccaataaaaccttaatgtgcgtttaataaagtaactgaatgatcaaaaatgcagctgtgtcttgctttgtgagtgacgaatttttgaaaagcaatattacaaaccgtttcaagtgcacgctttatttttattgtcccatctctccagtaagcatttaaaacacagaatttttagttaataagcaatgtggatttgtgttgcatccattgttttttcttgaattatatcatcagcttcatagtatgtttcatttgttgcatttgatgctgcatttgaattgagggctttggtttttccatttgacttgccttcttgagtggaagaagcctctaagtgttgaagcttaaggccagtgtctaatctttgaggtttcgtatacagaaataaatagcaaaggacacagacactgatgacaaaggcgagtaaaacaagggcagcaattcctagtccaatcaaggcaccaatgctgtatttggaacatacgtcattgaaaagtaatgatctttttcttcattatcttcctggcttgcctttaggcttctgctctttctctgggattaggacactgacaagtttgacctgaggctccacatgtagctgtgcttgtaggggaagtagctgcccggctcgctgcagcagtacttgaggtcggcgaagccgcagcaatactggagcgctgccccctcgccgcgccgggggcactggaagggctccacgaagctctggttgaggctgtagtagccggagcacagtcggctggcctcgctcatcgcgggcaggggccgggagaggctcgcgagggccccggtctgctctcggatcgcacccgtccagcacctccagagcccgcggacccctctgcccggactcggctcttccgatctgggctctggctgcctgggcgctcagccttcgcgcgccacctctgatt

SEQ ID NO: 64028 - DNA, 353 bp, Homo sapiens
gaatggtaacagaagtatggccccgagggaaggaggcaggtccagggctacagtgctttcaggtactggtgtttctatacttccctcggggccatacttctgtttccatctgctgggccaccagccactttagtgacccctgcctacttccttcctgttggatatcatacttccatctggctgcctttgcttaagccatctttgtggtagaggggccctggaattgcagctgtactgaggatgatgttattcacagcccctggcccacccactaatactactgcacagagtcaggatctcacatttcaccccaggctcaactgaggatgtggcttattaaacacggaagtgca

SEQ ID NO: 64029 - DNA, 897 bp, Homo sapiens
ggaaacaaggctcagggaattcagggaccggctggcatcacgtctgggtggtcagaatggatccacgcctgatggctccacgcatttcccttcgtgtgagtaaatctgtccataccgcaaccccatgcttggcattccaaggacactcctgtgctggtgacagagaggggagttctcaggctttaagcccaccagcttaatggcctttgcagcaagcttcaagtctgcacgtagagctcaggcttcaagttagggtgacaccaaggtctggacagtccatcatcatgctgttcagcagcctgtaggataggtggtggtattgtcataatttcagagagatgaaatgacaggtttgttggattccactccgcacaatcccctcagttgggaaggcagtaatctctgtcctgagcacattgacctcatcagggtcagcctcctcttctgcaaaacatgcgctcactaatcagggcattcattcagataatctctgggcccctatcacgtgataggggccacacgaggcccagagaacaaagacaacccgggccctgctcatggggagccagggatttattaggggagggcggcagtgcatggggcaagggtggtcagggaaggcttctcccaagaaagacacctaagccgagatcaaatgccacagggtgacaaagtgtaccaagcaaagggaatggattgagcaaggctaagagggaagaatacgggtgacatattagaataggtaagactgtgatgctggagcttgaacgtgagagcttgttggaccctgggagccattgaaagactaactcagcaaggctgtggtctgatctaatttgcctttataaatgcctacttcatggcaagtagataaaggggtccaagagttagggctag

SEQ ID NO: 64030 - DNA, 686 bp, Homo sapiens
tggcagatgagtcgttcgcgccgataacgaaggtatttttacccggcccgcctgtcagccggttaaaatccgagttcgccttgacataaagaatgtcatcgccctcgccgccctccagttcgttaccgacgtcattgccaattaaaatgtcattgtccgcacaatcccctcagttgggaaggcagtaatctctgtcctgagcacattgacctcatcagggtcagcctcctcttctgcaaaacatgcgctcactaatcagggcattcattcagataatctctgggcccctatcacgtgataggggccacacgaggcccagagaacaaagacaacccgggccctgctcatggggagccagggatttattaggggagggcggcagtgcatggggcaagggtggtcagggaaggcttctcccaagaaagacacctaagccgagatcaaatgccacagggtgacaaagtgtaccaagcaaagggaatggattgagcaaggctaagagggaagaatacgggtgacatattagaataggtaagactgtgatgctggagcttgaacgtgagagcttgttggaccctgggagccattgaaagactaactcagcaaggctgtggtctgatctaatttgcctttataaatgcctacttcatggcaagtagataaaggggtccaagagttagggctag

SEQ ID NO: 64031 - DNA, 2055 bp, Homo sapiens
cggtatggctatgtgaccacgcctcggaccacacgcgtgcgtggtggggactacggtgacagtaccccgggtggggcgagggccagtcatggcggagtcctggtctgggcaggccttgcaggctctgccggccacggtgctgggcgcgctgggcagcgagttcttgcgggagtgggaggcgcaggacatgcgcgtgaccctcttcaagctgctgctgctgtggttggtgttaagtctcctgggcatccagctggcgtgggggttctacgggaatacagtgaccgggttgtatcaccgtccaggtctgggtggtcagaatggatccacgcctgatggctccacgcatttcccttcgtgggaaatggcagcaaacgaacctctcaaaacccacagagaataagggaaggcagcagagggtctccaagggcatcactgggtctgctggcttctacactgggttctgctactccccagacctcagggacaactgccgggggttcagggttggtagcagggagtacccagtgcctacagggctgggcctcttctgcctcttaagcctgctccctcacccaggcactgggcaagtgaagagtttgcctgtactcttatctgggtgccttaaggagagagattgtgttcttcctctctcaggggtgataactcaggaagcctctgggttgggaagaccatcagttcttttgtcttaggtttcttttcctgtccctcttccatccccaagatgtgaccccataaaaatttttcctgagttggccaggcatggtggctcacgcctgtaatcccaacactttgggaggctgaggcaggcagatcacgaggtcaggagttcgagaccagcctgaccaacatggtgaaaaccccatctctactaaaaatacaaaaattagccgggtgtggtggcacacaccagtaatcccagctactcaggaggctgaagcaggagatttgcttgaacctgggaggcagaggttgcagtgagccaagattgcgccgttgtactccagcctgggcaacagagcaagacccatctcaaaaaaaaaatttttttcctgagaggaagcctgaggttgaccagctctggggtttgtaaggcaggtctgttttctcctaggccctgagttttctgaatctctggttttgctttgttggcaaggagccagggaatcctgacctgagccagaccttaagctctatggttatttagctggccattcaggtataaggcagggtggtgtacctgctggcactatccagatggaggcaccaaacacccacatacctggcccaaccagacttctcccgtgagccaggcaaaggaaattgtcatctgccaactgtcctactcatattcctctcagtccttcttgggggtaagctgattacctgaaggacagctgaacccctggggtagcctcctatccaccactgcttaagtgcctatgggaatgtgggtctgcaccttgtcccctcataggatggtaccaagcatttagtgcacagtggccccatcatagcctgcagcctcatcatttcccatctggacctggtacaaatgcacgtcacaggctcagctcctccccactagcatcttctctaccttcaagaaccaggcagccctgccatgtcacaataggccaggggagtttccaaagatgtgggtggcaaatgcccctatagaaacaccagtacctgaaagcactgtagccctggacctgcctccttccctcggggccatacttctgtttccatctgctgggccaccagccactttagtgacccctgcctacttccttcctgttggatatcatacttccatctggctgcctttgcttaagccatctttgtggtagaggggccctggaattgcagctgtactgaggatgatgttattcacagcccctggcccacccactaatactactgcacagagtcaggatctcacatttcaccccaggctcaactgaggatgtggcttattaaacacggaagtgcaaaaaaaaaaaaaaaaaaaaaaaaaaaaaaaaaaaagggggg

SEQ ID NO: 64032 - DNA, 2242 bp, Homo sapiens
tactcccggagtcactcatcccttaagcaagcagggtggggttaggtgcgcgtgcgcggttttaatactcctccccgaactgccaactcttcacgcacgcgaagtaggccccaccctggctgggtttacgcgtgcgcactaacgggcctggtcccggaagaccacacgcgtgcgtggtggggactacggtgacagtaccccgggtggggcgagggccagtcatggcggagtcctggtctgggcaggccttgcaggctctgccggccacggtgctgggcgcgctgggcagcgagttcttgcgggagtgggaggcgcaggacatgcgcgtgaccctcttcaagctgctgctgctgtggttggtgttaagtctcctgggcatccagctggcgtgggggttctacgggaatacagtgaccgggttgtatcaccgtccaggtctgggtggtcagaatggatccacgcctgatggctccacgcatttcccttcgtgggaaatggcagcaaacgaacctctcaaaacccacagagaataagggaaggcagcagagggtctccaagggcatcactgggtctgctggcttctacactgggttctgctactccccagacctcagggacaactgccgggggttcagggttggtagcagggagtacccagtgcctacagggctgggcctcttctgcctcttaagcctgctccctcacccaggcactgggcaagtgaagagtttgcctgtactcttatctgggtgccttaaggagagagattgtgttcttcctctctcaggggtgataactcaggaagcctctgggttgggaagaccatcagttcttttgtcttaggtttcttttcctgtccctcttccatccccaagatgtgaccccataaaaatttttcctgagttggccaggcatggtggctcacgcctgtaatcccaacactttgggaggctgaggcaggcagatcacgaggtcaggagttcgagaccagcctgaccaacatggtgaaaaccccatctctactaaaaatacaaaaattagccgggtgtggtggcacacaccagtaatcccagctactcaggaggctgaagcaggagatttgcttgaacctgggaggcagaggttgcagtgagccaagattgcgccgttgtactccagcctgggcaacagagcaagacccatctcaaaaaaaaaatttttttcctgagaggaagcctgaggttgaccagctctggggtttgtaaggcaggtctgttttctcctaggccctgagttttctgaatctctggttttgctttgttggcaaggagccagggaatcctgacctgagccagaccttaagctctatggttatttagctggccattcaggtataaggcagggtggtgtacctgctggcactatccagatggaggcaccaaacacccacatacctggcccaaccagacttctcccgtgagccaggcaaaggaaattgtcatctgccaactgtcctactcatattcctctcagtccttcttgggggtaagctgattacctgaaggacagctgaacccctggggtagcctcctatccaccactgcttaagtgcctatgggaatgtgggtctgcaccttgtcccctcataggatggtaccaagcatttagtgcacagtggccccatcatagcctgcagcctcatcatttcccatctggacctggtacaaatgcacgtcacaggctcagctcctccccactagcatcttctctaccttcaagaaccaggcagccctgccatgtcacaataggccaggggagtttccaaagatgtgggtggcaaatgcccctatagaaacaccagtacctgaaagcactgtagccctggacctgcctccttccctcggggccatacttctgtttccatctgctgggccaccagccactttagtgacccctgcctacttccttcctgttggatatcatacttccatctggctgcctttgcttaagccatctttgtggtagaggggccctggaattgcagctgtactgaggatgatgttattcacagcccctggcccacccactaatactactgcacagagtcaggatctcacatttcaccccaggctcaactgaggatgtggcttattaaacacggaagtgcaaaaaaaaaaaaaaaaaaaaaaaaaaaaaaaaaaaaaaaaaaaaaaaaaaaaaaaaaaaaaaaaaaaaaaaaaaaaaaaaaaaaaaaaaagggggg

SEQ ID NO: 64033 - DNA, 2033 bp, Homo sapiens
tactcccggagtcactcatcccttaagcaagcagggtggggttaggtgcgcgtgcgcggttttaatactcctccccgaactgccaactcttcacgcacgcgaagtaggccccaccctggctgggtttacgcgtgcgcactaacgggcctggtcccggaagaccacacgcgtgcgtggtggggactacggtgacagtaccccgggtggggcgagggccagtcatggcggagtcctggtctgggcaggccttgcaggctctgccggccacggtgctgggcgcgctgggcagcgagttcttgcgggagtgggaggcgcaggacatgcgcgtgaccctcttcaagctgctgctgctgtggttggtgttaagtctcctgggcatccagctggcgtgggggttctacgggaatacagtgaccgggttgtatcaccgtccaggtctgggtggtcagaatggatccacgcctgatggctccacgcatttcccttcgtgggaaatggcagcaaacgaacctctcaaaacccacagagaataagggaaggcagcagagggtctccaagggcatcactgggtctgctggcttctacactgggttctgctactccccagacctcagggacaactgccgggggttcagggttggtagcagggagtacccagtgcctacagggctgggcctcttctgcctcttaagcctgctccctcacccaggcactgggcaagtgaagagtttgcctgtactcttatctgggtgccttaaggagagagattgtgttcttcctctctcaggggtgataactcaggaagcctctgggttgggaagaccatcagttcttttgtcttaggtttcttttcctgtccctcttccatccccaagatgtgaccccataaaaatttttcctgagttggccaggcatggtggctcacgcctgtaatcccaacactttgggaggctgaggcaggcagatcacgaggtcaggagttcgagaccagcctgaccaacatggtgaaaaccccatctctactaaaaatacaaaaattagccgggtgtggtggcacacaccagtaatcccagctactcaggaggctgaagcaggagatttgcttgaacctgggaggcagaggttgcagtgagccaagattgcgccgttgtactccagcctgggcaacagagcaagacccatctcaaaaaaaaaatttttttcctgagaggaagcctgaggttgaccagctctggggtttgtaaggcaggtctgttttctcctaggccctgagttttctgaatctctggttttgctttgttggcaaggagccagggaatcctgacctgagccagaccttaagctctatggttatttagctggccattcaggtataaggcagggtggtgtacctgctggcactatccagatggaggcaccaaacacccacatacctggcccaaccagacttctcccgtgagccaggcaaaggaaattgtcatctgccaactgtcctactcatattcctctcagtccttcttgggggtaagctgattacctgaaggacagctgaacccctggggtagcctcctatccaccactgcttaagtgcctatgggaatgtgggtctgcaccttgtcccctcataggatggtaccaagcatttagtgcacagtggccccatcatagcctgcagcctcatcatttcccatctggaccttccctcggggccatacttctgtttccatctgctgggccaccagccactttagtgacccctgcctacttccttcctgttggatatcatacttccatctggctgcctttgcttaagccatctttgtggtagaggggccctggaattgcagctgtactgaggatgatgttattcacagcccctggcccacccactaatactactgcacagagtcaggatctcacatttcaccccaggctcaactgaggatgtggcttattaaacacggaagtgcaaaaaaaagattttaggctgggcgtggatgcacaagcctttattccccgcactttggggtacc

SEQ ID NO: 64034 - DNA, 2309 bp, Homo sapiens
tactcccggagtcactcatcccttaagcaagcagggtggggttaggtgcgcgtgcgcggttttaatactcctccccgaactgccaactcttcacgcacgcgaagtaggccccaccctggctgggtttacgcgtgcgcactaacgggcctggtcccggaagaccacacgcgtgcgtggtggggactacggtgacagtaccccgggtggggcgagggccagtcatggcggagtcctggtctgggcaggccttgcaggctctgccggccacggtgctgggcgcgctgggcagcgagttcttgcgggagtgggaggcgcaggacatgcgcgtgaccctcttcaagctgctgctgctgtggttggtgttaagtctcctgggcatccagctggcgtgggggttctacgggaatacagtgaccgggttgtatcaccgtccaggtgaggcttcctacgaacctccgtgggctggccgcccccgcccccaccctctcccgactgtaccattgggttccccactatcctgcaagaggctcatcagaacttaacattggttcacggccttactaccctgaacgcatctgacctcggaagctaagccaggtctgggtggtcagaatggatccacgcctgatggctccacgcatttcccttcgtgggaaatggcagcaaacgaacctctcaaaacccacagagaataagggaaggcagcagagggtctccaagggcatcactgggtctgctggcttctacactgggttctgctactccccagacctcagggacaactgccgggggttcagggttggtagcagggagtacccagtgcctacagggctgggcctcttctgcctcttaagcctgctccctcacccaggcactgggcaagtgaagagtttgcctgtactcttatctgggtgccttaaggagagagattgtgttcttcctctctcaggggtgataactcaggaagcctctgggttgggaagaccatcagttcttttgtcttaggtttcttttcctgtccctcttccatccccaagatgtgaccccataaaaatttttcctgagttggccaggcatggtggctcacgcctgtaatcccaacactttgggaggctgaggcaggcagatcacgaggtcaggagttcgagaccagcctgaccaacatggtgaaaaccccatctctactaaaaatacaaaaattagccgggtgtggtggcacacaccagtaatcccagctactcaggaggctgaagcaggagatttgcttgaacctgggaggcagaggttgcagtgagccaagattgcgccgttgtactccagcctgggcaacagagcaagacccatctcaaaaaaaaaatttttttcctgagaggaagcctgaggttgaccagctctggggtttgtaaggcaggtctgttttctcctaggccctgagttttctgaatctctggttttgctttgttggcaaggagccagggaatcctgacctgagccagaccttaagctctatggttatttagctggccattcaggtataaggcagggtggtgtacctgctggcactatccagatggaggcaccaaacacccacatacctggcccaaccagacttctcccgtgagccaggcaaaggaaattgtcatctgccaactgtcctactcatattcctctcagtccttcttgggggtaagctgattacctgaaggacagctgaacccctggggtagcctcctatccaccactgcttaagtgcctatgggaatgtgggtctgcaccttgtcccctcataggatggtaccaagcatttagtgcacagtggccccatcatagcctgcagcctcatcatttcccatctggacctggtacaaatgcacgtcacaggctcagctcctccccactagcatcttctctaccttcaagaaccaggcagccctgccatgtcacaataggccaggggagtttccaaagatgtgggtggcaaatgcccctatagaaacaccagtacctgaaagcactgtagccctggacctgcctccttccctcggggccatacttctgtttccatctgctgggccaccagccactttagtgacccctgcctacttccttcctgttggatatcatacttccatctggctgcctttgcttaagccatctttgtggtagaggggccctggaattgcagctgtactgaggatgatgttattcacagcccctggcccacccactaatactactgcacagagtcaggatctcacatttcaccccaggctcaactgaggatgtggcttattaaacacggaagtgca

SEQ ID NO: 64035 - DNA, 1809 bp, Homo sapiens
tactcccggagtcactcatcccttaagcaagcagggtggggttaggtgcgcgtgcgcggttttaatactcctccccgaactgccaactcttcacgcacgcgaagtaggccccaccctggctgggtttacgcgtgcgcactaacgggcctggtcccggaagaccacacgcgtgcgtggtggggactacggtgacagtaccccgggtggggcgagggccagtcatggcggagtcctggtctgggcaggccttgcaggctctgccggccacggtgctgggcgcgctgggcagcgagttcttgcgggagtgggaggcgcaggacatgcgcgtgaccctcttcaagctgctgctgctgtggttggtgttaagtctcctgggcatccagctggcgtgggggttctacgggaatacagtgaccgggttgtatcaccgtccaggtctgggtggtcagaatggatccacgcctgatggctccacgcatttcccttcgtgggaaatggcagcaaacgaacctctcaaaacccacagagaataagggaaggcagcagagggtctccaagggcatcactgggtctgctggcttctacactgggttctgctactccccagacctcagggacaactgccgggggttcagggttggtagcagggagtacccagtgcctacagggctgggcctcttctgcctcttaagcctgctccctcacccaggcactgggcaagtgaagagtttgcctgtactcttatctgggtgccttaaggagagagattgtgttcttcctctctcaggggtgataactcaggaagcctctgggttgggaagaccatcagttcttttgtcttaggtttcttttcctgtccctcttccatccccaagatgtgaccccataaaaatttttcctgagttggccaggcatggtggctcacgcctgtaatcccaacactttgggaggctgaggcaggcagatcacgaggtcaggagttcgagaccagcctgaccaacatggtgaaaaccccatctctactaaaaatacaaaaattagccgggtgtggtggcacacaccagtaatcccagctactcaggaggctgaagcaggagatttgcttgaacctgggaggcagaggttgcagtgagccaagattgcgccgttgtactccagcctgggcaacagagcaagacccatctcaaaaaaaaaatttttttcctgagaggaagcctgaggttgaccagctctggggtttgtaaggcaggtctgttttctcctaggccctgagttttctgaatctctggttttgctttgttggcaaggagccagggaatcctgacctgagccagaccttaagctctatggttatttagctggccattcaggtataaggcagggtggtgtacctgctggcactatccagatggaggcaccaaacacccacatacctggcccaaccagacttctcccgtgagccaggcaaaggaaattgtcatctgccaactgtcctactcatattcctctcagtccttcttgggggtaagctgattacctgaaggacagctgaacccctggggtagcctcctatccaccacccactttagtgacccctgcctacttccttcctgttggatatcatacttccatctggctgcctttgcttaagccatctttgtggtagaggggccctggaattgcagctgtactgaggatgatgttattcacagcccctggcccacccactaatactactgcacagagtcaggatctcacatttcaccccaggctcaactgaggatgtggcttattaaacacggaagtgca

SEQ ID NO: 64036 - DNA, 2091 bp, Homo sapiens
tactcccggagtcactcatcccttaagcaagcagggtggggttaggtgcgcgtgcgcggttttaatactcctccccgaactgccaactcttcacgcacgcgaagtaggccccaccctggctgggtttacgcgtgcgcactaacgggcctggtcccggaagaccacacgcgtgcgtggtggggactacggtgacagtaccccgggtggggcgagggccagtcatggcggagtcctggtctgggcaggccttgcaggctctgccggccacggtgctgggcgcgctgggcagcgagttcttgcgggagtgggaggcgcaggacatgcgcgtgaccctcttcaagctgctgctgctgtggttggtgttaagtctcctgggcatccagctggcgtgggggttctacgggaatacagtgaccgggttgtatcaccgtccaggtctgggtggtcagaatggatccacgcctgatggctccacgcatttcccttcgtgagggtctccaagggcatcactgggtctgctggcttctacactgggttctgctactccccagacctcagggacaactgccgggggttcagggttggtagcagggagtacccagtgcctacagggctgggcctcttctgcctcttaagcctgctccctcacccaggcactgggcaagtgaagagtttgcctgtactcttatctgggtgccttaaggagagagattgtgttcttcctctctcaggggtgataactcaggaagcctctgggttgggaagaccatcagttcttttgtcttaggtttcttttcctgtccctcttccatccccaagatgtgaccccataaaaatttttcctgagttggccaggcatggtggctcacgcctgtaatcccaacactttgggaggctgaggcaggcagatcacgaggtcaggagttcgagaccagcctgaccaacatggtgaaaaccccatctctactaaaaatacaaaaattagccgggtgtggtggcacacaccagtaatcccagctactcaggaggctgaagcaggagatttgcttgaacctgggaggcagaggttgcagtgagccaagattgcgccgttgtactccagcctgggcaacagagcaagacccatctcaaaaaaaaaatttttttcctgagaggaagcctgaggttgaccagctctggggtttgtaaggcaggtctgttttctcctaggccctgagttttctgaatctctggttttgctttgttggcaaggagccagggaatcctgacctgagccagaccttaagctctatggttatttagctggccattcaggtataaggcagggtggtgtacctgctggcactatccagatggaggcaccaaacacccacatacctggcccaaccagacttctcccgtgagccaggcaaaggaaattgtcatctgccaactgtcctactcatattcctctcagtccttcttgggggtaagctgattacctgaaggacagctgaacccctggggtagcctcctatccaccactgcttaagtgcctatgggaatgtgggtctgcaccttgtcccctcataggatggtaccaagcatttagtgcacagtggccccatcatagcctgcagcctcatcatttcccatctggacctggtacaaatgcacgtcacaggctcagctcctccccactagcatcttctctaccttcaagaaccaggcagccctgccatgtcacaataggccaggggagtttccaaagatgtgggtggcaaatgcccctatagaaacaccagtacctgaaagcactgtagccctggacctgcctccttccctcggggccatacttctgtttccatctgctgggccaccagccactttagtgacccctgcctacttccttcctgttggatatcatacttccatctggctgcctttgcttaagccatctttgtggtagaggggccctggaattgcagctgtactgaggatgatgttattcacagcccctggcccacccactaatactactgcacagagtcaggatctcacatttcaccccaggctcaactgaggatgtggcttattaaacacggaagtgca

SEQ ID NO: 64037 - DNA, 677 bp, Homo sapiens
gaatggtaacagaagtatggccccgagggaaggaggcaggtccagggctacagtgctttcaggtactggtgtttctataggggcatttgccacccacatctttggaaactcgcctggcctattgtgacatggcagggctgcaccttgtcccctcataggatggtaccaagcatttagtgcacagtggccccatcatagcctgcagcctcatcatttcccatctggacctggtacaaatgcacgtcacaggctcagctcctccccactagcatcttctctaccttcaagaaccaggcagccctgccatgtcacaataggccaggggagtttccaaagatgtgggtggcaaatgcccctatagaaacaccagtacctgaaagcactgtagccctggacctgcctccttccctcggggccatacttctgtttccatctgctgggccaccagccactttagtgacccctgcctacttccttcctgttggatatcatacttccatctggctgcctttgcttaagccatctttgtggtagaggggccctggaattgcagctgtactgaggatgatgttattcacagcccctggcccacccactaatactactgcacagagtcaggatctcacatttcaccccaggctcaactgaggatgtggcttattaaacacggaagtgca

SEQ ID NO: 64038 - DNA, 2147 bp, Homo sapiens
tactcccggagtcactcatcccttaagcaagcagggtggggttaggtgcgcgtgcgcggttttaatactcctccccgaactgccaactcttcacgcacgcgaagtaggccccaccctggctgggtttacgcgtgcgcactaacgggcctggtcccggaagaccacacgcgtgcgtggtggggactacggtgacagtaccccgggtggggcgagggccagtcatggcggagtcctggtctgggcaggccttgcaggctctgccggccacggtgctgggcgcgctgggcagcgagttcttgcgggagtgggaggcgcaggacatgcgcgtgaccctcttcaagctgctgctgctgtggttggtgttaagtctcctgggcatccagctggcgtgggggttctacgggaatacagtgaccgggttgtatcaccgtccaggtctgggtggtcagaatggatccacgcctgatggctccacgcatttcccttcgtgggaaatggcagcaaacgaacctctcaaaacccacagagaataagggaaggcagcagagggtctccaagggcatcactgggtctgctggcttctacactgggttctgctactccccagacctcagggacaactgccgggggttcagggttggtagcagggagtacccagtgcctacagggctgggcctcttctgcctcttaagcctgctccctcacccaggcactgggcaagtgaagagtttgcctgtactcttatctgggtgccttaaggagagagattgtgttcttcctctctcaggggtgataactcaggaagcctctgggttgggaagaccatcagttcttttgtcttaggtttcttttcctgtccctcttccatccccaagatgtgaccccataaaaatttttcctgagttggccaggcatggtggctcacgcctgtaatcccaacactttgggaggctgaggcaggcagatcacgaggtcaggagttcgagaccagcctgaccaacatggtgaaaaccccatctctactaaaaatacaaaaattagccgggtgtggtggcacacaccagtaatcccagctactcaggaggctgaagcaggagatttgcttgaacctgggaggcagaggttgcagtgagccaagattgcgccgttgtactccagcctgggcaacagagcaagacccatctcaaaaaaaaaatttttttcctgagaggaagcctgaggttgaccagctctggggtttgtaaggcaggtctgttttctcctaggccctgagttttctgaatctctggttttgctttgttggcaaggagccagggaatcctgacctgagccagaccttaagctctatggttatttagctggccattcaggtataaggcagggtggtgtacctgctggcactatccagatggaggcaccaaacacccacatacctggcccaaccagacttctcccgtgagccaggcaaaggaaattgtcatctgccaactgtcctactcatattcctctcagtccttcttgggggtaagctgattacctgaaggacagctgaacccctggggtagcctcctatccaccactgcttaagtgcctatgggaatgtgggtctgcaccttgtcccctcataggatggtaccaagcatttagtgcacagtggccccatcatagcctgcagcctcatcatttcccatctggacctggtacaaatgcacgtcacaggctcagctcctccccactagcatcttctctaccttcaagaaccaggcagccctgccatgtcacaataggccaggggagtttccaaagatgtgggtggcaaatgcccctatagaaacaccagtacctgaaagcactgtagccctggacctgcctccttccctcggggccatacttctgtttccatctgctgggccaccagccactttagtgacccctgcctacttccttcctgttggatatcatacttccatctggctgcctttgcttaagccatctttgtggtagaggggccctggaattgcagctgtactgaggatgatgttattcacagcccctggcccacccactaatactactgcacagagtcaggatctcacatttcaccccaggctcaactgaggatgtggcttattaaacacggaagtgca

SEQ ID NO: 64039 - DNA, 2188 bp, Homo sapiens
tactcccggagtcactcatcccttaagcaagcagggtggggttaggtgcgcgtgcgcggttttaatactcctccccgaactgccaactcttcacgcacgcgaagtaggccccaccctggctgggtttacgcgtgcgcactaacgggcctggtcccggaagaccacacgcgtgcgtggtggggactacggtgacagtaccccgggtggggcgagggccagtcatggcggagtcctggtctgggcaggccttgcaggctctgccggccacggtgctgggcgcgctgggcagcgagttcttgcgggagtgggaggcgcaggacatgcgcgtgaccctcttcaagctgctgctgctgtggttggtgttaagtctcctgggcatccagctggcgtgggggttctacgggaatacagtgaccgggttgtatcaccgtccaggtctgggtggtcagaatggatccacgcctgatggctccacgcatttcccttcgtgggaaatggcagcaaacgaacctctcaaaacccacagagaataagggaaggcagcagagggtctccaagggcatcactgggtctgctggcttctacactgggttctgctactccccagacctcagggacaactgccgggggttcagggttggtagcagggagtacccagtgcctacagggctgggcctcttctgcctcttaagcctgctccctcacccaggcactgggcaagtgaagagtttgcctgtactcttatctgggtgccttaaggagagagattgtgttcttcctctctcaggggtgataactcaggaagcctctgggttgggaagaccatcagttcttttgtcttaggtttcttttcctgtccctcttccatccccaagatgtgaccccataaaaatttttcctgagttggccaggcatggtggctcacgcctgtaatcccaacactttgggaggctgaggcaggcagatcacgaggtcaggagttcgagaccagcctgaccaacatggtgaaaaccccatctctactaaaaatacaaaaattagccgggtgtggtggcacacaccagtaatcccagctactcaggaggctgaagcaggagatttgcttgaacctgggaggcagaggttgcagtgagccaagattgcgccgttgtactccagcctgggcaacagagcaagacccatctcaaaaaaaaaatttttttcctgagaggaagcctgaggttgaccagctctggggtttgtaaggcaggtctgttttctcctaggccctgagttttctgaatctctggttttgctttgttggcaaggagccagggaatcctgacctgagccagaccttaagctctatggttatttagctggccattcaggtataaggcagggtggtgtacctgctggcactatccagatggaggcaccaaacacccacatacctggcccaaccagacttctcccgtgagccaggcaaaggaaattgtcatctgccaactgtcctactcatattcctctcagtccttcttgggggtaagctgattacctgaaggacagctgaacccctggggtagcctcctatccaccactgcttaagtgcctatgggaatgtgggtctgcaccttgtcccctcataggatggtaccaagcatttagtgcacagtggccccatcatagcctgcagcctcatcatttcccatctggacctggtacaaatgcacgtcacaggctcagctcctccccactagcatcttctctaccttcaagaaccaggcagccctgccatgtcacaataggccaggggagtttccaaagatgtgggtggcaaatgcccctatagaaacaccagtacctgaaagcactgtagccctggacctgcctccttccctcggggccatacttctgtttccatctgctgggccaccagccactttagtgacccctgcctacttccttcctgttggatatcatacttccatctggctgcctttgcttaagccatctttgtggtagaggggccctggaattgcagctgtactgaggatgatgttattcacagcccctggcccacccactaatactactgcacagagtcaggatctcacatttcaccccaggctcaactgaggatgtggcttattaaacacggaagtgcaaaaaaaaaaaaaaaaaaaaaaaaaaaaaaaaaaaagggggg

SEQ ID NO: 64040 - DNA, 2209 bp, Homo sapiens
tactcccggagtcactcatcccttaagcaagcagggtggggttaggtgcgcgtgcgcggttttaatactcctccccgaactgccaactcttcacgcacgcgaagtaggccccaccctggctgggtttacgcgtgcgcactaacgggcctggtcccggaagaccacacgcgtgcgtggtggggactacggtgacagtaccccgggtggggcgagggccagtcatggcggagtcctggtctgggcaggccttgcaggctctgccggccacggtgctgggcgcgctgggcagcgagttcttgcgggagtgggaggcgcaggacatgcgcgtgaccctcttcaagctgctgctgctgtggttggtgttaagtctcctgggcatccagctggcgtgggggttctacgggaatacagtgaccgggttgtatcaccgtccaggtctgggtggtcagaatggatccacgcctgatggctccacgcatttcccttcgtgggaaatggcagcaaacgaacctctcaaaacccacagagaataagggaaggcagcagagggtctccaagggcatcactgggtctgctggcttctacactgggttctgctactccccagacctcagggacaactgccgggggttcagggttggtagcagggagtacccagtgcctacagggctgggcctcttctgcctcttaagcctgctccctcacccaggcactgggcaagtgaagagtttgcctgtactcttatctgggtgccttaaggagagagattgtgttcttcctctctcaggggtgataactcaggaagcctctgggttgggaagaccatcagttcttttgtcttaggtttcttttcctgtccctcttccatccccaagatgtgaccccataaaaatttttcctgagttggccaggcatggtggctcacgcctgtaatcccaacactttgggaggctgaggcaggcagatcacgaggtcaggagttcgagaccagcctgaccaacatggtgaaaaccccatctctactaaaaatacaaaaattagccgggtgtggtggcacacaccagtaatcccagctactcaggaggctgaagcaggagatttgcttgaacctgggaggcagaggttgcagtgagccaagattgcgccgttgtactccagcctgggcaacagagcaagacccatctcaaaaaaaaaatttttttcctgagaggaagcctgaggttgaccagctctggggtttgtaaggcaggtctgttttctcctaggccctgagttttctgaatctctggttttgctttgttggcaaggagccagggaatcctgacctgagccagaccttaagctctatggttatttagctggccattcaggtataaggcagggtggtgtacctgctggcactatccagatggaggcaccaaacacccacatacctggcccaaccagacttctcccgtgagccaggcaaaggaaattgtcatctgccaactgtcctactcatattcctctcagtccttcttgggggtaagctgattacctgaaggacagctgaacccctggggtagcctcctatccaccactgcttaagtgcctatgggaatgtgggtctgcaccttgtcccctcataggatggtaccaagcatttagtgcacagtggccccatcatagcctgcagcctcatcatttcccatctggacctggtacaaatgcacgtcacaggctcagctcctccccactagcatcttctctaccttcaagaaccaggcagccctgccatgtcacaataggccaggggagtttccaaagatgtgggtggcaaatgcccctatagaaacaccagtacctgaaagcactgtagccctggacctgcctccttccctcggggccatacttctgtttccatctgctgggccaccagccactttagtgacccctgcctacttccttcctgttggatatcatacttccatctggctgcctttgcttaagccatctttgtggtagaggggccctggaattgcagctgtactgaggatgatgttattcacagcccctggcccacccactaatactactgcacagagtcaggatctcacatttcaccccaggctcaactgaggatgtggcttattaaacacggaagtgcaaaaaaaagattttaggctgggcgtggatgcacaagcctttattccccgcactttggggtacc

SEQ ID NO: 64041 - DNA, 2260 bp, Homo sapiens
tactcccggagtcactcatcccttaagcaagcagggtggggttaggtgcgcgtgcgcggttttaatactcctccccgaactgccaactcttcacgcacgcgaagtaggccccaccctggctgggtttacgcgtgcgcactaacgggcctggtcccggaagaccacacgcgtgcgtggtggggactacggtgacagtaccccgggtggggcgagggccagtcatggcggagtcctggtctgggcaggccttgcaggctctgccggccacggtgctgggcgcgctgggcagcgagttcttgcgggagtgggaggcgcaggacatgcgcgtgaccctcttcaagctgctgctgctgtggttggtgttaagtctcctgggcatccagctggcgtgggggttctacgggaatacagtgaccgggttgtatcaccgtccaggaccctcaccagacttcaccaaacaataccagtggtctctaacctgacctgggctgatgcctgctcagattcccaccccagccttctgcagctctggatgtgtttctgcctccgtctgggtggtcagaatggatccacgcctgatggctccacgcatttcccttcgtgggaaatggcagcaaacgaacctctcaaaacccacagagaataagggaaggcagcagagggtctccaagggcatcactgggtctgctggcttctacactgggttctgctactccccagacctcagggacaactgccgggggttcagggttggtagcagggagtacccagtgcctacagggctgggcctcttctgcctcttaagcctgctccctcacccaggcactgggcaagtgaagagtttgcctgtactcttatctgggtgccttaaggagagagattgtgttcttcctctctcaggggtgataactcaggaagcctctgggttgggaagaccatcagttcttttgtcttaggtttcttttcctgtccctcttccatccccaagatgtgaccccataaaaatttttcctgagttggccaggcatggtggctcacgcctgtaatcccaacactttgggaggctgaggcaggcagatcacgaggtcaggagttcgagaccagcctgaccaacatggtgaaaaccccatctctactaaaaatacaaaaattagccgggtgtggtggcacacaccagtaatcccagctactcaggaggctgaagcaggagatttgcttgaacctgggaggcagaggttgcagtgagccaagattgcgccgttgtactccagcctgggcaacagagcaagacccatctcaaaaaaaaaatttttttcctgagaggaagcctgaggttgaccagctctggggtttgtaaggcaggtctgttttctcctaggccctgagttttctgaatctctggttttgctttgttggcaaggagccagggaatcctgacctgagccagaccttaagctctatggttatttagctggccattcaggtataaggcagggtggtgtacctgctggcactatccagatggaggcaccaaacacccacatacctggcccaaccagacttctcccgtgagccaggcaaaggaaattgtcatctgccaactgtcctactcatattcctctcagtccttcttgggggtaagctgattacctgaaggacagctgaacccctggggtagcctcctatccaccactgcttaagtgcctatgggaatgtgggtctgcaccttgtcccctcataggatggtaccaagcatttagtgcacagtggccccatcatagcctgcagcctcatcatttcccatctggacctggtacaaatgcacgtcacaggctcagctcctccccactagcatcttctctaccttcaagaaccaggcagccctgccatgtcacaataggccaggggagtttccaaagatgtgggtggcaaatgcccctatagaaacaccagtacctgaaagcactgtagccctggacctgcctccttccctcggggccatacttctgtttccatctgctgggccaccagccactttagtgacccctgcctacttccttcctgttggatatcatacttccatctggctgcctttgcttaagccatctttgtggtagaggggccctggaattgcagctgtactgaggatgatgttattcacagcccctggcccacccactaatactactgcacagagtcaggatctcacatttcaccccaggctcaactgaggatgtggcttattaaacacggaagtgca

SEQ ID NO: 64042 - DNA, 1846 bp, Homo sapiens
gaatgagtctgcagggagaaggtgctgggcccagggtgggctgtgggagaccagcagagaggtctagattgttatgtgaccttactgagcctagctcagcccccaagaaggagcttgggagagccaatttcagcaactgttctgcccatggaataaccactctctcttctctctctccatcactttcagggaaatggcagcaaacgaacctctcaaaacccacagagaataagggaaggcagcagagggtctccaagggcatcactgggtctgctggcttctacactgggttctgctactccccagacctcagggacaactgccgggggttcagggttggtagcagggagtacccagtgcctacagggctgggcctcttctgcctcttaagcctgctccctcacccaggcactgggcaagtgaagagtttgcctgtactcttatctgggtgccttaaggagagagattgtgttcttcctctctcaggggtgataactcaggaagcctctgggttgggaagaccatcagttcttttgtcttaggtttcttttcctgtccctcttccatccccaagatgtgaccccataaaaatttttcctgagttggccaggcatggtggctcacgcctgtaatcccaacactttgggaggctgaggcaggcagatcacgaggtcaggagttcgagaccagcctgaccaacatggtgaaaaccccatctctactaaaaatacaaaaattagccgggtgtggtggcacacaccagtaatcccagctactcaggaggctgaagcaggagatttgcttgaacctgggaggcagaggttgcagtgagccaagattgcgccgttgtactccagcctgggcaacagagcaagacccatctcaaaaaaaaaatttttttcctgagaggaagcctgaggttgaccagctctggggtttgtaaggcaggtctgttttctcctaggccctgagttttctgaatctctggttttgctttgttggcaaggagccagggaatcctgacctgagccagaccttaagctctatggttatttagctggccattcaggtataaggcagggtggtgtacctgctggcactatccagatggaggcaccaaacacccacatacctggcccaaccagacttctcccgtgagccaggcaaaggaaattgtcatctgccaactgtcctactcatattcctctcagtccttcttgggggtaagctgattacctgaaggacagctgaacccctggggtagcctcctatccaccactgcttaagtgcctatgggaatgtgggtctgcaccttgtcccctcataggatggtaccaagcatttagtgcacagtggccccatcatagcctgcagcctcatcatttcccatctggacctggtacaaatgcacgtcacaggctcagctcctccccactagcatcttctctaccttcaagaaccaggcagccctgccatgtcacaataggccaggggagtttccaaagatgtgggtggcaaatgcccctatagaaacaccagtacctgaaagcactgtagccctggacctgcctccttccctcggggccatacttctgtttccatctgctgggccaccagccactttagtgacccctgcctacttccttcctgttggatatcatacttccatctggctgcctttgcttaagccatctttgtggtagaggggccctggaattgcagctgtactgaggatgatgttattcacagcccctggcccacccactaatactactgcacagagtcaggatctcacatttcaccccaggctcaactgaggatgtggcttattaaacacggaagtgca

SEQ ID NO: 64043 - DNA, 1453 bp, Homo sapiens
tactcccggagtcactcatcccttaagcaagcagggtggggttaggtgcgcgtgcgcggttttaatactcctccccgaactgccaactcttcacgcacgcgaagtaggccccaccctggctgggtttacgcgtgcgcactaacgggcctggtcccggaagaccacacgcgtgcgtggtggggactacggtgacagtaccccgggtggggcgagggccagtcatggcggagtcctggtctgggcaggccttgcaggctctgccggccacggtgctgggcgcgctgggcagcgagttcttgcgggagtgggaggcgcaggacatgcgcgtgaccctcttcaagctgctgctgctgtggttggtgttaagtctcctgggcatccagctggcgtgggggttctacgggaatacagtgaccgggttgtatcaccgtccaggtgaggcttcctacgaacctccgtgggctggccgcccccgcccccaccctctcccgactgtaccattgggttccccactatcctgcaagaggctcatcagaacttaacattggttcacggccttactaccctgaacgcatctgacctcggaagctaagccaggtctgggtggtcagaatggatccacgcctgatggctccacgcatttcccttcgtgtgagtaaatctgtccataccgcaaccccatgcttggcattccaaggacactcctgtgctggtgacagagaggggagttctcaggctttaagcccaccagcttaatggcctttgcagcaagcttcaagtctgcacgtagagctcaggcttcaagttagggtgacaccaaggtctggacagtccatcatcatgctgttcagcagcctgtaggataggtggtggtattgtcataatttcagagagatgaaatgacaggtttgttggattccactccgcacaatcccctcagttgggaaggcagtaatctctgtcctgagcacattgacctcatcagggtcagcctcctcttctgcaaaacatgcgctcactaatcagggcattcattcagataatctctgggcccctatcacgtgataggggccacacgaggcccagagaacaaagacaacccgggccctgctcatggggagccagggatttattaggggagggcggcagtgcatggggcaagggtggtcagggaaggcttctcccaagaaagacacctaagccgagatcaaatgccacagggtgacaaagtgtaccaagcaaagggaatggattgagcaaggctaagagggaagaatacgggtgacatattagaataggtaagactgtgatgctggagcttgaacgtgagagcttgttggaccctgggagccattgaaagactaactcagcaaggctgtggtctgatctaatttgcctttataaatgcctacttcatggcaagtagataaaggggtccaagagttagggctag

SEQ ID NO: 64044 - DNA, 2528 bp, Homo sapiens
  misc_feature (12)..(12): n is a, c, g, or t
agcgggcggcgnaggcgcactgggttcgccgcgccgaactgcagccatggagcaggcacctccggaccccgagcggcagctccagccggcgcccttggagccgctgggctccccagacgctgggctgggggctgcggtcggcaaggaagcggagggggccggagaagagagctctggggtcgacacgatgacacacaataatttttggttgaagaagatagaaatcagtgtttcagaagcagaaaaacgaactggaagaaatgccatgaacatgcaagaaacatatactgcttacctcattgaaacaaggtcagttgaacataccgatggtcagagtgtcctaacagactcactatggcggcgatatagtgaatttgagttgttgagaagctaccttttagtttactatccacatattgttgtgccacctctgccagaaaaacgggcagaatttgtttggcataaactctctgctgacaacatggatccagattttgtggagaggcgacggattggtttagaaaactttctcttgaggattgcttcacatcccatcctttgtagagacaaaatcttctatctgtttttaacacaggaaggtaactggaaggagactgtgaatgaaactgggtttcagctgaaggcagactccaggttaaaagcgcttaatgcaacattcagagtgaaaaacccagacaagagatttactgaccttaagcactatagtgatgaactgcagtctgtcatctcacatcttcttcgagtcagagctagagtagcagatcgactctatggtgtatataaagtacatgggaattatggtcgagttttcagtgaatggagtgccatagaaaaagaaatgggtgatggactgcagagtgctggtcatcatatggatgtgtatgcatcttctattgatgatattttggaagatgaagaacattatgcagatcagttaaaagagtatcttttttatgcagaagcattgcgggctgtgtgcaggaaacatgaacttatgcagtatgacttggagatggctgctcaggacttagcatccaagaagcagcagtgtgaggaactggtaactgggactgtgagaacattctctttgaagggaatgactaccaagctctttggtcaagaaactccagagcagagagaagccagaataaaggtgctagaagaacaaataaatgaaggagaacaacagctaaagtctaaaaatctggaaggcagagaatttgtgaaaaacgcatgggctgatattgaacgcttcaaagaacaaaagaaccgagacttaaaggaggccctcataagctatgcagtcatgcagatcagtatgtgcaaaaagggaattcaagtttggaccaatgctaaggaatgctttagcaagatgtaatcctgtgaattgaatttctcttcaatcaaagtgccccaaaacagaagcacaagtaaataaaagaaatttaagtcactacctagtatacataaacatatacaataagttaaataaattcagctttctttaacttaattgtggtcgtgttaatgtagcacaaaaaatatattttaatgaagattaaatattataatttgaggttttggggactggtgctgattccaaaaagttaatttaataatatataccaacagattgtttgtcacgcttctgaaccaatgactgaatgtcaagatgttcgttaatttctagatgtttgtttcaagaccagctgtttcagatctattaatgtagggaatttttccctaagattgaattcctatatttacttggtaagatccactaatctgttatagggagttgttttctcttgccttatagttgagctatttggtttgacaaagctcagcagaaacttgatgtgaaaaatctacgattttcttctacattcattgatgccccttgtaatgtttgcatacactagaaaatgccttcaatttgtgttttaccagaattttgatactggtcagaaattttatactgccaacaaagaagactcaacttctcagatctataatgggatacattgtcatcctctagcaactcctatatagaaagttttaactgaatatgttacatataagaattaaattcttctcaaataattcttaacctcagtaatgagcctaaatttactctgcttggctctctacacatggcatttcagggtataagatgtagcatttcaatgtgtaagatatatgtactaaacatatgtgttgctatcttcatcattaacatccttcttttctattgcttggctgtaatttttgtaaagataaattatattgtttttttgtatgtgtgtttgtagtatatgttcagaaggcaagcatcttcattttgctagctttgcagaatcttaaaatgtgtactcgttatttctaatgatgtaaaaaaaaatccctagtcctgtttagcatttgacttttttatatgttttaaatgttgctggatttttgtgctgtttgccaaacttatacaataaataaatgaaatattgtgctga

SEQ ID NO: 64045 - DNA, 2173 bp, Homo sapiens
aaagagactaggtcttactttgttgcccaggctggagggtattggtacaatcacagctcactgcagcttcaaccttctgggctcaagcacaccttccacctcagcctcccaagtagctaggactacaggtgcatgccaccacgcctggctaattattttttatttttttgtagaggcagagtgttgctatgttgcccaggtcgatcttggactcctggccttagcaatcctcctgccttggcctcccaaagtgctgggattacaggcatgagccgctgttcccagattgaattaaatttttttttctttttttagagatggggtcttgctgtgtttcccaggctggtctcaaacttctggcctcaagggattctcccatctcaaccccccaaagtgctgggattagcggcgggagccagcacacctggccaacaactgaattaattttattttttccaacttctattataggttcaggggttacatgtgcaggtttgtaaattgcctgacatggggatttggtgtacagatcatttcatcacccagtatgcatcttctattgatgatattttggaagatgaagaacattatgcagatcagttaaaagagtatcttttttatgcagaagcattgcgggctgtgtgcaggaaacatgaacttatgcagtatgacttggagatggctgctcaggacttagcatccaagaagcagcagtgtgaggaactggtaactgggactgtgagaacattctctttgaagggaatgactaccaagctctttggtcaagaaactccagagcagagagaagccagaataaaggtgctagaagaacaaataaatgaaggagaacaacagctaaagtctaaaaatctggaaggcagagaatttgtgaaaaacgcatgggctgatattgaacgcttcaaagaacaaaagaaccgagacttaaaggaggccctcataagctatgcagtcatgcagatcagtatgtgcaaaaagggaattcaagtttggaccaatgctaaggaatgctttagcaagatgtaatcctgtgaattgaatttctcttcaatcaaagtgccccaaaacagaagcacaagtaaataaaagaaatttaagtcactacctagtatacataaacatatacaataagttaaataaattcagctttctttaacttaattgtggtcgtgttaatgtagcacaaaaaatatattttaatgaagattaaatattataatttgaggttttggggactggtgctgattccaaaaagttaatttaataatatataccaacagattgtttgtcacgcttctgaaccaatgactgaatgtcaagatgttcgttaatttctagatgtttgtttcaagaccagctgtttcagatctattaatgtagggaatttttccctaagattgaattcctatatttacttggtaagatccactaatctgttatagggagttgttttctcttgccttatagttgagctatttggtttgacaaagctcagcagaaacttgatgtgaaaaatctacgattttcttctacattcattgatgccccttgtaatgtttgcatacactagaaaatgccttcaatttgtgttttaccagaattttgatactggtcagaaattttatactgccaacaaagaagactcaacttctcagatctataatgggatacattgtcatcctctagcaactcctatatagaaagttttaactgaatatgttacatataagaattaaattcttctcaaataattcttaacctcagtaatgagcctaaatttactctgcttggctctctacacatggcatttcagggtataagatgtagcatttcaatgtgtaagatatatgtactaaacatatgtgttgctatcttcatcattaacatccttcttttctattgcttggctgtaatttttgtaaagataaattatattgtttttttgtatgtgtgtttgtagtatatgttcagaaggcaagcatcttcattttgctagctttgcagaatcttaaaatgtgtactcgttatttctaatgatgtaaaaaaaaatccctagtcctgtttagcatttgacttttttatatgttttaaatgttgctggatttttgtgctgtttgccaaacttatacaataaataaatgaaatattgtgctga

SEQ ID NO: 64046 - DNA, 2531 bp, Homo sapiens
  misc_feature (13)..(13): n is a, c, g, or t
ctagctagtgtanaccggttagagcagtattagtctactaggagctgtggattcgcgagagcatgagcagactcggacgaggagtcagcgcgcccttgtggagccgctgggctccccagacgctgggctgggggctgcggtcggcaaggaagcggagggggccggagaagagagctctggggtcgacacgatgacacacaataatttttggttgaagaagatagaaatcagtgtttcagaagcagaaaaacgaactggaagaaatgccatgaacatgcaagaaacatatactgcttacctcattgaaacaaggtcagttgaacataccgatggtcagagtgtcctaacagactcactatggcggcgatatagtgaatttgagttgttgagaagctaccttttagtttactatccacatattgttgtgccacctctgccagaaaaacgggcagaatttgtttggcataaactctctgctgacaacatggatccagattttgtggagaggcgacggattggtttagaaaactttctcttgaggattgcttcacatcccatcctttgtagagacaaaatcttctatctgtttttaacacaggaaggtaactggaaggagactgtgaatgaaactgggtttcagctgaaggcagactccaggttaaaagcgcttaatgcaacattcagagtgaaaaacccagacaagagatttactgaccttaagcactatagtgatgaactgcagtctgtcatctcacatcttcttcgagtcagagctagagtagcagatcgactctatggtgtatataaagtacatgggaattatggtcgagttttcagtgaatggagtgccatagaaaaagaaatgggtgatggactgcagagtgctggtcatcatatggatgtgtatgcatcttctattgatgatattttggaagatgaagaacattatgcagatcagttaaaagagtatcttttttatgcagaagcattgcgggctgtgtgcaggaaacatgaacttatgcagtatgacttggagatggctgctcaggacttagcatccaagaagcagcagtgtgaggaactggtaactgggactgtgagaacattctctttgaagggaatgactaccaagctctttggtcaagaaactccagagcagagagaagccagaataaaggtgctagaagaacaaataaatgaaggagaacaacagctaaagtctaaaaatctggaaggcagagaatttgtgaaaaacgcatgggctgatattgaacgcttcaaagaacaaaagaaccgagacttaaaggaggccctcataagctatgcagtcatgcagatcagtatgtgcaaaaagggaattcaagtttggaccaatgctaaggaatgctttagcaagatgtaatcctgtgaattgaatttctcttcaatcaaagtgccccaaaacagaagcacaagtaaataaaagaaatttaagtcactacctagtatacataaacatatacaataagttaaataaattcagctttctttaacttaattgtggtcgtgttaatgtagcacaaaaaatatattttaatgaagattaaatattataatttgaggttttggggactggtgctgattccaaaaagttaatttaataatatataccaacagattgtttgtcacgcttctgaaccaatgactgaatgtcaagatgttcgttaatttctagatgtttgtttcaagaccagctgtttcagatctattaatgtagggaatttttccctaagattgaattcctatatttacttggtaagatccactaatctgttatagggagttgttttctcttgccttatagttgagctatttggtttgacaaagctcagcagaaacttgatgtgaaaaatctacgattttcttctacattcattgatgccccttgtaatgtttgcatacactagaaaatgccttcaatttgtgttttaccagaattttgatactggtcagaaattttatactgccaacaaagaagactcaacttctcagatctataatgggatacattgtcatcctctagcaactcctatatagaaagttttaactgaatatgttacatataagaattaaattcttctcaaataattcttaacctcagtaatgagcctaaatttactctgcttggctctctacacatggcatttcagggtataagatgtagcatttcaatgtgtaagatatatgtactaaacatatgtgttgctatcttcatcattaacatccttcttttctattgcttggctgtaatttttgtaaagataaattatattgtttttttgtatgtgtgtttgtagtatatgttcagaaggcaagcatcttcattttgctagctttgcagaatcttaaaatgtgtactcgttatttctaatgatgtaaaaaaaaatccctagtcctgtttagcatttgacttttttatatgttttaaatgttgctggatttttgtgctgtttgccaaacttatacaataaataaatgaaatattgtgctga

SEQ ID NO: 64047 - DNA, 2570 bp, Homo sapiens
  misc_feature (12)..(12): n is a, c, g, or t
  misc_feature (2502)..(2502): n is a, c, g, or t
  misc_feature (2506)..(2506): n is a, c, g, or t
  misc_feature (2514)..(2514): n is a, c, g, or t
  misc_feature (2518)..(2518): n is a, c, g, or t
  misc_feature (2521)..(2521): n is a, c, g, or t
agcgggcggcgnaggcgcactgggttcgccgcgccgaactgcagccatggagcaggcacctccggaccccgagcggcagctccagccggcgcccttggagccgctgggctccccagacgctgggctgggggctgcggtcggcaaggaagcggagggggccggagaagagagctctggggtcgacacgatgacacacaataatttttggttgaagaagatagaaatcagtgtttcagaagcagaaaaacgaactggaagaaatgccatgaacatgcaagaaacatatactgcttacctcattgaaacaaggtcagttgaacataccgatggtcagagtgtcctaacagactcactatggcggcgatatagtgaatttgagttgttgagaagctaccttttagtttactatccacatattgttgtgccacctctgccagaaaaacgggcagaatttgtttggcataaactctctgctgacaacatggatccagattttgtggagaggcgacggattggtttagaaaactttctcttgaggattgcttcacatcccatcctttgtagagacaaaatcttctatctgtttttaacacaggaaggtaactggaaggagactgtgaatgaaactgggtttcagctgaaggcagactccaggttaaaagcgcttaatgcaacattcagagtgaaaaacccagacaagagatttactgaccttaagcactatagtgatgaactgcagtctgtcatctcacatcttcttcgagtcagagctagagtagcagatcgactctatggtgtatataaagtacatgggaattatggtcgagttttcagtgaatggagtgccatagaaaaagaaatgggtgatggactgcagagtgctggtcatcatatggatgtgtatgcatcttctattgatgatattttggaagatgaagaacattatgcagatcagttaaaagagtatcttttttatgcagaagcattgcgggctgtgtgcaggaaacatgaacttatgcagtatgacttggagatggctgctcaggacttagcatccaagaagcagcagtgtgaggaactggtaactgggactgtgagaacattctctttgaagggaatgactaccaagctctttggtcaagaaactccagagcagagagaagccagaataaaggtgctagaagaacaaataaatgaaggagaacaacagctaaagtctaaaaatctggaaggcagagaatttgtgaaaaacgcatgggctgatattgaacgcttcaaagaacaaaagaaccgagacttaaaggaggccctcataagctatgcagtcatgcagatcagtatgtgcaaaaagggaattcaagtttggaccaatgctaaggaatgctttagcaagatgtaatcctgtgaattgaatttctcttcaatcaaagtgccccaaaacagaagcacaagtaaataaaagaaatttaagtcactacctagtatacataaacatatacaataagttaaataaattcagctttctttaacttaattgtggtcgtgttaatgtagcacaaaaaatatattttaatgaagattaaatattataatttgaggttttggggactggtgctgattccaaaaagttaatttaataatatataccaacagattgtttgtcacgcttctgaaccaatgactgaatgtcaagatgttcgttaatttctagatgtttgtttcaagaccagctgtttcagatctattaatgtagggaatttttccctaagattgaattcctatatttacttggtaagatccactaatctgttatagggagttgttttctcttgccttatagttgagctatttggtttgacaaagctcagcagaaacttgatgtgaaaaatctacgattttcttctacattcattgatgccccttgtaatgtttgcatacactagaaaatgccttcaatttgtgttttaccagaattttgatactggtcagaaattttatactgccaacaaagaagactcaacttctcagatctataatgggatacattgtcatcctctagcaactcctatatagaaagttttaactgaatatgttacatataagaattaaattcttctcaaataattcttaacctcagtaatgagcctaaatttactctgcttggctctctacacatggcatttcagggtataagatgtagcatttcaatgtgtaagatatatgtactaaacatatgtgttgctatcttcatcattaacatccttcttttctattgcttggctgtaatttttgtaaagataaattatattgtttttttgtatgtgtgtttgtagtatatgttcagaaggcaagcatcttcattttgctagctttgcagaatcttaaaatgtgtactcgttatttctaatgatgtaaaaaaaaatccctagtcctgtttagcatttgacttttttatatgttttaaatgttgctggatttttgtgctgtttggttatacccatncagnaaataatnccgnttngcggccagcccccccccccttccttgcggagatatctctgactcgatgt

SEQ ID NO: 64048 - DNA, 2350 bp, Homo sapiens
  misc_feature (12)..(12): n is a, c, g, or t
agcgggcggcgnaggcgcactgggttcgccgcgccgaactgcagccatggagcaggcacctccggaccccgagcggcagctccagccggcgcccttggagccgctgggctccccagacgctgggctgggggctgcggtcggcaaggaagcggagggggccggagaagagagctctggggtcgacacggtcagttgaacataccgatggtcagagtgtcctaacagactcactatggcggcgatatagtgaatttgagttgttgagaagctaccttttagtttactatccacatattgttgtgccacctctgccagaaaaacgggcagaatttgtttggcataaactctctgctgacaacatggatccagattttgtggagaggcgacggattggtttagaaaactttctcttgaggattgcttcacatcccatcctttgtagagacaaaatcttctatctgtttttaacacaggaaggtaactggaaggagactgtgaatgaaactgggtttcagctgaaggagatttactgaccttaagcactatagtgatgaactgcagtctgtcatctcacatcttcttcgagtcagagctagagtagcagatcgactctatggtgtatataaagtacatgggaattatggtcgagttttcagtgaatggagtgccatagaaaaagaaatgggtgatggactgcagagtgctggtcatcatatggatgtgtatgcatcttctattgatgatattttggaagatgaagaacattatgcagatcagttaaaagagtatcttttttatgcagaagcattgcgggctgtgtgcaggaaacatgaacttatgcagtatgacttggagatggctgctcaggacttagcatccaagaagcagcagtgtgaggaactggtaactgggactgtgagaacattctctttgaagggaatgactaccaagctctttggtcaagaaactccagagcagagagaagccagaataaaggtgctagaagaacaaataaatgaaggagaacaacagctaaagtctaaaaatctggaaggcagagaatttgtgaaaaacgcatgggctgatattgaacgcttcaaagaacaaaagaaccgagacttaaaggaggccctcataagctatgcagtcatgcagatcagtatgtgcaaaaagggaattcaagtttggaccaatgctaaggaatgctttagcaagatgtaatcctgtgaattgaatttctcttcaatcaaagtgccccaaaacagaagcacaagtaaataaaagaaatttaagtcactacctagtatacataaacatatacaataagttaaataaattcagctttctttaacttaattgtggtcgtgttaatgtagcacaaaaaatatattttaatgaagattaaatattataatttgaggttttggggactggtgctgattccaaaaagttaatttaataatatataccaacagattgtttgtcacgcttctgaaccaatgactgaatgtcaagatgttcgttaatttctagatgtttgtttcaagaccagctgtttcagatctattaatgtagggaatttttccctaagattgaattcctatatttacttggtaagatccactaatctgttatagggagttgttttctcttgccttatagttgagctatttggtttgacaaagctcagcagaaacttgatgtgaaaaatctacgattttcttctacattcattgatgccccttgtaatgtttgcatacactagaaaatgccttcaatttgtgttttaccagaattttgatactggtcagaaattttatactgccaacaaagaagactcaacttctcagatctataatgggatacattgtcatcctctagcaactcctatatagaaagttttaactgaatatgttacatataagaattaaattcttctcaaataattcttaacctcagtaatgagcctaaatttactctgcttggctctctacacatggcatttcagggtataagatgtagcatttcaatgtgtaagatatatgtactaaacatatgtgttgctatcttcatcattaacatccttcttttctattgcttggctgtaatttttgtaaagataaattatattgtttttttgtatgtgtgtttgtagtatatgttcagaaggcaagcatcttcattttgctagctttgcagaatcttaaaatgtgtactcgttatttctaatgatgtaaaaaaaaatccctagtcctgtttagcatttgacttttttatatgttttaaatgttgctggatttttgtgctgtttgccaaacttatacaataaataaatgaaatattgtgctga

SEQ ID NO: 64049 - DNA, 2447 bp, Homo sapiens
gtggtgacatgtgcctgtggtcccagctactcaggaggctgaggtgggaggattgcctgagcccaggaggcgaaggctgcagtaagtggtgattgcaccactgcactccaacctgagcgacagtgggaccctgtcttgaaaaaaaagaaaaatgtatgaaaagttctttacttagtgcctggttcataatcattctgtagttataattttaaaggtgattgtatttatgtgtatgtatttttgtttataaaaaataacaagtgttgttctgttccttttcaggtcagttgaacataccgatggtcagagtgtcctaacagactcactatggcggcgatatagtgaatttgagttgttgagaagctaccttttagtttactatccacatattgttgtgccacctctgccagaaaaacgggcagaatttgtttggcataaactctctgctgacaacatggatccagattttgtggagaggcgacggattggtttagaaaactttctcttgaggattgcttcacatcccatcctttgtagagacaaaatcttctatctgtttttaacacaggaaggtaactggaaggagactgtgaatgaaactgggtttcagctgaaggcagactccaggttaaaagcgcttaatgcaacattcagagtgaaaaacccagacaagagatttactgaccttaagcactatagtgatgaactgcagtctgtcatctcacatcttcttcgagtcagagctagagtagcagatcgactctatggtgtatataaagtacatgggaattatggtcgagttttcagtgaatggagtgccatagaaaaagaaatgggtgatggactgcagagtgctggtcatcatatggatgtgtatgcatcttctattgatgatattttggaagatgaagaacattatgcagatcagttaattatgcagtatgacttggagatggctgctcaggacttagcatccaagaagcagcagtgtgaggaactggtaactgggactgtgagaacattctctttgaagggaatgactaccaagctctttggtcaagaaactccagagcagagagaagccagaataaaggtgctagaagaacaaataaatgaaggagaacaacagctaaagtctaaaaatctggaaggcagagaatttgtgaaaaacgcatgggctgatattgaacgcttcaaagaacaaaagaaccgagacttaaaggaggccctcataagctatgcagtcatgcagatcagtatgtgcaaaaagggaattcaagtttggaccaatgctaaggaatgctttagcaagatgtaatcctgtgaattgaatttctcttcaatcaaagtgccccaaaacagaagcacaagtaaataaaagaaatttaagtcactacctagtatacataaacatatacaataagttaaataaattcagctttctttaacttaattgtggtcgtgttaatgtagcacaaaaaatatattttaatgaagattaaatattataatttgaggttttggggactggtgctgattccaaaaagttaatttaataatatataccaacagattgtttgtcacgcttctgaaccaatgactgaatgtcaagatgttcgttaatttctagatgtttgtttcaagaccagctgtttcagatctattaatgtagggaatttttccctaagattgaattcctatatttacttggtaagatccactaatctgttatagggagttgttttctcttgccttatagttgagctatttggtttgacaaagctcagcagaaacttgatgtgaaaaatctacgattttcttctacattcattgatgccccttgtaatgtttgcatacactagaaaatgccttcaatttgtgttttaccagaattttgatactggtcagaaattttatactgccaacaaagaagactcaacttctcagatctataatgggatacattgtcatcctctagcaactcctatatagaaagttttaactgaatatgttacatataagaattaaattcttctcaaataattcttaacctcagtaatgagcctaaatttactctgcttggctctctacacatggcatttcagggtataagatgtagcatttcaatgtgtaagatatatgtactaaacatatgtgttgctatcttcatcattaacatccttcttttctattgcttggctgtaatttttgtaaagataaattatattgtttttttgtatgtgtgtttgtagtatatgttcagaaggcaagcatcttcattttgctagctttgcagaatcttaaaatgtgtactcgttatttctaatgatgtaaaaaaaaatccctagtcctgtttagcatttgacttttttatatgttttaaatgttgctggatttttgtgctgtttgccaaacttatacaataaataaatgaaatattgtgctga

SEQ ID NO: 64050 - DNA, 544 bp, Homo sapiens
gacgctacttcccctatcatagaagagcttatcacctttcatgatcacgccctcatatcattttccttatctgcttcctagtcctgtatgcccttttcctaacactcacaacaaaactaactaatactaacatctcagacgctcatgaaatagaaaccgtctgaactatcctgatatgccattcttgctgatggcatttcagggtataagatgtagcatttcaatgtgtaagatatatgtactaaacatatgtgttgctatcttcatcattaacatccttcttttctattgcttggctgtaatttttgtaaagataaattatattgtttttttgtatgtgtgtttgtagtatatgttcagaaggcaagcatcttcattttgctagctttgcagaatcttaaaatgtgtactcgttatttctaatgatgtaaaaaaaaatccctagtcctgtttagcatttgacttttttatatgttttaaatgttgctggatttttgtgctgtttgccaaacttatacaataaataaatgaaatattgtgctga

SEQ ID NO: 64051 - DNA, 521 bp, Homo sapiens
gctgacaaagcaagattttttgcgaaactacactccaagccttgcttgtacactgcattcctcaggaggttgtttattgtgttgttgattttctttcccttttgaatatgagatatcagagtaagaaaattctgatcagagttttctgaaaactcttatcagcaagaatggcatttcagggtataagatgtagcatttcaatgtgtaagatatatgtactaaacatatgtgttgctatcttcatcattaacatccttcttttctattgcttggctgtaatttttgtaaagataaattatattgtttttttgtatgtgtgtttgtagtatatgttcagaaggcaagcatcttcattttgctagctttgcagaatcttaaaatgtgtactcgttatttctaatgatgtaaaaaaaaatccctagtcctgtttagcatttgacttttttatatgttttaaatgttgctggatttttgtgctgtttgccaaacttatacaataaataaatgaaatattgtgctga

SEQ ID NO: 64052 - DNA, 1258 bp, Homo sapiens
  misc_feature (12)..(12): n is a, c, g, or t
agcgggcggcgnaggcgcactgggttcgccgcgccgaactgcagccatggagcaggcacctccggaccccgagcggcagctccagccggcgcccttggagccgctgggctccccagacgctgggctgggggctgcggtcggcaaggaagcggagggggccggagaagagagctctggggtcgacacgatgacacacaataatttttggttgaagaagatagaaatcagtgtttcagaagcagaaaaacgaactggaagaaatgccatgaacatgcaagaaacatatactgcttacctcattgaaacaaggtcagttgaacataccgatggtcagagtgtcctaacagactcactatggcggcgatatagtgaatttgagttgttgagaagctaccttttagtttactatccacatattgttgtgccacctctgccagaaaaacgggcagaatttgtttggcataaactctctgctgacaacatggatccagattttgtggagaggcgacggattggtttagaaaactttctcttgaggattgcttcacatcccatcctttgtagagacaaaatcttctatctgtttttaacacaggaaggtaactggaaggagactgtgaatgaaactgggtttcagctgaaggcagactccaggttaaaagcgcttaatgcaacattcagagtgaaaaacccagacaagagatttactgaccttaagcactatagtgatgaactgcagtctgtcatctcacatcttcttcgagtcagagctagagtagcagatcgactctatggtgtatataaagtacatgggaattatggtcgagttttcagtgaatggagtgccatagaaaaagaaatgggtgatggactgcagagtgctggtcatcatatggatgtgtatgcatcttctattgatgatattttggaagatgaagaacattatgcagatcagttaaaagagtatcttttttatgcagaagcattgcgggctgtgtgcaggaaacatgaacttatgcagtatgacttggagatggctgctcaggacttagcatccaagaagcagcagtgtgaggaactggtaactgggactgtgagaacattctctttgaagggaatgactaccaagctctttggtcaagaaactccagagcagagagaagccagaataaaggtgctagaagaacaaataaatgaaggagaacaacagctaaagtctaaaaatctggaaggcagcgtctgggatcctctccgtcca

SEQ ID NO: 64053 - DNA, 2998 bp, Homo sapiens
  misc_feature (12)..(12): n is a, c, g, or t
agcgggcggcgnaggcgcactgggttcgccgcgccgaactgcagccatggagcaggcacctccggaccccgagcggcagctccagccggcgcccttggagccgctgggctccccagacgctgggctgggggctgcggtcggcaaggaagcggagggggccggagaagagagctctggggtcgacacgatgacacacaataatttttggttgaagaagatagaaatcagtgtttcagaagcagaaaaacgaactggaagaaatgccatgaacatgcaagaaacatatactgcttacctcattgaaacaaggtcagttgaacataccgatggtcagagtgtcctaacagactcactatggcggcgatatagtgaatttgagttgttgagaagctaccttttagtttactatccacatattgttgtgccacctctgccagaaaaacgggcagaatttgtttggcataaactctctgctgacaacatggatccagattttgtggagaggcgacggattggtttagaaaactttctcttgaggattgcttcacatcccatcctttgtagagacaaaatcttctatctgtttttaacacaggaaggtaactggaaggagactgtgaatgaaactgggtttcagctgaaggcagactccaggttaaaagcgcttaatgcaacattcagagtgaaaaacccagacaagagatttactgaccttaagcactatagtgatgaactgcagtctgtcatctcacatcttcttcgagtcagagctagagtagcagatcgactctatggtgtatataaagtacatgggaattatggtcgagttttcagtgaatggagtgccatagaaaaagaaatgggtgatggactgcagagtgctggtcatcatatggatgtgtatgcatcttctattgatgatattttggaagatgaagaacattatgcagatcagttaaaagagtatcttttttatgcagaagcattgcgggctgtgtgcaggaaacatgaacttatgcagtatgacttggagatggctgctcaggacttagcatccaagaagcagcagtgtgaggaactggtaactgggactgtgagaacattctctttgaagggaatgactaccaagctctttggtcaagaaactccagagcagagagaagccagaataaaggtgctagaagaacaaataaatgaaggagaacaacagctaaagtctaaaaatctggaaggcagagaatttgtgaaaaacgcatgggctgatattgaacgcttcaaagaacaaaagaaccgagacttaaaggaggccctcataagctatgcagtcatgcagatcagtatgtgcaaaaagggaattcaagtttggaccaatgctaaggaatgctttagcaagatgtaatcctgtgaattgaatttctcttcaatcaaagtgccccaaaacagaagcacaagtaaataaaagaaatttaagtcactacctagtatacataaacatatacaataagttaaataaattcagctttctttaacttaattgtggtcgtgttaatgtagcacaaaaaatatattttaatgaagattaaatattataatttgaggttttggggactggtgctgattccaaaaagttaatttaataatatataccaacagattgtttgtcacgcttctgaaccaatgactgaatgtcaagatgttcgttaatttctagatgtttgtttcaagaccagctgtttcagatctattaatgtagggaatttttccctaagattgaattcctatatttacttggtaagatccactaatctgttatagggagttgttttctcttgccttatagttgagctatttggtttgacaaagctcagcagaaacttgatgtgaaaaatctacgattttcttctacattcattgatgccccttgtaatgtttgcatacactagaaaatgccttcaatttgtgttttaccagaattttgatactggtcagaaattttatactgccaacaaagaagactcaacttctcagatctataatgggatacattgtcatcctctagcaactcctatatagaaagttttaactgaatatgttacatataagaattaaattcttctcaaataattcttaacctcagtaatgagcctaaatttactctgcttggctctctacacatggcatttcagggtataagatgtagcatttcaatgtgtaagatatatgtactaaacatatgtgttgctatcttcatcattaacatccttcttttctattgcttggctgtaatttttgtaaagataaattatattgtttttttgtatgtgtgtttgtagtatatgttcagaaggcaagcatcttcattttgctagctttgcagaatcttaaaatgtgtactcgttatttctaatgatgtaaaaaaaaatccctagtcctgtttagcatttgacttttttatatgttttaaatgttgctggatttttgtgctgtttgccaaacttatacaataaataaatgaaatattgtgctgaaaaaaaaaaaaaaaaaaaaaaaaaaaaaaaaaaaaaaaaaaaaaaaaaaacaaaaaaaaaaaaggaggggggcacccccaaaaattctcccccagggggaccacaaaactagagggcccaccgttttggagcaaaaacagggggacccacaaagaagcaaggccgctatttaaaaaacacgaaacgacaagcgcggcgcgcgcaataaataacaaacaaaggaccagcagtgagaaaaccggtgccaatcatgcggcaaagacactcgtagagacagaccaaacaaacaaaaggtggaagtagcgaccaaatatagtgaggcaaaaacccaagcaaacaagaactatagagcgccaagagaacaccaaaagaaccatcgaaaagcagtcaaccgaagcacccacaagacgaataaaatgacgtgtcaaacggaaccagctgtccaccgaacgcatacatgaaaacataaa

SEQ ID NO: 64054 - DNA, 2501 bp, Homo sapiens
gtggtgacatgtgcctgtggtcccagctactcaggaggctgaggtgggaggattgcctgagcccaggaggcgaaggctgcagtaagtggtgattgcaccactgcactccaacctgagcgacagtgggaccctgtcttgaaaaaaaagaaaaatgtatgaaaagttctttacttagtgcctggttcataatcattctgtagttataattttaaaggtgattgtatttatgtgtatgtatttttgtttataaaaaataacaagtgttgttctgttccttttcaggtcagttgaacataccgatggtcagagtgtcctaacagactcactatggcggcgatatagtgaatttgagttgttgagaagctaccttttagtttactatccacatattgttgtgccacctctgccagaaaaacgggcagaatttgtttggcataaactctctgctgacaacatggatccagattttgtggagaggcgacggattggtttagaaaactttctcttgaggattgcttcacatcccatcctttgtagagacaaaatcttctatctgtttttaacacaggaaggtaactggaaggagactgtgaatgaaactgggtttcagctgaaggcagactccaggttaaaagcgcttaatgcaacattcagagtgaaaaacccagacaagagatttactgaccttaagcactatagtgatgaactgcagtctgtcatctcacatcttcttcgagtcagagctagagtagcagatcgactctatggtgtatataaagtacatgggaattatggtcgagttttcagtgaatggagtgccatagaaaaagaaatgggtgatggactgcagagtgctggtcatcatatggatgtgtatgcatcttctattgatgatattttggaagatgaagaacattatgcagatcagttaaaagagtatcttttttatgcagaagcattgcgggctgtgtgcaggaaacatgaacttatgcagtatgacttggagatggctgctcaggacttagcatccaagaagcagcagtgtgaggaactggtaactgggactgtgagaacattctctttgaagggaatgactaccaagctctttggtcaagaaactccagagcagagagaagccagaataaaggtgctagaagaacaaataaatgaaggagaacaacagctaaagtctaaaaatctggaaggcagagaatttgtgaaaaacgcatgggctgatattgaacgcttcaaagaacaaaagaaccgagacttaaaggaggccctcataagctatgcagtcatgcagatcagtatgtgcaaaaagggaattcaagtttggaccaatgctaaggaatgctttagcaagatgtaatcctgtgaattgaatttctcttcaatcaaagtgccccaaaacagaagcacaagtaaataaaagaaatttaagtcactacctagtatacataaacatatacaataagttaaataaattcagctttctttaacttaattgtggtcgtgttaatgtagcacaaaaaatatattttaatgaagattaaatattataatttgaggttttggggactggtgctgattccaaaaagttaatttaataatatataccaacagattgtttgtcacgcttctgaaccaatgactgaatgtcaagatgttcgttaatttctagatgtttgtttcaagaccagctgtttcagatctattaatgtagggaatttttccctaagattgaattcctatatttacttggtaagatccactaatctgttatagggagttgttttctcttgccttatagttgagctatttggtttgacaaagctcagcagaaacttgatgtgaaaaatctacgattttcttctacattcattgatgccccttgtaatgtttgcatacactagaaaatgccttcaatttgtgttttaccagaattttgatactggtcagaaattttatactgccaacaaagaagactcaacttctcagatctataatgggatacattgtcatcctctagcaactcctatatagaaagttttaactgaatatgttacatataagaattaaattcttctcaaataattcttaacctcagtaatgagcctaaatttactctgcttggctctctacacatggcatttcagggtataagatgtagcatttcaatgtgtaagatatatgtactaaacatatgtgttgctatcttcatcattaacatccttcttttctattgcttggctgtaatttttgtaaagataaattatattgtttttttgtatgtgtgtttgtagtatatgttcagaaggcaagcatcttcattttgctagctttgcagaatcttaaaatgtgtactcgttatttctaatgatgtaaaaaaaaatccctagtcctgtttagcatttgacttttttatatgttttaaatgttgctggatttttgtgctgtttgccaaacttatacaataaataaatgaaatattgtgctga

SEQ ID NO: 64055 - DNA, 2643 bp, Homo sapiens
  misc_feature (12)..(12): n is a, c, g, or t
agcgggcggcgnaggcgcactgggttcgccgcgccgaactgcagccatggagcaggcacctccggaccccgagcggcagctccagccggcgcccttggagccgctgggctccccagacgctgggctgggggctgcggtcggcaaggaagcggagggggccggagaagagagctctggggtcgacacgatgacacacaataatttttggttgaagaagatagaaatcagtgtttcagaagcagaaaaacgaactggaagaaatgccatgaacatgcaagaaacatatactgcttacctcattgaaacaaggtcagttgaacataccgatggtcagagtgtcctaacagactcactatggcggcgatatagtgaatttgagttgttgagaagctaccttttagtttactatccacatattgttgtgccacctctgccagaaaaacgggcagaatttgtttggcataaactctctgctgacaacatggatccagattttgtggagaggcgacggattggtttagaaaactttctcttgaggattgcttcacatcccatcctttgtagagacaaaatcttctatctgtttttaacacaggaaggtaactggaaggagactgtgaatgaaactgggtttcagctgaaggcagactccaggttaaaagcgcttaatgcaacattcagagtgaaaaacccagacaagagatttactgaccttaagcactatagtgatgaactgcagtctgtcatctcacatcttcttcgagtcagagctagagtagcagatcgactctatggtgtatataaagtacatgggaattatggtcgagttttcagtgaatggagtgccatagaaaaagaaatgggtgatggactgcagagtgctggtcatcatatggatgtgtatgcatcttctattgatgatattttggaagatgaagaacattatgcagatcagttaaaagagtatcttttttatgcagaagcattgcgggctgtgtgcaggaaacatgaacttatgcagtatgacttggagatggctgctcaggacttagcatccaagaagcagcagtgtgaggaactggtaactgggactgtgagaacattctctttgaagggaatgactaccaagctctttggtcaagaaactccagagcagagagaagccagaataaaggtgctagaagaacaaataaatgaaggagaacaacagctaaagtctaaaaatctggaaggcagagaatttgtgaaaaacgcatgggctgatattgaacgcttcaaagaacaaaagaaccgagacttaaaggaggccctcataagctatgcagtcatgcagatcagtatgtgcaaaaagagtctcaccctgtcacccaggctggagtgcaatggcatgatctcagctcactacaacctccgcctcccgtgttcaagcaattctacctcatccagccgagtagatgggattacagggaattcaagtttggaccaatgctaaggaatgctttagcaagatgtaatcctgtgaattgaatttctcttcaatcaaagtgccccaaaacagaagcacaagtaaataaaagaaatttaagtcactacctagtatacataaacatatacaataagttaaataaattcagctttctttaacttaattgtggtcgtgttaatgtagcacaaaaaatatattttaatgaagattaaatattataatttgaggttttggggactggtgctgattccaaaaagttaatttaataatatataccaacagattgtttgtcacgcttctgaaccaatgactgaatgtcaagatgttcgttaatttctagatgtttgtttcaagaccagctgtttcagatctattaatgtagggaatttttccctaagattgaattcctatatttacttggtaagatccactaatctgttatagggagttgttttctcttgccttatagttgagctatttggtttgacaaagctcagcagaaacttgatgtgaaaaatctacgattttcttctacattcattgatgccccttgtaatgtttgcatacactagaaaatgccttcaatttgtgttttaccagaattttgatactggtcagaaattttatactgccaacaaagaagactcaacttctcagatctataatgggatacattgtcatcctctagcaactcctatatagaaagttttaactgaatatgttacatataagaattaaattcttctcaaataattcttaacctcagtaatgagcctaaatttactctgcttggctctctacacatggcatttcagggtataagatgtagcatttcaatgtgtaagatatatgtactaaacatatgtgttgctatcttcatcattaacatccttcttttctattgcttggctgtaatttttgtaaagataaattatattgtttttttgtatgtgtgtttgtagtatatgttcagaaggcaagcatcttcattttgctagctttgcagaatcttaaaatgtgtactcgttatttctaatgatgtaaaaaaaaatccctagtcctgtttagcatttgacttttttatatgttttaaatgttgctggatttttgtgctgtttgccaaacttatacaataaataaatgaaatattgtgctga

SEQ ID NO: 64056 - DNA, 2191 bp, Homo sapiens
  misc_feature (12)..(12): n is a, c, g, or t
  misc_feature (1997)..(1997): n is a, c, g, or t
  misc_feature (1999)..(1999): n is a, c, g, or t
  misc_feature (2006)..(2006): n is a, c, g, or t
  misc_feature (2061)..(2061): n is a, c, g, or t
  misc_feature (2106)..(2107): n is a, c, g, or t
  misc_feature (2110)..(2110): n is a, c, g, or t
  misc_feature (2115)..(2115): n is a, c, g, or t
  misc_feature (2125)..(2125): n is a, c, g, or t
  misc_feature (2131)..(2131): n is a, c, g, or t
  misc_feature (2137)..(2137): n is a, c, g, or t
  misc_feature (2146)..(2147): n is a, c, g, or t
  misc_feature (2154)..(2154): n is a, c, g, or t
  misc_feature (2156)..(2156): n is a, c, g, or t
agcgggcggcgnaggcgcactgggttcgccgcgccgaactgcagccatggagcaggcacctccggaccccgagcggcagctccagccggcgcccttggagccgctgggctccccagacgctgggctgggggctgcggtcggcaaggaagcggagggggccggagaagagagctctggggtcgacacgatgacacacaataatttttggttgaagaagatagaaatcagtgtttcagaagcagaaaaacgaactggaagaaatgccatgaacatgcaagaaacatatactgcttacctcattgaaacaaggtcagttgaacataccgatggtcagagtgtcctaacagactcactatggcggcgatatagtgaatttgagttgttgagaagctaccttttagtttactatccacatattgttgtgccacctctgccagaaaaacgggcagaatttgtttggcataaactctctgctgacaacatggatccagattttgtggagaggcgacggattggtttagaaaactttctcttgaggattgcttcacatcccatcctttgtagagacaaaatcttctatctgtttttaacacaggaaggtaactggaaggagactgtgaatgaaactgggtttcagctgaaggcagactccaggttaaaagcgcttaatgcaacattcagagtgaaaaacccagacaagagatttactgaccttaagcactatagtgatgaactgcagtctgtcatctcacatcttcttcgagtcagagctagagtagcagatcgactctatggtgtatataaagtacatgggaattatggtcgagttttcagtgaatggagtgccatagaaaaagaaatgggtgatggactgcagagtgctggtcatcatatggatgtgtatgcatcttctattgatgatattttggaagatgaagaacattatgcagatcagttaaaagagtatcttttttatgcagaagcattgcgggctgtgtgcaggaaacatgaacttatgcagtatgacttggagatggctgctcaggacttagcatccaagaagcagcagtgtgaggaactggtaactgggactgtgagaacattctctttgaagggaatgactaccaagctctttggtcaagaaactccagagcagagagaagccagaataaaggtgctagaagaacaaataaatgaaggagaacaacagctaaagtctaaaaatctggaaggcagagaatttgtgaaaaacgcatgggctgatattgaacgcttcaaagaacaaaagaaccgagacttaaaggaggccctcataagctatgcagtcatgcagatcagtatgtgcaaaaagggaattcaagtttggaccaatgctaaggaatgctttagcaagatgtaatcctgtgaattgaatttctcttcaatcaaagtgccccaaaacagaagcacaagtaaataaaagaaatttaagtcactacctagtatacataaacatatacaataagttaaataaattcagctttctttaacttaattgtggtcgtgttaatgtagcacaaaaaatatattttaatgaagattaaatattataatttgaggttttggggactggtgctgattccaaaaagttaatttaataatatataccaacagattgtttgtcacgcttctgaaccaatgactgaatgtcaagatgttcgttaatttctagatgtttgtttcaagaccagctgtttcagatctattaatgtagggaatttttccctaagattgaattcctatatttacttggtaagatccactaatctgttatagggagttgttttctcttgccttatagttgagctatttggtttgacaaagctcagcagaaacttgatgtgaaaaatctacgattttcttctacattcattgatgccccttgtaatgtttgcatacactagaaaatgccttcaatttgtgttttaccagaattttcagatctattaatgtagggnantttttcnctaagatgaattcctatatttacttggtaagatccactaatctgtatagggagtngttctcttgccttatagtgagctatttggttgacaaaagtcaacnnaantgatntgaaaactanattctntacttnttgtgcctnnatgttgntnctaaaaagctcaatgggttaccaaatgcaccggca

SEQ ID NO: 64057 - DNA, 197 bp, Homo sapiens
ggtccattgtacaagaagaggggtccaaacctactgatggattgtcattattgtgtgctagtggcatagaggtagacccaatagaactcctgccccaaacagggcaacagccaagctcagttcatccaagccccctgaacagaccttccagcatccccatggtgaagctgttgctgtctagagctacttagtgtcag

SEQ ID NO: 64058 - DNA, 827 bp, Homo sapiens
  misc_feature (91)..(91): n is a, c, g, or t
attcaggctgtgtcctgcctagtgctcctagcctggtaccagtcagatagatagttgaagtatctcacctcaggcaaagcaacattgatanattgatgcatgtagtgtctggaggttgcttggcattgcatttgatcaggaataaaaaggaagtttagggagtctgtctcagtaccctgtggctttcactgcaatcaaaatacgatcttgcacaggtcagagccgtgttcaagtttggcaagaaataaggctaattttttataggtataccgtactttccaaattgtgggttatgaaccattaatgcatcatgaaataaatgtagtgggtcacaatcagcattctttttaaaaatgagaagtatatgccatgtagtaacttacatgtaaattttgtttatacacagacaaaatgtgggtgtgtactgggtcctgacatgagacactgttcccattgtcgcggatcagggatagttctttgtggttttagttgttgagttctgtttctttgttattcctttcgtggcagcactacattgtagcgtgctcactaagtgtcagaggtttacctcacgccagttgtgttcatttggctgcaggtaactgaagacccaacctaaggcaaagcagacttctttatttttgtaagacttcattaagagcagtttcagattctcagcaaaattgagaggcatgtacagagatttcccatatatcccctggtcccacacatgcatagcctcctgttatcaacaccccccactagaatggtacgtgtgttgcattgacgaacctgcattgacacatcatgatcacccaaagtccata

SEQ ID NO: 64059 - DNA, 201 bp, Homo sapiens
attctataaaatttttctttagatattcctcacgtataaaacaagagaactagggtagatggccttttagctatgggagtaaattaatttaatgacttccttttagagtgtcctgaattaattgttcaataaatgtagttaactgactagaatattttgttggcagctagcaaagacaatcagtggccaggcatggcggct

SEQ ID NO: 64060 - DNA, 265 bp, Homo sapiens
tttcggacatttttaagtttacaactgaaatttttcatcttaagtttaaataattacaaaagataccgtttcagtgtattttaaatgttcacattttaaaataaaactgctaaatatttctattgtgcaatagtcagaaaatttccatctctttgctgttgaactataatgtatctttattttaatgtaatatatttttgttttaatgacttgtctgctacataaacatgtaaattgaaattaaattatttctgtcactaagaga

SEQ ID NO: 64061 - DNA, 409 bp, Homo sapiens
cagagctatcagcttcccagtttgcacaattcatcaagaaataatgcagggccgctggcacaaatgatgaggcatctcccggaagcttaacttcctatccatcccatctcttggacagacgatgccagttaattacgttgaattttatcttctaggagcagcttgactatctaatctgggtttaccacttctggaagactttttacccacagtgggactctgatatttgtgtaactggaaatggaaatgagatcttctgaatgtggaatgcaaaggagaggatggagtcactctgtcgcccaggctggattgcagcagcacaatctaggctcactgaaacctcagcctcctgggttcaagcaattctcctgcctcagtcaccctacatagtcatcattctgacatcatc

SEQ ID NO: 64062 - DNA, 6595 bp, Homo sapiens
  misc_feature (2398)..(2398): n is a, c, g, or t
tgcttgcactcattttctccactgccaccctgtgaagagttgccttccgccatgattgtaagtttcccgaggtctccccagccatgcagaactatgagtcaatcaaatcccctttctccacgaataaccccgtcttgggtatttcttcatagcagcataggaatggaccaacacacttcctgaatcagaaactcaggggatgaggcccatcaatctgtgtttcaacaagacttccagggactgcgatgtgcactcaagtctgagaactacaccagtaagtgataataaatatgacaacatatttttttgaatgctttaatgaaccttatctattttccttgcaatgccctgggcttcctccaaatgagtaaagaatttctgcaaagtcacttagggttcagcagaatcccaggtgtggccaaagaatgtgcatgggcaggtagaccatcagtaggttagaactcaagtcccatgatggctttgaaaaaaaattgatgttgcttgatctgatctcagcttccagggcacctcttcagggaaggcttccctgagcttcctgggctaaggtagaagctcctgtcacattttcccagaagcattccaaatttctgcttcatcatcacagtgctcatcatactgcaaaaggtctatctgtttaatcatctgcttccttcaccctaagctttttttttttttttttttttttttttgagacggagtctcgctctgttatccaggctggagtgcagtggctccatctccgctcactgcaagctccgcctccttggttcatgccattctcctgcctcagcctcctgagtagctgggactacagccacccgccaccacacccggataattttttgtatttttagtagagacggggtttcaccctgttagccaggatggtctcgatctcctgacctagtgatcctcccgcctcagactcccaaagtgttgggattacaggcatgagccactgcgcctggccaccctaagcttagatgagggcagtgactctggtgattcagaagatgatgttggccacaagaagagaaaacgcacctcttttgatgaccgcctggaggatgatgattttgacctcattgaggagaatttgggtgtcaaagtcaaaagaggacaaaagtaccggcgtgtcaaaaaaatgtcagatgacgaggacgatgacgaggaggaatatggcaaggaggaacatgaaaaagaagctattgcggaagaaatcttccaggatggggaaggggaagaagggcaggaggccatggaggcccccatggctcctccagaggaggaggaagaagatgatgaggagtcagatattgacgacttcattgtggatgatgatggacagcctctgaaaaaacctaagtggcggaaaaagcttcctggatacacagacgcggccctgcaagaagcccaggaaatcttcggtgtggactttgactatgatgaatttgagaaatacaatgagtatgatgaagaactggaggaagagtatgagtatgaggatgatgaggctgagggtgaaatccgagtgcgccccaagaagaccaccaagaagcgtgtgagccgtaggagcatctttgaaatgtatgagcccagtgagctagaaagcagccacctcacagatcaggacaatgaaatccgagccactgacctgcctgagaggttccagctccgctccatcccagtcaagggggctgaagatgatgaactagaagaagaagctgactggatctacaggaatgcttttgccacaccaaccatttctctccaggaaagctgtgattacctagaccgagggcagccagccagcagcttcagtcggaaagggcccagcacaattcagaagatcaaagaggccctgggcttcatgcgaaatcagcattttgaggtgccttttattgccttctatcgaaaggagtatgtggagcctgagttgcacatcaatgacctatggagagtctggcagtgggatgaaaagtggacccagctgcggatccgtaaagagaacctaacacggctgtttgagaagatgcaggcttatcagtatgaacagatctctgctgaccctgacaaacctcttgctgatggcatccgggctctggacaccactgacatggagaggctcaaggatgtccaatcaatggatgagctgaaagatgtctacaaccattttcttctttattatggccgagacatccctaagatgcagaacgccgccaaagctagccgcaagaagctgaagcgtgtcagggaagagggagatgaagaaggtgaaggtgacgaggcagaagatgaggagcagagggggcctgagctcaagcaagcctctcgccgagacatgtacaccatctgccagagtgctgggctagatggnctggccaaaaagtttgggcttactcccgagcagtttggggagaacctgcgggatagctaccagcggcacgagacagagcagtttcccgcggagcccttggagctggccaaggattacgtttgcagccagttccctactccagaagctgtgctagaaggcgcccgctacatggtagccctgcagattgcccgtgagccccttgtccggcaggtgctgaggcaaaccttccaagagagagccaagttaaatataacccccaccaagaaaggtagaaaggatgtggatgaggcccactatgcctattccttcaagtatttaaagaacaagcctgttaaggaactgagagatgaccagtttctcaagatatgcctggctgaagacgaagggctcctcaccactgacatcagcatagatttgaagggagtggaaggctatggcaacgaccagacatattttgaggagataaaacagttttactaccgagatgagttcagccaccaggtgcaggagtggaaccggcagcgcaccatggccatcgaacgggctttacagcagttcctctatgtgcagatggccaaagaactcaagaacaagctgctggctgaagccaaggaatatgtcataaaggcctgtagtcgaaagctctacaattggttgagagtggcaccctaccgaccagatcagcaggtggaagaagatgacgactttatggacgagaaccaagggaagggcattcgagtcctcggcattgctttctcctctgccagagatcaccctgtgttctgcgccctggtcaatggtgaaggagaagtgacagacttccttcgactgccccattttaccaaacggcgaactgcatggagagaggaagagcgggaaaagaaggctcaagacattgaaacgctaaagaaatttctcctgaataagaagcctcatgtagtgacagttgcaggagagaacagggacgcccagatgttgattgaagatgtgaagcgcattgtacatgagctggaccagggccagcagctgtcatctattggggtagagctggttgacaacgagttggccattctctatatgaacagcaagaagtcagaggcagagttccgggattatcctccagtgctgagacaggccgtctccctggcccggcgcatccaggaccctctgattgaatttgcccaggtgtgcagttccgatgaagacatcctgtgtctcaagtttcaccccttgcaggagcatgtggtgaaagaggagctgctcaacgccttgtactgtgaatttatcaaccgagtcaatgaggtcggggtcgatgtcaaccgtgccattgcccacccttacagccaggccttgatccagtatgtttgtggcctgggacctcggaaagggacccacctcctgaagatcctgaagcagaacaacacccggctcgagagccggacccagctggtcaccatgtgccacatgggtcccaaagtcttcatgaattgtgctggcttcctcaagatcgacacggcctccctgggggacagcactgactcatatattgaagtccttgatggttcccgtgtccaccctgagacttatgagtgggctaggaagatggcagtggatgccctggaatacgatgaatcagccgaggatgccaatcctgcaggagcccttgaagaaatcttggaaaacccagagcgactgaaagacctggaccttgatgcctttgcagaagagctggagaggcagggctatggtgacaaacacatcacactctatgacatccgggcagagctgagctgtcgatataaggacctccggacagcctaccgctctcccaacacagaggagatcttcaatatgttaaccaaagaaacaccagagaccttctacattggaaagctcatcatctgcaatgtcactggcattgcccacaggcgtccccagggtgagagctatgaccaggcgatccgcaatgatgagacagggctgtggcagtgccccttctgtcagcaggacaatttccctgaactaagcgaggtgtggaaccactttgacagcggttcgtgcccaggccaggccatcggtgtcaaaacacggctagacaatggtgtcaccggcttcatccccaccaaattcctcagtgacaaagtggtaaagcggccagaagaacgagtgaaggtgggaatgactgttcactgccgcatcatgaagattgacattgagaagttcagtgcagacctgacctgccgcacctcagacctcatggacaggaacaatgagtggaagctgcccaaagacacctactatgactttgatgctgaagctgcagaccacaagcaggaggaggacatgaagcggaagcagcagcggaccacatacatcaagagagtgatcgcacacccatccttccataatatcaatttcaagcaagcagaaaagatgatggagaccatggaccagggtgatgtgattatccgaccaagcagcaagggcgagaaccacctgacagtgacctggaaagtcagtgatggcatctaccagcatgtggatgtgcgggaggagggcaaggaaaatgccttcagcctgggagccactctgtggatcaacagtgaggaattcgaagatttggatgagattgttgctcgctatgtccagcccatggcatcctttgcccgggaccttctgaatcacaagtattatcaggactgcagcggtggggaccgcaagaaattagaggagctgctcatcaaaactaagaaggagaagcccaccttcatcccttatttcatctgtgcctgcaaggaactgcccggcaagttcctactgggataccagccccggggtaaacccaggatagaatatgtaacggtgactccagagggattccggtaccggggccagatcttcccaaccgtgaatggactgtttagatggtttaaggatcactaccaggatcctgtaccaggcatcacccctagcagcagcagcaggacccggacacctgcctctatcaatgctaccccagccaacatcaaccttgcagatctgacacgggctgtgaatgccctgcctcagaacatgacttcacagatgttcagtgccattgctgcggtgacaggccaaggacagaaccctaatgccaccccagcccagtgggcctccagccagtacggctatggcggcagtggaggcggcagcagtgcttaccacgtattcccaacgccagcccagcagccagtggccacaccactaatgacccctagctactcctacacgaccccaagccagcccatcaccacccctcagtaccaccagctccaggccagcaccaccccacagtcggcccaggcccagccccagccctcttccagctcccggcaacggcagcagcagccaaagtccaacagccatgcagccatcgactggggaaaaatggcggagcagtggctgcaggaaaaggaggcagaacggcggaaacagaagcagcggctgacacctcggccctcccccagccccatgatcgaaagcacccccatgtccattgctggcgatgccaccccactcctggacgagatggatcggtagggggcctgctcctcggactctggttacctctgaggctgggaaaggcctggctgcccactgcctccctccctgcccctccttttatgtccataaagtggcgtgaagtgagacgttctctttggtggtcaacccggatgggtgacaggctggatggccttgtgaacttgagctcagtgtatgctaggcaacaattctcccgctccagaccctcaccgaccacctgtcctgggaccaggctgggaggggagtgtggcagggaggaggaagaggaaggtgagaatgagtagaacagttttgtattctactccctacaagccattttgaacttctgccctcaccggactctgggctgtgactggggcaccaaactcagcacatgagtctcccctagctctcgtggggagagggatgctatttattcagtttggggcaggagggagaggagggaaagtatttctgaccctgatgccaacagccgggtggctgtccaagcaggattgcaggggacacagggaagcactgcccagcccctgcctggctgccctttcccccctgctgctgccaccgcttcctgcctgtcatttgaataaacagtgtttctattgaaaaaaaaaaaaa

SEQ ID NO: 64063 - DNA, 675 bp, Homo sapiens
gtcacagtcacactaagggccctttggtggggaatgctttatgacgcagggtcgtacacctgtcccagcccacagaacggcacccccaagagggacccctgatgtaaatgatgggctctgtgtagtaatgagatatccacggttcatcgaccatcattgacaccccactcgaggcagatgctgacgacaggggagactgtgtgcacatggggacagggctctatggaaaccttaaactgctcttataaaaatctatttgaacatagtctattatcaagggggggatctgttatgctaaaaatgttagccactacctttcctatcacagattcacatcaccttcccacatgagaagtatcatataaagtttgacccacaaatagaagagtcctacatggttcccaccttctcccgccctgggatgtgggggcccctgggtgctacttgacccgcgtccccagcacagctgggctagggaaagggcaaggaaaatgccttcagcctgggagccactctgtggatcaacagtgaggaattcgaagatttggatgagattgttgctcgctatgtccagcccatggcatcctttgcccgggaccttctgaatcacaagtattattacagttggccctcttccccagcccaggggatcctcgtagagacgaccgcacagaa

SEQ ID NO: 64064 - DNA, 5504 bp, Homo sapiens
  misc_feature (1307)..(1307): n is a, c, g, or t
gcctggaggatgatgattttctcctcaatgaggtcaaagtcaaaagaggacaaaagtaccggcgtgtcaaaaaaatgtcagatgacgaggacgatgacgaggaggaatatggcaaggaggaacatgaaaaagaagctattgcggaagaaatcttccaggatggggaaggggaagaagggcaggaggccatggaggcccccatggctcctccagaggaggaggaagaagatgatgaggagtcagatattgacgacttcattgtggatgatgatggacagcctctgaaaaaacctaagtggcggaaaaagcttcctggatacacagacgcggccctgcaagaagcccaggaaatcttcggtgtggactttgactatgatgaatttgagaaatacaatgagtatgatgaagaactggaggaagagtatgagtatgaggatgatgaggctgagggtgaaatccgagtgcgccccaagaagaccaccaagaagcgtgtgagccgtaggagcatctttgaaatgtatgagcccagtgagctagaaagcagccacctcacagatcaggacaatgaaatccgagccactgacctgcctgagaggttccagctccgctccatcccagtcaagggggctgaagatgatgaactagaagaagaagctgactggatctacaggaatgcttttgccacaccaaccatttctctccaggaaagctgtgattacctagaccgagggcagccagccagcagcttcagtcggaaagggcccagcacaattcagaagatcaaagaggccctgggcttcatgcgaaatcagcattttgaggtgccttttattgccttctatcgaaaggagtatgtggagcctgagttgcacatcaatgacctatggagagtctggcagtgggatgaaaagtggacccagctgcggatccgtaaagagaacctaacacggctgtttgagaagatgcaggcttatcagtatgaacagatctctgctgaccctgacaaacctcttgctgatggcatccgggctctggacaccactgacatggagaggctcaaggatgtccaatcaatggatgagctgaaagatgtctacaaccattttcttctttattatggccgagacatccctaagatgcagaacgccgccaaagctagccgcaagaagctgaagcgtgtcagggaagagggagatgaagaaggtgaaggtgacgaggcagaagatgaggagcagagggggcctgagctcaagcaagcctctcgccgagacatgtacaccatctgccagagtgctgggctagatggnctggccaaaaagtttgggcttactcccgagcagtttggggagaacctgcgggatagctaccagcggcacgagacagagcagtttcccgcggagcccttggagctggccaaggattacgtttgcagccagttccctactccagaagctgtgctagaaggcgcccgctacatggtagccctgcagattgcccgtgagccccttgtccggcaggtgctgaggcaaaccttccaagagagagccaagttaaatataacccccaccaagaaaggtagaaaggatgtggatgaggcccactatgcctattccttcaagtatttaaagaacaagcctgttaaggaactgagagatgaccagtttctcaagatatgcctggctgaagacgaagggctcctcaccactgacatcagcatagatttgaagggagtggaaggctatggcaacgaccagacatattttgaggagataaaacagttttactaccgagatgagttcagccaccaggtgcaggagtggaaccggcagcgcaccatggccatcgaacgggctttacagcagttcctctatgtgcagatggccaaagaactcaagaacaagctgctggctgaagccaaggaatatgtcataaaggcctgtagtcgaaagctctacaattggttgagagtggcaccctaccgaccagatcagcaggtggaagaagatgacgactttatggacgagaaccaagggaagggcattcgagtcctcggcattgctttctcctctgccagagatcaccctgtgttctgcgccctggtcaatggtgaaggagaagtgacagacttccttcgactgccccattttaccaaacggcgaactgcatggagagaggaagagcgggaaaagaaggctcaagacattgaaacgctaaagaaatttctcctgaataagaagcctcatgtagtgacagttgcaggagagaacagggacgcccagatgttgattgaagatgtgaagcgcattgtacatgagctggaccagggccagcagctgtcatctattggggtagagctggttgacaacgagttggccattctctatatgaacagcaagaagtcagaggcagagttccgggattatcctccagtgctgagacaggccgtctccctggcccggcgcatccaggaccctctgattgaatttgcccaggtgtgcagttccgatgaagacatcctgtgtctcaagtttcaccccttgcaggagcatgtggtgaaagaggagctgctcaacgccttgtactgtgaatttatcaaccgagtcaatgaggtcggggtcgatgtcaaccgtgccattgcccacccttacagccaggccttgatccagtatgtttgtggcctgggacctcggaaagggacccacctcctgaagatcctgaagcagaacaacacccggctcgagagccggacccagctggtcaccatgtgccacatgggtcccaaagtcttcatgaattgtgctggcttcctcaagatcgacacggcctccctgggggacagcactgactcatatattgaagtccttgatggttcccgtgtccaccctgagacttatgagtgggctaggaagatggcagtggatgccctggaatacgatgaatcagccgaggatgccaatcctgcaggagcccttgaagaaatcttggaaaacccagagcgactgaaagacctggaccttgatgcctttgcagaagagctggagaggcagggctatggtgacaaacacatcacactctatgacatccgggcagagctgagctgtcgatataaggacctccggacagcctaccgctctcccaacacagaggagatcttcaatatgttaaccaaagaaacaccagagaccttctacattggaaagctcatcatctgcaatgtcactggcattgcccacaggcgtccccagggtgagagctatgaccaggcgatccgcaatgatgagacagggctgtggcagtgccccttctgtcagcaggacaatttccctgaactaagcgaggtgtggaaccactttgacagcggttcgtgcccaggccaggccatcggtgtcaaaacacggctagacaatggtgtcaccggcttcatccccaccaaattcctcagtgacaaagtggtaaagcggccagaagaacgagtgaaggtgggaatgactgttcactgccgcatcatgaagattgacattgagaagttcagtgcagacctgacctgccgcacctcagacctcatggacaggaacaatgagtggaagctgcccaaagacacctactatgactttgatgctgaagctgcagaccacaagcaggaggaggacatgaagcggaagcagcagcggaccacatacatcaagagagtgatcgcacacccatccttccataatatcaatttcaagcaagcagaaaagatgatggagaccatggaccagggtgatgtgattatccgaccaagcagcaagggcgagaaccacctgacagtgacctggaaagtcagtgatggcatctaccagcatgtggatgtgcgggaggagggcaaggaaaatgccttcagcctgggagccactctgtggatcaacagtgaggaattcgaagatttggatgagattgttgctcgctatgtccagcccatggcatcctttgcccgggaccttctgaatcacaagtattatcaggactgcagcggtggggaccgcaagaaattagaggagctgctcatcaaaactaagaaggagaagcccaccttcatcccttatttcatctgtgcctgcaaggaactgcccggcaagttcctactgggataccagccccggggtaaacccaggatagaatatgtaacggtgactccagagggattccggtaccggggccagatcttcccaaccgtgaatggactgtttagatggtttaaggatcactaccaggatcctgtaccaggcatcacccctagcagcagcagcaggacccggacacctgcctctatcaatgctaccccagccaacatcaaccttgcagatctgacacgggctgtgaatgccctgcctcagaacatgacttcacagatgttcagtgccattgctgcggtgacaggccaaggacagaaccctaatgccaccccagcccagtgggcctccagccagtacggctatggcggcagtggaggcggcagcagtgcttaccacgtattcccaacgccagcccagcagccagtggccacaccactaatgacccctagctactcctacacgaccccaagccagcccatcaccacccctcagtaccaccagctccaggccagcaccaccccacagtcggcccaggcccagccccagccctcttccagctcccggcaacggcagcagcagccaaagtccaacagccatgcagccatcgactggggaaaaatggcggagcagtggctgcaggaaaaggaggcagaacggcggaaacagaagcagcggctgacacctcggccctcccccagccccatgatcgaaagcacccccatgtccattgctggcgatgccaccccactcctggacgagatggatcggtagggggcctgctcctcggactctggttacctctgaggctgggaaaggcctggctgcccactgcctccctccctgcccctccttttatgtccataaagtggcgtgaagtgagacgttctctttggtggtcaacccggatgggtgacaggctggatggccttgtgaacttgagctcagtgtatgctaggcaacaattctcccgctccagaccctcaccgaccacctgtcctgggaccaggctgggaggggagtgtggcagggaggaggaagaggaaggtgagaatgagtagaacagttttgtattctactccctacaagccattttgaacttctgccctcaccggactctgggctgtgactggggcaccaaactcagcacatgagtctcccctagctctcgtggggagagggatgctatttattcagtttggggcaggagggagaggagggaaagtatttctgaccctgatgccaacagccgggtggctgtccaagcaggattgcaggggacacagggaagcactgcccagcccctgcctggctgccctttcccccctgctgctgccaccgcttcctgcctgtcatttgaataaacagtgtttctattgaaaaaaaaaaaaa

SEQ ID NO: 64065 - DNA, 5921 bp, Homo sapiens
  misc_feature (1724)..(1724): n is a, c, g, or t
ccgggcttgccaggtctctccaccttccggattcaagagattctcctgcctcagcctcctgagtagcctggcttttgccttctttttgaaattatcttcaggcagagtgagaagctgcagcaatgtctgattttgtggaaagcgaggctgaggagtcagaggaagaatacaatgatgaaggcgaggtggtaccccgagtcaccaagaaatttgtggaagaggaggatgatgatgaggaggaggaggaggagaacctagatgatcaggatgagcaaggcaacttgaaaggctttatcaatgacgatgatgatgaagatgaaggggaggaggatgagggcagtgactctggtgattcagaagatgatgttggccacaagaagagaaaacgcacctcttttgatgaccgcctggaggatgatgattttgacctcattgaggagaatttgggtgtcaaagtcaaaagaggacaaaagtaccggcgtgtcaaaaaaatgtcagatgacgaggacgatgacgaggaggaatatggcaaggaggaacatgaaaaagaagctattgcggaagaaatcttccaggatggggaaggggaagaagggcaggaggccatggaggcccccatggctcctccagaggaggaggaagaagatgatgaggagtcagatattgacgacttcattgtggatgatgatggacagcctctgaaaaaacctaagtggcggaaaaagcttcctggatacacagacgcggccctgcaagaagcccaggaaatcttcggtgtggactttgactatgatgaatttgagaaatacaatgagtatgatgaagaactggaggaagagtatgagtatgaggatgatgaggctgagggtgaaatccgagtgcgccccaagaagaccaccaagaagcgtgtgagccgtaggagcatctttgaaatgtatgagcccagtgagctagaaagcagccacctcacagatcaggacaatgaaatccgagccactgacctgcctgagaggttccagctccgctccatcccagtcaagggggctgaagatgatgaactagaagaagaagctgactggatctacaggaatgcttttgccacaccaaccatttctctccaggaaagctgtgattacctagaccgagggcagccagccagcagcttcagtcggaaagggcccagcacaattcagaagatcaaagaggccctgggcttcatgcgaaatcagcattttgaggtgccttttattgccttctatcgaaaggagtatgtggagcctgagttgcacatcaatgacctatggagagtctggcagtgggatgaaaagtggacccagctgcggatccgtaaagagaacctaacacggctgtttgagaagatgcaggcttatcagtatgaacagatctctgctgaccctgacaaacctcttgctgatggcatccgggctctggacaccactgacatggagaggctcaaggatgtccaatcaatggatgagctgaaagatgtctacaaccattttcttctttattatggccgagacatccctaagatgcagaacgccgccaaagctagccgcaagaagctgaagcgtgtcagggaagagggagatgaagaaggtgaaggtgacgaggcagaagatgaggagcagagggggcctgagctcaagcaagcctctcgccgagacatgtacaccatctgccagagtgctgggctagatggnctggccaaaaagtttgggcttactcccgagcagtttggggagaacctgcgggatagctaccagcggcacgagacagagcagtttcccgcggagcccttggagctggccaaggattacgtttgcagccagttccctactccagaagctgtgctagaaggcgcccgctacatggtagccctgcagattgcccgtgagccccttgtccggcaggtgctgaggcaaaccttccaagagagagccaagttaaatataacccccaccaagaaaggtagaaaggatgtggatgaggcccactatgcctattccttcaagtatttaaagaacaagcctgttaaggaactgagagatgaccagtttctcaagatatgcctggctgaagacgaagggctcctcaccactgacatcagcatagatttgaagggagtggaaggctatggcaacgaccagacatattttgaggagataaaacagttttactaccgagatgagttcagccaccaggtgcaggagtggaaccggcagcgcaccatggccatcgaacgggctttacagcagttcctctatgtgcagatggccaaagaactcaagaacaagctgctggctgaagccaaggaatatgtcataaaggcctgtagtcgaaagctctacaattggttgagagtggcaccctaccgaccagatcagcaggtggaagaagatgacgactttatggacgagaaccaagggaagggcattcgagtcctcggcattgctttctcctctgccagagatcaccctgtgttctgcgccctggtcaatggtgaaggagaagtgacagacttccttcgactgccccattttaccaaacggcgaactgcatggagagaggaagagcgggaaaagaaggctcaagacattgaaacgctaaagaaatttctcctgaataagaagcctcatgtagtgacagttgcaggagagaacagggacgcccagatgttgattgaagatgtgaagcgcattgtacatgagctggaccagggccagcagctgtcatctattggggtagagctggttgacaacgagttggccattctctatatgaacagcaagaagtcagaggcagagttccgggattatcctccagtgctgagacaggccgtctccctggcccggcgcatccaggaccctctgattgaatttgcccaggtgtgcagttccgatgaagacatcctgtgtctcaagtttcaccccttgcaggagcatgtggtgaaagaggagctgctcaacgccttgtactgtgaatttatcaaccgagtcaatgaggtcggggtcgatgtcaaccgtgccattgcccacccttacagccaggccttgatccagtatgtttgtggcctgggacctcggaaagggacccacctcctgaagatcctgaagcagaacaacacccggctcgagagccggacccagctggtcaccatgtgccacatgggtcccaaagtcttcatgaattgtgctggcttcctcaagatcgacacggcctccctgggggacagcactgactcatatattgaagtccttgatggttcccgtgtccaccctgagacttatgagtgggctaggaagatggcagtggatgccctggaatacgatgaatcagccgaggatgccaatcctgcaggagcccttgaagaaatcttggaaaacccagagcgactgaaagacctggaccttgatgcctttgcagaagagctggagaggcagggctatggtgacaaacacatcacactctatgacatccgggcagagctgagctgtcgatataaggacctccggacagcctaccgctctcccaacacagaggagatcttcaatatgttaaccaaagaaacaccagagaccttctacattggaaagctcatcatctgcaatgtcactggcattgcccacaggcgtccccagggtgagagctatgaccaggcgatccgcaatgatgagacagggctgtggcagtgccccttctgtcagcaggacaatttccctgaactaagcgaggtgtggaaccactttgacagcggttcgtgcccaggccaggccatcggtgtcaaaacacggctagacaatggtgtcaccggcttcatccccaccaaattcctcagtgacaaagtggtaaagcggccagaagaacgagtgaaggtgggaatgactgttcactgccgcatcatgaagattgacattgagaagttcagtgcagacctgacctgccgcacctcagacctcatggacaggaacaatgagtggaagctgcccaaagacacctactatgactttgatgctgaagctgcagaccacaagcaggaggaggacatgaagcggaagcagcagcggaccacatacatcaagagagtgatcgcacacccatccttccataatatcaatttcaagcaagcagaaaagatgatggagaccatggaccagggtgatgtgattatccgaccaagcagcaagggcgagaaccacctgacagtgacctggaaagtcagtgatggcatctaccagcatgtggatgtgcgggaggagggcaaggaaaatgccttcagcctgggagccactctgtggatcaacagtgaggaattcgaagatttggatgagattgttgctcgctatgtccagcccatggcatcctttgcccgggaccttctgaatcacaagtattatcaggactgcagcggtggggaccgcaagaaattagaggagctgctcatcaaaactaagaaggagaagcccaccttcatcccttatttcatctgtgcctgcaaggaactgcccggcaagttcctactgggataccagccccggggtaaacccaggatagaatatgtaacggtgactccagagggattccggtaccggggccagatcttcccaaccgtgaatggactgtttagatggtttaaggatcactaccaggatcctgtaccaggcatcacccctagcagcagcagcaggacccggacacctgcctctatcaatgctaccccagccaacatcaaccttgcagatctgacacgggctgtgaatgccctgcctcagaacatgacttcacagatgttcagtgccattgctgcggtgacaggccaaggacagaaccctaatgccaccccagcccagtgggcctccagccagtacggctatggcggcagtggaggcggcagcagtgcttaccacgtattcccaacgccagcccagcagccagtggccacaccactaatgacccctagctactcctacacgaccccaagccagcccatcaccacccctcagtaccaccagctccaggccagcaccaccccacagtcggcccaggcccagccccagccctcttccagctcccggcaacggcagcagcagccaaagtccaacagccatgcagccatcgactggggaaaaatggcggagcagtggctgcaggaaaaggaggcagaacggcggaaacagaagcagcggctgacacctcggccctcccccagccccatgatcgaaagcacccccatgtccattgctggcgatgccaccccactcctggacgagatggatcggtagggggcctgctcctcggactctggttacctctgaggctgggaaaggcctggctgcccactgcctccctccctgcccctccttttatgtccataaagtggcgtgaagtgagacgttctctttggtggtcaacccggatgggtgacaggctggatggccttgtgaacttgagctcagtgtatgctaggcaacaattctcccgctccagaccctcaccgaccacctgtcctgggaccaggctgggaggggagtgtggcagggaggaggaagaggaaggtgagaatgagtagaacagttttgtattctactccctacaagccattttgaacttctgccctcaccggactctgggctgtgactggggcaccaaactcagcacatgagtctcccctagctctcgtggggagagggatgctatttattcagtttggggcaggagggagaggagggaaagtatttctgaccctgatgccaacagccgggtggctgtccaagcaggattgcaggggacacagggaagcactgcccagcccctgcctggctgccctttcccccctgctgctgccaccgcttcctgcctgtcatttgaataaacagtgtttctattgaaaaaaaaaaaaa

SEQ ID NO: 64066 - DNA, 3558 bp, Homo sapiens
tgacgagtcctggaccttgatgcctttgcagaagagctggagaggcagggctatggtgacaaacacatcacactctatgacatccgggcagagctgagctgtcgatataaggacctccggacagcctaccgctctcccaacacagaggagatcttcaatggtgaaggagaagtgacagacttccttcgactgccccattttaccaaacggcgaactgcatggagagaggaagagcgggaaaagaaggctcaagacattgaaacgctaaagaaatttctcctgaataagaagcctcatgtagtgacagttgcaggagagaacagggacgcccagatgttgattgaagatgtgaagcgcattgtacatgagctggaccagggccagcagctgtcatctattggggtagagctggttgacaacgagttggccattctctatatgaacagcaagaagtcagaggcagagttccgggattatcctccagtgctgagacaggccgtctccctggcccggcgcatccaggaccctctgattgaatttgcccaggtgtgcagttccgatgaagacatcctgtgtctcaagtttcaccccttgcaggagcatgtggtgaaagaggagctgctcaacgccttgtactgtgaatttatcaaccgagtcaatgaggtcggggtcgatgtcaaccgtgccattgcccacccttacagccaggccttgatccagtatgtttgtggcctgggacctcggaaagggacccacctcctgaagatcctgaagcagaacaacacccggctcgagagccggacccagctggtcaccatgtgccacatgggtcccaaagtcttcatgaattgtgctggcttcctcaagatcgacacggcctccctgggggacagcactgactcatatattgaagtccttgatggttcccgtgtccaccctgagacttatgagtgggctaggaagatggcagtggatgccctggaatacgatgaatcagccgaggatgccaatcctgcaggagcccttgaagaaatcttggaaaacccagagcgactgaaagacctggaccttgatgcctttgcagaagagctggagaggcagggctatggtgacaaacacatcacactctatgacatccgggcagagctgagctgtcgatataaggacctccggacagcctaccgctctcccaacacagaggagatcttcaatatgttaaccaaagaaacaccagagaccttctacattggaaagctcatcatctgcaatgtcactggcattgcccacaggcgtccccagggtgagagctatgaccaggcgatccgcaatgatgagacagggctgtggcagtgccccttctgtcagcaggacaatttccctgaactaagcgaggtgtggaaccactttgacagcggttcgtgcccaggccaggccatcggtgtcaaaacacggctagacaatggtgtcaccggcttcatccccaccaaattcctcagtgacaaagtggtaaagcggccagaagaacgagtgaaggtgggaatgactgttcactgccgcatcatgaagattgacattgagaagttcagtgcagacctgacctgccgcacctcagacctcatggacaggaacaatgagtggaagctgcccaaagacacctactatgactttgatgctgaagctgcagaccacaagcaggaggaggacatgaagcggaagcagcagcggaccacatacatcaagagagtgatcgcacacccatccttccataatatcaatttcaagcaagcagaaaagatgatggagaccatggaccagggtgatgtgattatccgaccaagcagcaagggcgagaaccacctgacagtgacctggaaagtcagtgatggcatctaccagcatgtggatgtgcgggaggagggcaaggaaaatgccttcagcctgggagccactctgtggatcaacagtgaggaattcgaagatttggatgagattgttgctcgctatgtccagcccatggcatcctttgcccgggaccttctgaatcacaagtattatcaggactgcagcggtggggaccgcaagaaattagaggagctgctcatcaaaactaagaaggagaagcccaccttcatcccttatttcatctgtgcctgcaaggaactgcccggcaagttcctactgggataccagccccggggtaaacccaggatagaatatgtaacggtgactccagagggattccggtaccggggccagatcttcccaaccgtgaatggactgtttagatggtttaaggatcactaccaggatcctgtaccaggcatcacccctagcagcagcagcaggacccggacacctgcctctatcaatgctaccccagccaacatcaaccttgcagatctgacacgggctgtgaatgccctgcctcagaacatgacttcacagatgttcagtgccattgctgcggtgacaggccaaggacagaaccctaatgccaccccagcccagtgggcctccagccagtacggctatggcggcagtggaggcggcagcagtgcttaccacgtattcccaacgccagcccagcagccagtggccacaccactaatgacccctagctactcctacacgaccccaagccagcccatcaccacccctcagtaccaccagctccaggccagcaccaccccacagtcggcccaggcccagccccagccctcttccagctcccggcaacggcagcagcagccaaagtccaacagccatgcagccatcgactggggaaaaatggcggagcagtggctgcaggaaaaggaggcagaacggcggaaacagaagcagcggctgacacctcggccctcccccagccccatgatcgaaagcacccccatgtccattgctggcgatgccaccccactcctggacgagatggatcggtagggggcctgctcctcggactctggttacctctgaggctgggaaaggcctggctgcccactgcctccctccctgcccctccttttatgtccataaagtggcgtgaagtgagacgttctctttggtggtcaacccggatgggtgacaggctggatggccttgtgaacttgagctcagtgtatgctaggcaacaattctcccgctccagaccctcaccgaccacctgtcctgggaccaggctgggaggggagtgtggcagggaggaggaagaggaaggtgagaatgagtagaacagttttgtattctactccctacaagccattttgaacttctgccctcaccggactctgggctgtgactggggcaccaaactcagcacatgagtctcccctagctctcgtggggagagggatgctatttattcagtttggggcaggagggagaggagggaaagtatttctgaccctgatgccaacagccgggtggctgtccaagcaggattgcaggggacacagggaagcactgcccagcccctgcctggctgccctttcccccctgctgctgccaccgcttcctgcctgtcatttgaataaacagtgtttctattgaaaaaaaaaaaaa

SEQ ID NO: 64067 - DNA, 3255 bp, Homo sapiens
gaaataggcttcaagttctaaaacttcattttccactcagctttgctgtaacactccacgaataacataggtccatgtgagtgcacgggcaagaccagcctgggaaggctttatgggggaaaatagctatcagcaaattttcaaaggtttttttcccctttcttgatttatcttattatgagactcatataagttcatcatataaaattcaacatatagaaatattatgcagaaagtggaagtcccccataatcccaccccccagagataactaccataacaattttatgtatactacagtttttctaaattttatttttgctatgcatttactaactacccatttactacaaaaatgggatcatatggttcatagtgtttttgcagtgcatttttcacgtatcaatatattgtggccatctttccatgtcagcacacatagatctacctcattcttgttaatggctgtatagtattccattgtatggaggtgccctaatttatttaaccagttccccattggtggacatttgggttgttactagaagcttatcgttctatatcctgttccttttctgcctttcctccagcactgactcatatattgaagtccttgatggttcccgtgtccaccctgagacttatgagtgggctaggaagatggcagtggatgccctggaatacgatgaatcagccgaggatgccaatcctgcaggagcccttgaagaaatcttggaaaacccagagcgactgaaagacctggaccttgatgcctttgcagaagagctggagaggcagggctatggtgacaaacacatcacactctatgacatccgggcagagctgagctgtcgatataaggacctccggacagcctaccgctctcccaacacagaggagatcttcaatatgttaaccaaagaaacaccagagaccttctacattggaaagctcatcatctgcaatgtcactggcattgcccacaggcgtccccagggtgagagctatgaccaggcgatccgcaatgatgagacagggctgtggcagtgccccttctgtcagcaggacaatttccctgaactaagcgaggtgtggaaccactttgacagcggttcgtgcccaggccaggccatcggtgtcaaaacacggctagacaatggtgtcaccggcttcatccccaccaaattcctcagtgacaaagtggtaaagcggccagaagaacgagtgaaggtgggaatgactgttcactgccgcatcatgaagattgacattgagaagttcagtgcagacctgacctgccgcacctcagacctcatggacaggaacaatgagtggaagctgcccaaagacacctactatgactttgatgctgaagctgcagaccacaagcaggaggaggacatgaagcggaagcagcagcggaccacatacatcaagagagtgatcgcacacccatccttccataatatcaatttcaagcaagcagaaaagatgatggagaccatggaccagggtgatgtgattatccgaccaagcagcaagggcgagaaccacctgacagtgacctggaaagtcagtgatggcatctaccagcatgtggatgtgcgggaggagggcaaggaaaatgccttcagcctgggagccactctgtggatcaacagtgaggaattcgaagatttggatgagattgttgctcgctatgtccagcccatggcatcctttgcccgggaccttctgaatcacaagtattatcaggactgcagcggtggggaccgcaagaaattagaggagctgctcatcaaaactaagaaggagaagcccaccttcatcccttatttcatctgtgcctgcaaggaactgcccggcaagttcctactgggataccagccccggggtaaacccaggatagaatatgtaacggtgactccagagggattccggtaccggggccagatcttcccaaccgtgaatggactgtttagatggtttaaggatcactaccaggatcctgtaccaggcatcacccctagcagcagcagcaggacccggacacctgcctctatcaatgctaccccagccaacatcaaccttgcagatctgacacgggctgtgaatgccctgcctcagaacatgacttcacagatgttcagtgccattgctgcggtgacaggccaaggacagaaccctaatgccaccccagcccagtgggcctccagccagtacggctatggcggcagtggaggcggcagcagtgcttaccacgtattcccaacgccagcccagcagccagtggccacaccactaatgacccctagctactcctacacgaccccaagccagcccatcaccacccctcagtaccaccagctccaggccagcaccaccccacagtcggcccaggcccagccccagccctcttccagctcccggcaacggcagcagcagccaaagtccaacagccatgcagccatcgactggggaaaaatggcggagcagtggctgcaggaaaaggaggcagaacggcggaaacagaagcagcggctgacacctcggccctcccccagccccatgatcgaaagcacccccatgtccattgctggcgatgccaccccactcctggacgagatggatcggtagggggcctgctcctcggactctggttacctctgaggctgggaaaggcctggctgcccactgcctccctccctgcccctccttttatgtccataaagtggcgtgaagtgagacgttctctttggtggtcaacccggatgggtgacaggctggatggccttgtgaacttgagctcagtgtatgctaggcaacaattctcccgctccagaccctcaccgaccacctgtcctgggaccaggctgggaggggagtgtggcagggaggaggaagaggaaggtgagaatgagtagaacagttttgtattctactccctacaagccattttgaacttctgccctcaccggactctgggctgtgactggggcaccaaactcagcacatgagtctcccctagctctcgtggggagagggatgctatttattcagtttggggcaggagggagaggagggaaagtatttctgaccctgatgccaacagccgggtggctgtccaagcaggattgcaggggacacagggaagcactgcccagcccctgcctggctgccctttcccccctgctgctgccaccgcttcctgcctgtcatttgaataaacagtgtttctattgaaaaaaaaaaaaa

SEQ ID NO: 64068 - DNA, 2522 bp, Homo sapiens
cattaggctaggtacgaggcccggtggtgaatcggccgaggctttgcagaagagctggagaggcaggctatggtgacaaacacatcacactctatgacatccgggcagagctgagctgtcgatataaggacctccggacagcctaccgctctcccaacacagaggagatcttcaatatgttaaccaaagaaacaccagagaccttctacattggaaagctcatcatctgcaatgtcactggcattgcccacaggcgtccccagggtgagagctatgaccaggcgatccgcaatgatgagacagggctgtggcagtgccccttctgtcagcaggacaatttccctgaactaagcgaggtgtggaaccactttgacagcggttcgtgcccaggccaggccatcggtgtcaaaacacggctagacaatggtgtcaccggcttcatccccaccaaattcctcagtgacaaagtggtaaagcggccagaagaacgagtgaaggtgggaatgactgttcactgccgcatcatgaagattgacattgagaagttcagtgcagacctgacctgccgcacctcagacctcatggacaggaacaatgagtggaagctgcccaaagacacctactatgactttgatgctgaagctgcagaccacaagcaggaggaggacatgaagcggaagcagcagcggaccacatacatcaagagagtgatcgcacacccatccttccataatatcaatttcaagcaagcagaaaagatgatggagaccatggaccagggtgatgtgattatccgaccaagcagcaagggcgagaaccacctgacagtgacctggaaagtcagtgatggcatctaccagcatgtggatgtgcgggaggagggcaaggaaaatgccttcagcctgggagccactctgtggatcaacagtgaggaattcgaagatttggatgagattgttgctcgctatgtccagcccatggcatcctttgcccgggaccttctgaatcacaagtattatcaggactgcagcggtggggaccgcaagaaattagaggagctgctcatcaaaactaagaaggagaagcccaccttcatcccttatttcatctgtgcctgcaaggaactgcccggcaagttcctactgggataccagccccggggtaaacccaggatagaatatgtaacggtgactccagagggattccggtaccggggccagatcttcccaaccgtgaatggactgtttagatggtttaaggatcactaccaggatcctgtaccaggcatcacccctagcagcagcagcaggacccggacacctgcctctatcaatgctaccccagccaacatcaaccttgcagatctgacacgggctgtgaatgccctgcctcagaacatgacttcacagatgttcagtgccattgctgcggtgacaggccaaggacagaaccctaatgccaccccagcccagtgggcctccagccagtacggctatggcggcagtggaggcggcagcagtgcttaccacgtattcccaacgccagcccagcagccagtggccacaccactaatgacccctagctactcctacacgaccccaagccagcccatcaccacccctcagtaccaccagctccaggccagcaccaccccacagtcggcccaggcccagccccagccctcttccagctcccggcaacggcagcagcagccaaagtccaacagccatgcagccatcgactggggaaaaatggcggagcagtggctgcaggaaaaggaggcagaacggcggaaacagaagcagcggctgacacctcggccctcccccagccccatgatcgaaagcacccccatgtccattgctggcgatgccaccccactcctggacgagatggatcggtagggggcctgctcctcggactctggttacctctgaggctgggaaaggcctggctgcccactgcctccctccctgcccctccttttatgtccataaagtggcgtgaagtgagacgttctctttggtggtcaacccggatgggtgacaggctggatggccttgtgaacttgagctcagtgtatgctaggcaacaattctcccgctccagaccctcaccgaccacctgtcctgggaccaggctgggaggggagtgtggcagggaggaggaagaggaaggtgagaatgagtagaacagttttgtattctactccctacaagccattttgaacttctgccctcaccggactctgggctgtgactggggcaccaaactcagcacatgagtctcccctagctctcgtggggagagggatgctatttattcagtttggggcaggagggagaggagggaaagtatttctgaccctgatgccaacagccgggtggctgtccaagcaggattgcaggggacacagggaagcactgcccagcccctgcctggctgccctttcccccctgctgctgccaccgcttcctgcctgtcatttgaataaacagtgtttctattgaaaaaaaaaaaaa

SEQ ID NO: 64069 - DNA, 2440 bp, Homo sapiens
tctagaggaccccggtctccacaaaggatccaatcctgcaggagcccttgaagaaatcttggaaaacccagagcgactgaaagacctggaccttgatgcctttgcagaagagctggagaggcagggctatggtgacaaacacatcacactctatgacatccgggcagagctgagctgtcgatataaggacctccggacagcctaccgctctcccaacacagaggagatcttcaatatgttaaccaaagaaacaccagagaccttctacattggaaagctcatcatctgcaatgtcactggcattgcccacaggcgtccccagggtgagagctatgaccaggcgatccgcaatgatgagacagggctgtggcagtgccccttctgtcagcaggacaatttccctgaactaagcgaggtgggaatgactgttcactgccgcatcatgaagattgacattgagaagttcagtgcagacctgacctgccgcacctcagacctcatggacaggaacaatgagtggaagctgcccaaagacacctactatgactttgatgctgaagctgcagaccacaagcaggaggaggacatgaagcggaagcagcagcggaccacatacatcaagagagtgatcgcacacccatccttccataatatcaatttcaagcaagcagaaaagatgatggagaccatggaccagggtgatgtgattatccgaccaagcagcaagggcgagaaccacctgacagtgacctggaaagtcagtgatggcatctaccagcatgtggatgtgcgggaggagggcaaggaaaatgccttcagcctgggagccactctgtggatcaacagtgaggaattcgaagatttggatgagattgttgctcgctatgtccagcccatggcatcctttgcccgggaccttctgaatcacaagtattatcaggactgcagcggtggggaccgcaagaaattagaggagctgctcatcaaaactaagaaggagaagcccaccttcatcccttatttcatctgtgcctgcaaggaactgcccggcaagttcctactgggataccagccccggggtaaacccaggatagaatatgtaacggtgactccagagggattccggtaccggggccagatcttcccaaccgtgaatggactgtttagatggtttaaggatcactaccaggatcctgtaccaggcatcacccctagcagcagcagcaggacccggacacctgcctctatcaatgctaccccagccaacatcaaccttgcagatctgacacgggctgtgaatgccctgcctcagaacatgacttcacagatgttcagtgccattgctgcggtgacaggccaaggacagaaccctaatgccaccccagcccagtgggcctccagccagtacggctatggcggcagtggaggcggcagcagtgcttaccacgtattcccaacgccagcccagcagccagtggccacaccactaatgacccctagctactcctacacgaccccaagccagcccatcaccacccctcagtaccaccagctccaggccagcaccaccccacagtcggcccaggcccagccccagccctcttccagctcccggcaacggcagcagcagccaaagtccaacagccatgcagccatcgactggggaaaaatggcggagcagtggctgcaggaaaaggaggcagaacggcggaaacagaagcagcggctgacacctcggccctcccccagccccatgatcgaaagcacccccatgtccattgctggcgatgccaccccactcctggacgagatggatcggtagggggcctgctcctcggactctggttacctctgaggctgggaaaggcctggctgcccactgcctccctccctgcccctccttttatgtccataaagtggcgtgaagtgagacgttctctttggtggtcaacccggatgggtgacaggctggatggccttgtgaacttgagctcagtgtatgctaggcaacaattctcccgctccagaccctcaccgaccacctgtcctgggaccaggctgggaggggagtgtggcagggaggaggaagaggaaggtgagaatgagtagaacagttttgtattctactccctacaagccattttgaacttctgccctcaccggactctgggctgtgactggggcaccaaactcagcacatgagtctcccctagctctcgtggggagagggatgctatttattcagtttggggcaggagggagaggagggaaagtatttctgaccctgatgccaacagccgggtggctgtccaagcaggattgcaggggacacagggaagcactgcccagcccctgcctggctgccctttcccccctgctgctgccaccgcttcctgcctgtcatttgaataaacagtgtttctattgaaaaaaaaaaaaa

SEQ ID NO: 64070 - DNA, 5352 bp, Homo sapiens
  misc_feature (1307)..(1307): n is a, c, g, or t
gcctggaggatgatgattttctcctcaatgaggtcaaagtcaaaagaggacaaaagtaccggcgtgtcaaaaaaatgtcagatgacgaggacgatgacgaggaggaatatggcaaggaggaacatgaaaaagaagctattgcggaagaaatcttccaggatggggaaggggaagaagggcaggaggccatggaggcccccatggctcctccagaggaggaggaagaagatgatgaggagtcagatattgacgacttcattgtggatgatgatggacagcctctgaaaaaacctaagtggcggaaaaagcttcctggatacacagacgcggccctgcaagaagcccaggaaatcttcggtgtggactttgactatgatgaatttgagaaatacaatgagtatgatgaagaactggaggaagagtatgagtatgaggatgatgaggctgagggtgaaatccgagtgcgccccaagaagaccaccaagaagcgtgtgagccgtaggagcatctttgaaatgtatgagcccagtgagctagaaagcagccacctcacagatcaggacaatgaaatccgagccactgacctgcctgagaggttccagctccgctccatcccagtcaagggggctgaagatgatgaactagaagaagaagctgactggatctacaggaatgcttttgccacaccaaccatttctctccaggaaagctgtgattacctagaccgagggcagccagccagcagcttcagtcggaaagggcccagcacaattcagaagatcaaagaggccctgggcttcatgcgaaatcagcattttgaggtgccttttattgccttctatcgaaaggagtatgtggagcctgagttgcacatcaatgacctatggagagtctggcagtgggatgaaaagtggacccagctgcggatccgtaaagagaacctaacacggctgtttgagaagatgcaggcttatcagtatgaacagatctctgctgaccctgacaaacctcttgctgatggcatccgggctctggacaccactgacatggagaggctcaaggatgtccaatcaatggatgagctgaaagatgtctacaaccattttcttctttattatggccgagacatccctaagatgcagaacgccgccaaagctagccgcaagaagctgaagcgtgtcagggaagagggagatgaagaaggtgaaggtgacgaggcagaagatgaggagcagagggggcctgagctcaagcaagcctctcgccgagacatgtacaccatctgccagagtgctgggctagatggnctggccaaaaagtttgggcttactcccgagcagtttggggagaacctgcgggatagctaccagcggcacgagacagagcagtttcccgcggagcccttggagctggccaaggattacgtttgcagccagttccctactccagaagctgtgctagaaggcgcccgctacatggtagccctgcagattgcccgtgagccccttgtccggcaggtgctgaggcaaaccttccaagagagagccaagttaaatataacccccaccaagaaaggtagaaaggatgtggatgaggcccactatgcctattccttcaagtatttaaagaacaagcctgttaaggaactgagagatgaccagtttctcaagatatgcctggctgaagacgaagggctcctcaccactgacatcagcatagatttgaagggagtggaaggctatggcaacgaccagacatattttgaggagataaaacagttttactaccgagatgagttcagccaccaggtgcaggagtggaaccggcagcgcaccatggccatcgaacgggctttacagcagttcctctatgtgcagatggccaaagaactcaagaacaagctgctggctgaagccaaggaatatgtcataaaggcctgtagtcgaaagctctacaattggttgagagtggcaccctaccgaccagatcagcaggtggaagaagatgacgactttatggacgagaaccaagggaagggcattcgagtcctcggcattgctttctcctctgccagagatcaccctgtgttctgcgccctggtcaatggtgaaggagaagtgacagacttccttcgactgccccattttaccaaacggcgaactgcatggagagaggaagagcgggaaaagaaggctcaagacattgaaacgctaaagaaatttctcctgaataagaagcctcatgtagtgacagttgcaggagagaacagggacgcccagatgttgattgaagatgtgaagcgcattgtacatgagctggaccagggccagcagctgtcatctattggggtagagctggttgacaacgagttggccattctctatatgaacagcaagaagtcagaggcagagttccgggattatcctccagtgctgagacaggccgtctccctggcccggcgcatccaggaccctctgattgaatttgcccaggtgtgcagttccgatgaagacatcctgtgtctcaagtttcaccccttgcaggagcatgtggtgaaagaggagctgctcaacgccttgtactgtgaatttatcaaccgagtcaatgaggtcggggtcgatgtcaaccgtgccattgcccacccttacagccaggccttgatccagtatgtttgtggcctgggacctcggaaagggacccacctcctgaagatcctgaagcagaacaacacccggctcgagagccggacccagctggtcaccatgtgccacatgggtcccaaagtcttcatgaattgtgctggcttcctcaagatcgacacggcctccctgggggacagcactgactcatatattgaagtccttgatggttcccgtgtccaccctgagacttatgagtgggctaggaagatggcagtggatgccctggaatacgatgaatcagccgaggatgccaatcctgcaggagcccttgaagaaatcttggaaaacccagagcgactgaaagacctggaccttgatgcctttgcagaagagctggagaggcagggctatggtgacaaacacatcacactctatgacatccgggcagagctgagctgtcgatataaggacctccggacagcctaccgctctcccaacacagaggagatcttcaatatgttaaccaaagaaacaccagagaccttctacattggaaagctcatcatctgcaatgtcactggcattgcccacaggcgtccccagggtgagagctatgaccaggcgatccgcaatgatgagacagggctgtggcagtgccccttctgtcagcaggacaatttccctgaactaagcgaggtgtggaaccactttgacagcggttcgtgcccaggccaggccatcggtgtcaaaacacggctagacaatggtgtcaccggcttcatccccaccaaattcctcagtgacaaagtggtaaagcggccagaagaacgagtgaaggtgggaatgactgttcactgccgcatcatgaagattgacattgagaagttcagtgcagacctgacctgccgcacctcagacctcatggacaggaacaatgagtggaagctgcccaaagacacctactatgactttgatgctgaagctgcagaccacaagcaggaggaggacatgaagcggaagcagcagcggaccacatacatcaagagagtgatcgcacacccatccttccataatatcaatttcaagcaagcagaaaagatgatggagaccatggaccagggtgatgtgattatccgaccaagcagcaagggcgagaaccacctgacagtgacctggaaagtcagtgatggcatctaccagcatgtggatgtgcgggaggagggcaaggaaaatgccttcagcctgggagccactctgtggatcaacagtgaggaattcgaagatttggatgagattgttgctcgctatgtccagcccatggcatcctttgcccgggaccttctgaatcacaagtattatgatagaatatgtaacggtgactccagagggattccggtaccggggccagatcttcccaaccgtgaatggactgtttagatggtttaaggatcactaccaggatcctgtaccaggcatcacccctagcagcagcagcaggacccggacacctgcctctatcaatgctaccccagccaacatcaaccttgcagatctgacacgggctgtgaatgccctgcctcagaacatgacttcacagatgttcagtgccattgctgcggtgacaggccaaggacagaaccctaatgccaccccagcccagtgggcctccagccagtacggctatggcggcagtggaggcggcagcagtgcttaccacgtattcccaacgccagcccagcagccagtggccacaccactaatgacccctagctactcctacacgaccccaagccagcccatcaccacccctcagtaccaccagctccaggccagcaccaccccacagtcggcccaggcccagccccagccctcttccagctcccggcaacggcagcagcagccaaagtccaacagccatgcagccatcgactggggaaaaatggcggagcagtggctgcaggaaaaggaggcagaacggcggaaacagaagcagcggctgacacctcggccctcccccagccccatgatcgaaagcacccccatgtccattgctggcgatgccaccccactcctggacgagatggatcggtagggggcctgctcctcggactctggttacctctgaggctgggaaaggcctggctgcccactgcctccctccctgcccctccttttatgtccataaagtggcgtgaagtgagacgttctctttggtggtcaacccggatgggtgacaggctggatggccttgtgaacttgagctcagtgtatgctaggcaacaattctcccgctccagaccctcaccgaccacctgtcctgggaccaggctgggaggggagtgtggcagggaggaggaagaggaaggtgagaatgagtagaacagttttgtattctactccctacaagccattttgaacttctgccctcaccggactctgggctgtgactggggcaccaaactcagcacatgagtctcccctagctctcgtggggagagggatgctatttattcagtttggggcaggagggagaggagggaaagtatttctgaccctgatgccaacagccgggtggctgtccaagcaggattgcaggggacacagggaagcactgcccagcccctgcctggctgccctttcccccctgctgctgccaccgcttcctgcctgtcatttgaataaacagtgtttctattgaaaaaaaaaaaaa

SEQ ID NO: 64071 - DNA, 1910 bp, Homo sapiens
tcgatgggtgcgatggcgccggggaagccacggtcaaccacaagcaggaggaggacatgaagcggaagcagcagcggaccacatacatcaagagagtgatcgcacacccatccttccataatatcaatttcaagcaagcagaaaagatgatggagaccatggaccagggtgatgtgattatccgaccaagcagcaagggcgagaaccacctgacagtgacctggaaagtcagtgatggcatctaccagcatgtggatgtgcgggaggagggcaaggaaaatgccttcagcctgggagccactctgtggatcaacagtgaggaattcgaagatttggatgagattgttgctcgctatgtccagcccatggcatcctttgcccgggaccttctgaatcacaagtattatcaggactgcagcggtggggaccgcaagaaattagaggagctgctcatcaaaactaagaaggagaagcccaccttcatcccttatttcatctgtgcctgcaaggaactgcccggcaagttcctactgggataccagccccggggtaaacccaggatagaatatgtaacggtgactccagagggattccggtaccggggccagatcttcccaaccgtgaatggactgtttagatggtttaaggatcactaccaggatcctgtaccaggcatcacccctagcagcagcagcaggacccggacacctgcctctatcaatgctaccccagccaacatcaaccttgcagatctgacacgggctgtgaatgccctgcctcagaacatgacttcacagatgttcagtgccattgctgcggtgacaggccaaggacagaaccctaatgccaccccagcccagtgggcctccagccagtacggctatggcggcagtggaggcggcagcagtgcttaccacgtattcccaacgccagcccagcagccagtggccacaccactaatgacccctagctactcctacacgaccccaagccagcccatcaccacccctcagtaccaccagctccaggccagcaccaccccacagtcggcccaggcccagccccagccctcttccagctcccggcaacggcagcagcagccaaagtccaacagccatgcagccatcgactggggaaaaatggcggagcagtggctgcaggaaaaggaggcagaacggcggaaacagaagcagcggctgacacctcggccctcccccagccccatgatcgaaagcacccccatgtccattgctggcgatgccaccccactcctggacgagatggatcggtagggggcctgctcctcggactctggttacctctgaggctgggaaaggcctggctgcccactgcctccctccctgcccctccttttatgtccataaagtggcgtgaagtgagacgttctctttggtggtcaacccggatgggtgacaggctggatggccttgtgaacttgagctcagtgtatgctaggcaacaattctcccgctccagaccctcaccgaccacctgtcctgggaccaggctgggaggggagtgtggcagggaggaggaagaggaaggtgagaatgagtagaacagttttgtattctactccctacaagccattttgaacttctgccctcaccggactctgggctgtgactggggcaccaaactcagcacatgagtctcccctagctctcgtggggagagggatgctatttattcagtttggggcaggagggagaggagggaaagtatttctgaccctgatgccaacagccgggtggctgtccaagcaggattgcaggggacacagggaagcactgcccagcccctgcctggctgccctttcccccctgctgctgccaccgcttcctgcctgtcatttgaataaacagtgtttctattgaaaaaaaaaaaaa

SEQ ID NO: 64072 - DNA, 4368 bp, Homo sapiens
  misc_feature (1307)..(1307): n is a, c, g, or t
gcctggaggatgatgattttctcctcaatgaggtcaaagtcaaaagaggacaaaagtaccggcgtgtcaaaaaaatgtcagatgacgaggacgatgacgaggaggaatatggcaaggaggaacatgaaaaagaagctattgcggaagaaatcttccaggatggggaaggggaagaagggcaggaggccatggaggcccccatggctcctccagaggaggaggaagaagatgatgaggagtcagatattgacgacttcattgtggatgatgatggacagcctctgaaaaaacctaagtggcggaaaaagcttcctggatacacagacgcggccctgcaagaagcccaggaaatcttcggtgtggactttgactatgatgaatttgagaaatacaatgagtatgatgaagaactggaggaagagtatgagtatgaggatgatgaggctgagggtgaaatccgagtgcgccccaagaagaccaccaagaagcgtgtgagccgtaggagcatctttgaaatgtatgagcccagtgagctagaaagcagccacctcacagatcaggacaatgaaatccgagccactgacctgcctgagaggttccagctccgctccatcccagtcaagggggctgaagatgatgaactagaagaagaagctgactggatctacaggaatgcttttgccacaccaaccatttctctccaggaaagctgtgattacctagaccgagggcagccagccagcagcttcagtcggaaagggcccagcacaattcagaagatcaaagaggccctgggcttcatgcgaaatcagcattttgaggtgccttttattgccttctatcgaaaggagtatgtggagcctgagttgcacatcaatgacctatggagagtctggcagtgggatgaaaagtggacccagctgcggatccgtaaagagaacctaacacggctgtttgagaagatgcaggcttatcagtatgaacagatctctgctgaccctgacaaacctcttgctgatggcatccgggctctggacaccactgacatggagaggctcaaggatgtccaatcaatggatgagctgaaagatgtctacaaccattttcttctttattatggccgagacatccctaagatgcagaacgccgccaaagctagccgcaagaagctgaagcgtgtcagggaagagggagatgaagaaggtgaaggtgacgaggcagaagatgaggagcagagggggcctgagctcaagcaagcctctcgccgagacatgtacaccatctgccagagtgctgggctagatggnctggccaaaaagtttgggcttactcccgagcagtttggggagaacctgcgggatagctaccagcggcacgagacagagcagtttcccgcggagcccttggagctggccaaggattacgtttgcagccagttccctactccagaagctgtgctagaaggcgcccgctacatggtagccctgcagattgcccgtgagccccttgtccggcaggtgctgaggcaaaccttccaagagagagccaagttaaatataacccccaccaagaaaggtagaaaggatgtggatgaggcccactatgcctattccttcaagtatttaaagaacaagcctgttaaggaactgagagatgaccagtttctcaagatatgcctggctgaagacgaagggctcctcaccactgacatcagcatagatttgaagggagtggaaggctatggcaacgaccagacatattttgaggagataaaacagttttactaccgagatgagttcagccaccaggtgcaggagtggaaccggcagcgcaccatggccatcgaacgggctttacagcagttcctctatgtgcagatggccaaagaactcaagaacaagctgctggctgaagccaaggaatatgtcataaaggcctgtagtcgaaagctctacaattggttgagagtggcaccctaccgaccagatcagcaggtggaagaagatgacgactttatggacgagaaccaagggaagggcattcgagtcctcggcattgctttctcctctgccagagatcaccctgtgttctgcgccctggtcaatggtgaaggagaagtgacagacttccttcgactgccccattttaccaaacggcgaactgcatggagagaggaagagcgggaaaagaaggctcaagacattgaaacgctaaagaaatttctcctgaataagaagcctcatgtagtgacagttgcaggagagaacagggacgcccagatgttgattgaagatgtgaagcgcattgtacatgagctggaccagggccagcagctgtcatctattggggtagagctggttgacaacgagttggccattctctatatgaacagcaagaagtcagaggcagagttccgggattatcctccagtgctgagacaggccgtctccctggcccggcgcatccaggaccctctgattgaatttgcccaggtgtgcagttccgatgaagacatcctgtgtctcaagtttcaccccttgcaggagcatgtggtgaaagaggagctgctcaacgccttgtactgtgaatttatcaaccgagtcaatgaggtcggggtcgatgtcaaccgtgccattgcccacccttacagccaggccttgatccagtatgtttgtggcctgggacctcggaaagggacccacctcctgaagatcctgaagcagaacaacacccggctcgagagccggacccagctggtcaccatgtgccacatgggtcccaaagtcttcatgaattgtgctggcttcctcaagatcgacacggcctccctgggggacagcactgactcatatattgaagtccttgatggttcccgtgtccaccctgagacttatgagtgggctaggaagatggcagtggatgccctggaatacgatgaatcagccgaggatgccaatcctgcaggagcccttgaagaaatcttggaaaacccagagcgactgaaagacctggaccttgatgcctttgcagaagagctggagaggcagggctatggtgacaaacacatcacactctatgacatccgggcagagctgagctgtcgatataaggacctccggacagcctaccgctctcccaacacagaggagatcttcaatatgttaaccaaagaaacaccagagaccttctacattggaaagctcatcatctgcaatgtcactggcattgcccacaggcgtccccagggtgagagctatgaccaggcgatccgcaatgatgagacagggctgtggcagtgccccttctgtcagcaggacaatttccctgaactaagcgaggtgtggaaccactttgacagcggttcgtgcccaggccaggccatcggtgtcaaaacacggctagacaatggtgtcaccggcttcatccccaccaaattcctcagtgacaaagtggtaaagcggccagaagaacgagtgaaggtgggaatgactgttcactgccgcatcatgaagattgacattgagaagttcagtgcagacctgacctgccgcacctcagacctcatggacaggaacaatgagtggaagctgcccaaagacacctactatgactttgatgctgaagctgcagaccacaagcaggaggaggacatgaagcggaagcagcagcggaccacatacatcaagagagtgatcgcacacccatccttccataatatcaatttcaagcaagcagaaaagatgatggagaccatggaccagggtgatgtgattatccgaccaagcagcaagggcgagaaccacctgacagtgacctggaaagtcagtgatggcatctaccagcatgtggatgtgcgggaggagggcaaggaaaatgccttcagcctgggagccactctgtggatcaacagtgaggaattcgaagatttggatgagattgttgctcgctatgtccagcccatggcatcctttgcccgggaccttctgaatcacaagtattatcaggactgcagcggtggggaccgcaagaaattagaggagctgctcatcaaaactaagaaggagaagcccaccttcatcccttatttcatctgtgcctgcaaggaactgcccggcaagttcctactgggataccagccccggggtaaacccaggatagaatatgtaacggtgactccagagggattccggtaccggggccagatcttcccaaccgtgaatggactgtttagatggtttaaggatcactaccaggatcctgtaccaggcatcacccctagcagcagcagcaggacccggacacctgcctctatcaatgctaccccagccaacatcaaccttgcagcccgctcaagattggaccgagctc

SEQ ID NO: 64073 - DNA, 1743 bp, Homo sapiens
tggtggggatcaccggcagcacgaggatgcggcaggacgagcatggctacatctcccggtgcttcacgcggaaatacacgctgccccccggtgtggaccccacccaagtttcctcctccctgtcccctgagggcacactgaccgtggaggcccccatgcccaagctagccacgcagtccaacgagatcaccatcccagtcaccttcgagtcgcgggcccagcttgacgaagcaatggtgggcacgaagcagtggttgggaccgcaagaaattagaggagctgctcatcaaaactaagaaggagaagcccaccttcatcccttatttcatctgtgcctgcaaggaactgcccggcaagttcctactgggataccagccccggggtaaacccaggatagaatatgtaacggtgactccagagggattccggtaccggggccagatcttcccaaccgtgaatggactgtttagatggtttaaggatcactaccaggatcctgtaccaggcatcacccctagcagcagcagcaggacccggacacctgcctctatcaatgctaccccagccaacatcaaccttgcagatctgacacgggctgtgaatgccctgcctcagaacatgacttcacagatgttcagtgccattgctgcggtgacaggccaaggacagaaccctaatgccaccccagcccagtgggcctccagccagtacggctatggcggcagtggaggcggcagcagtgcttaccacgtattcccaacgccagcccagcagccagtggccacaccactaatgacccctagctactcctacacgaccccaagccagcccatcaccacccctcagtaccaccagctccaggccagcaccaccccacagtcggcccaggcccagccccagccctcttccagctcccggcaacggcagcagcagccaaagtccaacagccatgcagccatcgactggggaaaaatggcggagcagtggctgcaggaaaaggaggcagaacggcggaaacagaagcagcggctgacacctcggccctcccccagccccatgatcgaaagcacccccatgtccattgctggcgatgccaccccactcctggacgagatggatcggtagggggcctgctcctcggactctggttacctctgaggctgggaaaggcctggctgcccactgcctccctccctgcccctccttttatgtccataaagtggcgtgaagtgagacgttctctttggtggtcaacccggatgggtgacaggctggatggccttgtgaacttgagctcagtgtatgctaggcaacaattctcccgctccagaccctcaccgaccacctgtcctgggaccaggctgggaggggagtgtggcagggaggaggaagaggaaggtgagaatgagtagaacagttttgtattctactccctacaagccattttgaacttctgccctcaccggactctgggctgtgactggggcaccaaactcagcacatgagtctcccctagctctcgtggggagagggatgctatttattcagtttggggcaggagggagaggagggaaagtatttctgaccctgatgccaacagccgggtggctgtccaagcaggattgcaggggacacagggaagcactgcccagcccctgcctggctgccctttcccccctgctgctgccaccgcttcctgcctgtcatttgaataaacagtgtttctattgaaaaaaaaaaaaa

SEQ ID NO: 64074 - DNA, 2504 bp, Homo sapiens
  misc_feature (1307)..(1307): n is a, c, g, or t
gcctggaggatgatgattttctcctcaatgaggtcaaagtcaaaagaggacaaaagtaccggcgtgtcaaaaaaatgtcagatgacgaggacgatgacgaggaggaatatggcaaggaggaacatgaaaaagaagctattgcggaagaaatcttccaggatggggaaggggaagaagggcaggaggccatggaggcccccatggctcctccagaggaggaggaagaagatgatgaggagtcagatattgacgacttcattgtggatgatgatggacagcctctgaaaaaacctaagtggcggaaaaagcttcctggatacacagacgcggccctgcaagaagcccaggaaatcttcggtgtggactttgactatgatgaatttgagaaatacaatgagtatgatgaagaactggaggaagagtatgagtatgaggatgatgaggctgagggtgaaatccgagtgcgccccaagaagaccaccaagaagcgtgtgagccgtaggagcatctttgaaatgtatgagcccagtgagctagaaagcagccacctcacagatcaggacaatgaaatccgagccactgacctgcctgagaggttccagctccgctccatcccagtcaagggggctgaagatgatgaactagaagaagaagctgactggatctacaggaatgcttttgccacaccaaccatttctctccaggaaagctgtgattacctagaccgagggcagccagccagcagcttcagtcggaaagggcccagcacaattcagaagatcaaagaggccctgggcttcatgcgaaatcagcattttgaggtgccttttattgccttctatcgaaaggagtatgtggagcctgagttgcacatcaatgacctatggagagtctggcagtgggatgaaaagtggacccagctgcggatccgtaaagagaacctaacacggctgtttgagaagatgcaggcttatcagtatgaacagatctctgctgaccctgacaaacctcttgctgatggcatccgggctctggacaccactgacatggagaggctcaaggatgtccaatcaatggatgagctgaaagatgtctacaaccattttcttctttattatggccgagacatccctaagatgcagaacgccgccaaagctagccgcaagaagctgaagcgtgtcagggaagagggagatgaagaaggtgaaggtgacgaggcagaagatgaggagcagagggggcctgagctcaagcaagcctctcgccgagacatgtacaccatctgccagagtgctgggctagatggnctggccaaaaagtttgggcttactcccgagcagtttggggagaacctgcgggatagctaccagcggcacgagacagagcagtttcccgcggagcccttggagctggccaaggattacgtttgcagccagttccctactccagaagctgtgctagaaggcgcccgctacatggtagccctgcagattgcccgtgagccccttgtccggcaggtgctgaggcaaaccttccaagagagagccaagttaatgacccctagctactcctacacgaccccaagccagcccatcaccacccctcagtaccaccagctccaggccagcaccaccccacagtcggcccaggcccagccccagccctcttccagctcccggcaacggcagcagcagccaaagtccaacagccatgcagccatcgactggggaaaaatggcggagcagtggctgcaggaaaaggaggcagaacggcggaaacagaagcagcggctgacacctcggccctcccccagccccatgatcgaaagcacccccatgtccattgctggcgatgccaccccactcctggacgagatggatcggtagggggcctgctcctcggactctggttacctctgaggctgggaaaggcctggctgcccactgcctccctccctgcccctccttttatgtccataaagtggcgtgaagtgagacgttctctttggtggtcaacccggatgggtgacaggctggatggccttgtgaacttgagctcagtgtatgctaggcaacaattctcccgctccagaccctcaccgaccacctgtcctgggaccaggctgggaggggagtgtggcagggaggaggaagaggaaggtgagaatgagtagaacagttttgtattctactccctacaagccattttgaacttctgccctcaccggactctgggctgtgactggggcaccaaactcagcacatgagtctcccctagctctcgtggggagagggatgctatttattcagtttggggcaggagggagaggagggaaagtatttctgaccctgatgccaacagccgggtggctgtccaagcaggattgcaggggacacagggaagcactgcccagcccctgcctggctgccctttcccccctgctgctgccaccgcttcctgcctgtcatttgaataaacagtgtttctattgaaaaaaaaaaaaa

SEQ ID NO: 64075 - DNA, 3313 bp, Homo sapiens
  misc_feature (1307)..(1307): n is a, c, g, or t
gcctggaggatgatgattttctcctcaatgaggtcaaagtcaaaagaggacaaaagtaccggcgtgtcaaaaaaatgtcagatgacgaggacgatgacgaggaggaatatggcaaggaggaacatgaaaaagaagctattgcggaagaaatcttccaggatggggaaggggaagaagggcaggaggccatggaggcccccatggctcctccagaggaggaggaagaagatgatgaggagtcagatattgacgacttcattgtggatgatgatggacagcctctgaaaaaacctaagtggcggaaaaagcttcctggatacacagacgcggccctgcaagaagcccaggaaatcttcggtgtggactttgactatgatgaatttgagaaatacaatgagtatgatgaagaactggaggaagagtatgagtatgaggatgatgaggctgagggtgaaatccgagtgcgccccaagaagaccaccaagaagcgtgtgagccgtaggagcatctttgaaatgtatgagcccagtgagctagaaagcagccacctcacagatcaggacaatgaaatccgagccactgacctgcctgagaggttccagctccgctccatcccagtcaagggggctgaagatgatgaactagaagaagaagctgactggatctacaggaatgcttttgccacaccaaccatttctctccaggaaagctgtgattacctagaccgagggcagccagccagcagcttcagtcggaaagggcccagcacaattcagaagatcaaagaggccctgggcttcatgcgaaatcagcattttgaggtgccttttattgccttctatcgaaaggagtatgtggagcctgagttgcacatcaatgacctatggagagtctggcagtgggatgaaaagtggacccagctgcggatccgtaaagagaacctaacacggctgtttgagaagatgcaggcttatcagtatgaacagatctctgctgaccctgacaaacctcttgctgatggcatccgggctctggacaccactgacatggagaggctcaaggatgtccaatcaatggatgagctgaaagatgtctacaaccattttcttctttattatggccgagacatccctaagatgcagaacgccgccaaagctagccgcaagaagctgaagcgtgtcagggaagagggagatgaagaaggtgaaggtgacgaggcagaagatgaggagcagagggggcctgagctcaagcaagcctctcgccgagacatgtacaccatctgccagagtgctgggctagatggnctggccaaaaagtttgggcttactcccgagcagtttggggagaacctgcgggatagctaccagcggcacgagacagagcagtttcccgcggagcccttggagctggccaaggattacgtttgcagccagttccctactccagaagctgtgctagaaggcgcccgctacatggtagccctgcagattgcccgtgagccccttgtccggcaggtgctgaggcaaaccttccaagagagagccaagttaaatataacccccaccaagaaaggtagaaaggatgtggatgaggcccactatgcctattccttcaagtatttaaagaacaagcctgttaaggaactgagagatgaccagtttctcaagatatgcctggctgaagacgaagggctcctcaccactgacatcagcatagatttgaagggagtggaaggctatggcaacgaccagacatattttgaggagataaaacagttttactaccgagatgagttcagccaccaggtgcaggagtggaaccggcagcgcaccatggccatcgaacgggctttacagcagttcctctatgtgcagatggccaaagaactcaagaacaagctgctggctgaagccaaggaatatgtcataaaggcctgtagtcgaaagctctacaattggttgagagtggcaccctaccgaccagatcagcaggtggaagaagatgacgactttatggacgagaaccaagggaagggcattcgagtcctcggcattgctttctcctctgccagagatcaccctgtgttctgcgccctggtcaatggtgaaggagaagtgacagacttccttcgactgccccattttaccaaacggcgaactgcatggagagaggaagagcgggaaaagaaggctcaagacattgaaacgctaaagaaatttctcctgaataagaagcctcatgtagtgacagttgcaggagagaacagggacgcccagatgttgattgaagatgtgaagcgcattgtacatgagctggaccagggccagcagctgtcatctattggggtagagctggttgacaacgagttggccattctctatatgaacagcaagaagtcagaggcagagttccgggattatcctccagtgctgagacaggccgtctccctggcccggcgcatccaggaccctctgattgaatttgcccaggtgtgcagttccgatgaagacatcctgtgtctcaagtttcaccccttgcaggagcatgtggtgaaagaggagctgctcaacgccttgtactgtgaatttatcaaccgagtcaatgaggtcggggtcgatgtcaaccgtgccattgcccacccttacagccaggccttgatccagtatgtttgtggcctgggacctcggaaagggacccacctcctgaagatcctgaagcagaacaacacccggctcgagagccggacccagctggtcaccatgtgccacatgggtcccaaagtcttcatgaattgtgctggcttcctcaagatcgacacggcctccctgggggacagcactgactcatatattgaagtccttgatggttcccgtgtccaccctgagacttatgagtgggctaggaagatggcagtggatgccctggaatacgatgaatcagccgaggatgccaatcctgcaggagcccttgaagaaatcttggaaaacccagagcgactgaaagacctggaccttgatgcctttgcagaagagctggagaggcagggctatggtgacaaacacatcacactctatgacatccgggcagagctgagctgtcgatataaggacctccggacagcctaccgctctcccaacacagaggagatcttcaatatgttaaccaaagaaacaccagagaccttctacattggaaagctcatcatctgcaatgtcactggcattgcccacaggcgtccccagggtgagagctatgaccaggcgacagtcaagaatgtgacagccccgcacagacgttgttatacgacgac

SEQ ID NO: 64076 - DNA, 436 bp, Homo sapiens
cggagaggatacctgaagcatactctccgagcgaccacctgtcctgggaccaggctgggaggggagtgtggcagggaggaggaagaggaaggtgagaatgagtagaacagttttgtattctactccctacaagccattttgaacttctgccctcaccggactctgggctgtgactggggcaccaaactcagcacatgagtctcccctagctctcgtggggagagggatgctatttattcagtttggggcaggagggagaggagggaaagtatttctgaccctgatgccaacagccgggtggctgtccaagcaggattgcaggggacacagggaagcactgcccagcccctgcctggctgccctttcccccctgctgctgccaccgcttcctgcctgtcatttgaataaacagtgtttctattgaaaaaaaaaaaaa

SEQ ID NO: 64077 - DNA, 468 bp, Homo sapiens
ctgcaagaagcccaggaaatcttcggtgtggactttgactatgatgaatttgagaaatacaatgagtatgatgaagaactggaggaagagtatgagtatgaggatgatgaggctgagggtgaaatccgagtgcgccccaagaagaccaccaagaagcgtgtgagccgtaggagcatctttgaaatgtatgagcccagtgagctagaaagcagccacctcacagatcaggacaatgaaatccgagccactgacctgcctgagaggttccaggtaaaaaaccaccagcctctgctcttctaccaatccataattaccttgtagccaagaaatattctagcaaaagtctggcattgagtatccagcacaggtttgaacctcatctcacctggggcctgggaaatccagctcttagagaagggaagatagactctaccttgcttacggttctagaaatactgttttctttag

SEQ ID NO: 64078 - DNA, 426 bp, Homo sapiens
acatgacacagatggataaactgaggggactttgctatggactgagaagcccatcccctcccatggtttttcttctggatggatttgatcaagaatctcagctctggatatgacacatggggcctttaccttcttcccacaggaattcgaagatttggatgagattgttgctcgctatgtccagcccatggcatcctttgcccgggaccttctgaatcacaagtattatcaggactgcagcggtggggaccgcaaggtaagcccagggccctctgaggaatgacacttgccaatcacttaaggatgtacgctttcccttcagtataggggacactcaggcggtgaaggaagtgtacatcatgtgtgcaccagacgttgtgtaccaagcatgctgctatcccaacctctccccctcattctaccccc

SEQ ID NO: 64079 - DNA, 222 bp, Homo sapiens
ctccccaagtgggaatgttgagtgggcagagcagtggcaggttgctaaaaggctgtttgtgggaaggtttaagagccctctgtacaatcatgtgtccgtttttttatccttcactcttttctttccctagttatcttcaggcagagtgagaagctgcagcaatgtctgattttgtggaaagcgaggctgaggagtcagaggaagaatacaatgatgaaggcg

SEQ ID NO: 64080 - DNA, 5889 bp, Homo sapiens
  misc_feature (1692)..(1692): n is a, c, g, or t
cgactccattttcctcggtgggggcttagcgcactggaggagcggcgggcttcagacagttatcttcaggcagagtgagaagctgcagcaatgtctgattttgtggaaagcgaggctgaggagtcagaggaagaatacaatgatgaaggcgaggtggtaccccgagtcaccaagaaatttgtggaagaggaggatgatgatgaggaggaggaggaggagaacctagatgatcaggatgagcaaggcaacttgaaaggctttatcaatgacgatgatgatgaagatgaaggggaggaggatgagggcagtgactctggtgattcagaagatgatgttggccacaagaagagaaaacgcacctcttttgatgaccgcctggaggatgatgattttgacctcattgaggagaatttgggtgtcaaagtcaaaagaggacaaaagtaccggcgtgtcaaaaaaatgtcagatgacgaggacgatgacgaggaggaatatggcaaggaggaacatgaaaaagaagctattgcggaagaaatcttccaggatggggaaggggaagaagggcaggaggccatggaggcccccatggctcctccagaggaggaggaagaagatgatgaggagtcagatattgacgacttcattgtggatgatgatggacagcctctgaaaaaacctaagtggcggaaaaagcttcctggatacacagacgcggccctgcaagaagcccaggaaatcttcggtgtggactttgactatgatgaatttgagaaatacaatgagtatgatgaagaactggaggaagagtatgagtatgaggatgatgaggctgagggtgaaatccgagtgcgccccaagaagaccaccaagaagcgtgtgagccgtaggagcatctttgaaatgtatgagcccagtgagctagaaagcagccacctcacagatcaggacaatgaaatccgagccactgacctgcctgagaggttccagctccgctccatcccagtcaagggggctgaagatgatgaactagaagaagaagctgactggatctacaggaatgcttttgccacaccaaccatttctctccaggaaagctgtgattacctagaccgagggcagccagccagcagcttcagtcggaaagggcccagcacaattcagaagatcaaagaggccctgggcttcatgcgaaatcagcattttgaggtgccttttattgccttctatcgaaaggagtatgtggagcctgagttgcacatcaatgacctatggagagtctggcagtgggatgaaaagtggacccagctgcggatccgtaaagagaacctaacacggctgtttgagaagatgcaggcttatcagtatgaacagatctctgctgaccctgacaaacctcttgctgatggcatccgggctctggacaccactgacatggagaggctcaaggatgtccaatcaatggatgagctgaaagatgtctacaaccattttcttctttattatggccgagacatccctaagatgcagaacgccgccaaagctagccgcaagaagctgaagcgtgtcagggaagagggagatgaagaaggtgaaggtgacgaggcagaagatgaggagcagagggggcctgagctcaagcaagcctctcgccgagacatgtacaccatctgccagagtgctgggctagatggnctggccaaaaagtttgggcttactcccgagcagtttggggagaacctgcgggatagctaccagcggcacgagacagagcagtttcccgcggagcccttggagctggccaaggattacgtttgcagccagttccctactccagaagctgtgctagaaggcgcccgctacatggtagccctgcagattgcccgtgagccccttgtccggcaggtgctgaggcaaaccttccaagagagagccaagttaaatataacccccaccaagaaaggtagaaaggatgtggatgaggcccactatgcctattccttcaagtatttaaagaacaagcctgttaaggaactgagagatgaccagtttctcaagatatgcctggctgaagacgaagggctcctcaccactgacatcagcatagatttgaagggagtggaaggctatggcaacgaccagacatattttgaggagataaaacagttttactaccgagatgagttcagccaccaggtgcaggagtggaaccggcagcgcaccatggccatcgaacgggctttacagcagttcctctatgtgcagatggccaaagaactcaagaacaagctgctggctgaagccaaggaatatgtcataaaggcctgtagtcgaaagctctacaattggttgagagtggcaccctaccgaccagatcagcaggtggaagaagatgacgactttatggacgagaaccaagggaagggcattcgagtcctcggcattgctttctcctctgccagagatcaccctgtgttctgcgccctggtcaatggtgaaggagaagtgacagacttccttcgactgccccattttaccaaacggcgaactgcatggagagaggaagagcgggaaaagaaggctcaagacattgaaacgctaaagaaatttctcctgaataagaagcctcatgtagtgacagttgcaggagagaacagggacgcccagatgttgattgaagatgtgaagcgcattgtacatgagctggaccagggccagcagctgtcatctattggggtagagctggttgacaacgagttggccattctctatatgaacagcaagaagtcagaggcagagttccgggattatcctccagtgctgagacaggccgtctccctggcccggcgcatccaggaccctctgattgaatttgcccaggtgtgcagttccgatgaagacatcctgtgtctcaagtttcaccccttgcaggagcatgtggtgaaagaggagctgctcaacgccttgtactgtgaatttatcaaccgagtcaatgaggtcggggtcgatgtcaaccgtgccattgcccacccttacagccaggccttgatccagtatgtttgtggcctgggacctcggaaagggacccacctcctgaagatcctgaagcagaacaacacccggctcgagagccggacccagctggtcaccatgtgccacatgggtcccaaagtcttcatgaattgtgctggcttcctcaagatcgacacggcctccctgggggacagcactgactcatatattgaagtccttgatggttcccgtgtccaccctgagacttatgagtgggctaggaagatggcagtggatgccctggaatacgatgaatcagccgaggatgccaatcctgcaggagcccttgaagaaatcttggaaaacccagagcgactgaaagacctggaccttgatgcctttgcagaagagctggagaggcagggctatggtgacaaacacatcacactctatgacatccgggcagagctgagctgtcgatataaggacctccggacagcctaccgctctcccaacacagaggagatcttcaatatgttaaccaaagaaacaccagagaccttctacattggaaagctcatcatctgcaatgtcactggcattgcccacaggcgtccccagggtgagagctatgaccaggcgatccgcaatgatgagacagggctgtggcagtgccccttctgtcagcaggacaatttccctgaactaagcgaggtgtggaaccactttgacagcggttcgtgcccaggccaggccatcggtgtcaaaacacggctagacaatggtgtcaccggcttcatccccaccaaattcctcagtgacaaagtggtaaagcggccagaagaacgagtgaaggtgggaatgactgttcactgccgcatcatgaagattgacattgagaagttcagtgcagacctgacctgccgcacctcagacctcatggacaggaacaatgagtggaagctgcccaaagacacctactatgactttgatgctgaagctgcagaccacaagcaggaggaggacatgaagcggaagcagcagcggaccacatacatcaagagagtgatcgcacacccatccttccataatatcaatttcaagcaagcagaaaagatgatggagaccatggaccagggtgatgtgattatccgaccaagcagcaagggcgagaaccacctgacagtgacctggaaagtcagtgatggcatctaccagcatgtggatgtgcgggaggagggcaaggaaaatgccttcagcctgggagccactctgtggatcaacagtgaggaattcgaagatttggatgagattgttgctcgctatgtccagcccatggcatcctttgcccgggaccttctgaatcacaagtattatcaggactgcagcggtggggaccgcaagaaattagaggagctgctcatcaaaactaagaaggagaagcccaccttcatcccttatttcatctgtgcctgcaaggaactgcccggcaagttcctactgggataccagccccggggtaaacccaggatagaatatgtaacggtgactccagagggattccggtaccggggccagatcttcccaaccgtgaatggactgtttagatggtttaaggatcactaccaggatcctgtaccaggcatcacccctagcagcagcagcaggacccggacacctgcctctatcaatgctaccccagccaacatcaaccttgcagatctgacacgggctgtgaatgccctgcctcagaacatgacttcacagatgttcagtgccattgctgcggtgacaggccaaggacagaaccctaatgccaccccagcccagtgggcctccagccagtacggctatggcggcagtggaggcggcagcagtgcttaccacgtattcccaacgccagcccagcagccagtggccacaccactaatgacccctagctactcctacacgaccccaagccagcccatcaccacccctcagtaccaccagctccaggccagcaccaccccacagtcggcccaggcccagccccagccctcttccagctcccggcaacggcagcagcagccaaagtccaacagccatgcagccatcgactggggaaaaatggcggagcagtggctgcaggaaaaggaggcagaacggcggaaacagaagcagcggctgacacctcggccctcccccagccccatgatcgaaagcacccccatgtccattgctggcgatgccaccccactcctggacgagatggatcggtagggggcctgctcctcggactctggttacctctgaggctgggaaaggcctggctgcccactgcctccctccctgcccctccttttatgtccataaagtggcgtgaagtgagacgttctctttggtggtcaacccggatgggtgacaggctggatggccttgtgaacttgagctcagtgtatgctaggcaacaattctcccgctccagaccctcaccgaccacctgtcctgggaccaggctgggaggggagtgtggcagggaggaggaagaggaaggtgagaatgagtagaacagttttgtattctactccctacaagccattttgaacttctgccctcaccggactctgggctgtgactggggcaccaaactcagcacatgagtctcccctagctctcgtggggagagggatgctatttattcagtttggggcaggagggagaggagggaaagtatttctgaccctgatgccaacagccgggtggctgtccaagcaggattgcaggggacacagggaagcactgcccagcccctgcctggctgccctttcccccctgctgctgccaccgcttcctgcctgtcatttgaataaacagtgtttctattgaaaaaaaaaaaaa

SEQ ID NO: 64081 - DNA, 418 bp, Homo sapiens
tggtggggatcaccggcagcacgaggatgcggcaggacgagcatggctacatctcccggtgcttcacgcggaaatacacgctgccccccggtgtggaccccacccaagtttcctcctccctgtcccctgagggcacactgaccgtggaggcccccatgcccaagctagccacgcagtccaacgagatcaccatcccagtcaccttcgagtcgcgggcccagcttgacgaagcaatggtgggcacgaagcagtggttgggaccgcaagaaattagaggagctgctcatcaaaactaagaaggagaagcccaccttcatcccttatttcatctgtgcctgcaaggaactgcccggcaagttcctactgggataccagccccggggtaaacccaggtgagcactagtgctgagaaggtgct

SEQ ID NO: 64082 - DNA, 6028 bp, Homo sapiens
  misc_feature (1831)..(1831): n is a, c, g, or t
ccgggcttgccaggtctctccaccttccggattcaagagattctcctgcctcagcctcctgagtagcctggcttttgccttctttttgaaattatcttcaggcagagtgagaagctgcagcaatgtctgattttgtggaaagcgaggctgaggagtcagaggaagaatacaatgatgaaggcgaggtggtaccccgagtcaccaagaaatttgtggaagaggaggatgatggtgaggagccccagcctcaagcttctccccactattgctaagctttggatagttggattcttgctgatgaaaagctcaggctcagcacagaagttatcacacatgagatgaggaggaggaggaggagaacctagatgatcaggatgagcaaggcaacttgaaaggctttatcaatgacgatgatgatgaagatgaaggggaggaggatgagggcagtgactctggtgattcagaagatgatgttggccacaagaagagaaaacgcacctcttttgatgaccgcctggaggatgatgattttgacctcattgaggagaatttgggtgtcaaagtcaaaagaggacaaaagtaccggcgtgtcaaaaaaatgtcagatgacgaggacgatgacgaggaggaatatggcaaggaggaacatgaaaaagaagctattgcggaagaaatcttccaggatggggaaggggaagaagggcaggaggccatggaggcccccatggctcctccagaggaggaggaagaagatgatgaggagtcagatattgacgacttcattgtggatgatgatggacagcctctgaaaaaacctaagtggcggaaaaagcttcctggatacacagacgcggccctgcaagaagcccaggaaatcttcggtgtggactttgactatgatgaatttgagaaatacaatgagtatgatgaagaactggaggaagagtatgagtatgaggatgatgaggctgagggtgaaatccgagtgcgccccaagaagaccaccaagaagcgtgtgagccgtaggagcatctttgaaatgtatgagcccagtgagctagaaagcagccacctcacagatcaggacaatgaaatccgagccactgacctgcctgagaggttccagctccgctccatcccagtcaagggggctgaagatgatgaactagaagaagaagctgactggatctacaggaatgcttttgccacaccaaccatttctctccaggaaagctgtgattacctagaccgagggcagccagccagcagcttcagtcggaaagggcccagcacaattcagaagatcaaagaggccctgggcttcatgcgaaatcagcattttgaggtgccttttattgccttctatcgaaaggagtatgtggagcctgagttgcacatcaatgacctatggagagtctggcagtgggatgaaaagtggacccagctgcggatccgtaaagagaacctaacacggctgtttgagaagatgcaggcttatcagtatgaacagatctctgctgaccctgacaaacctcttgctgatggcatccgggctctggacaccactgacatggagaggctcaaggatgtccaatcaatggatgagctgaaagatgtctacaaccattttcttctttattatggccgagacatccctaagatgcagaacgccgccaaagctagccgcaagaagctgaagcgtgtcagggaagagggagatgaagaaggtgaaggtgacgaggcagaagatgaggagcagagggggcctgagctcaagcaagcctctcgccgagacatgtacaccatctgccagagtgctgggctagatggnctggccaaaaagtttgggcttactcccgagcagtttggggagaacctgcgggatagctaccagcggcacgagacagagcagtttcccgcggagcccttggagctggccaaggattacgtttgcagccagttccctactccagaagctgtgctagaaggcgcccgctacatggtagccctgcagattgcccgtgagccccttgtccggcaggtgctgaggcaaaccttccaagagagagccaagttaaatataacccccaccaagaaaggtagaaaggatgtggatgaggcccactatgcctattccttcaagtatttaaagaacaagcctgttaaggaactgagagatgaccagtttctcaagatatgcctggctgaagacgaagggctcctcaccactgacatcagcatagatttgaagggagtggaaggctatggcaacgaccagacatattttgaggagataaaacagttttactaccgagatgagttcagccaccaggtgcaggagtggaaccggcagcgcaccatggccatcgaacgggctttacagcagttcctctatgtgcagatggccaaagaactcaagaacaagctgctggctgaagccaaggaatatgtcataaaggcctgtagtcgaaagctctacaattggttgagagtggcaccctaccgaccagatcagcaggtggaagaagatgacgactttatggacgagaaccaagggaagggcattcgagtcctcggcattgctttctcctctgccagagatcaccctgtgttctgcgccctggtcaatggtgaaggagaagtgacagacttccttcgactgccccattttaccaaacggcgaactgcatggagagaggaagagcgggaaaagaaggctcaagacattgaaacgctaaagaaatttctcctgaataagaagcctcatgtagtgacagttgcaggagagaacagggacgcccagatgttgattgaagatgtgaagcgcattgtacatgagctggaccagggccagcagctgtcatctattggggtagagctggttgacaacgagttggccattctctatatgaacagcaagaagtcagaggcagagttccgggattatcctccagtgctgagacaggccgtctccctggcccggcgcatccaggaccctctgattgaatttgcccaggtgtgcagttccgatgaagacatcctgtgtctcaagtttcaccccttgcaggagcatgtggtgaaagaggagctgctcaacgccttgtactgtgaatttatcaaccgagtcaatgaggtcggggtcgatgtcaaccgtgccattgcccacccttacagccaggccttgatccagtatgtttgtggcctgggacctcggaaagggacccacctcctgaagatcctgaagcagaacaacacccggctcgagagccggacccagctggtcaccatgtgccacatgggtcccaaagtcttcatgaattgtgctggcttcctcaagatcgacacggcctccctgggggacagcactgactcatatattgaagtccttgatggttcccgtgtccaccctgagacttatgagtgggctaggaagatggcagtggatgccctggaatacgatgaatcagccgaggatgccaatcctgcaggagcccttgaagaaatcttggaaaacccagagcgactgaaagacctggaccttgatgcctttgcagaagagctggagaggcagggctatggtgacaaacacatcacactctatgacatccgggcagagctgagctgtcgatataaggacctccggacagcctaccgctctcccaacacagaggagatcttcaatatgttaaccaaagaaacaccagagaccttctacattggaaagctcatcatctgcaatgtcactggcattgcccacaggcgtccccagggtgagagctatgaccaggcgatccgcaatgatgagacagggctgtggcagtgccccttctgtcagcaggacaatttccctgaactaagcgaggtgtggaaccactttgacagcggttcgtgcccaggccaggccatcggtgtcaaaacacggctagacaatggtgtcaccggcttcatccccaccaaattcctcagtgacaaagtggtaaagcggccagaagaacgagtgaaggtgggaatgactgttcactgccgcatcatgaagattgacattgagaagttcagtgcagacctgacctgccgcacctcagacctcatggacaggaacaatgagtggaagctgcccaaagacacctactatgactttgatgctgaagctgcagaccacaagcaggaggaggacatgaagcggaagcagcagcggaccacatacatcaagagagtgatcgcacacccatccttccataatatcaatttcaagcaagcagaaaagatgatggagaccatggaccagggtgatgtgattatccgaccaagcagcaagggcgagaaccacctgacagtgacctggaaagtcagtgatggcatctaccagcatgtggatgtgcgggaggagggcaaggaaaatgccttcagcctgggagccactctgtggatcaacagtgaggaattcgaagatttggatgagattgttgctcgctatgtccagcccatggcatcctttgcccgggaccttctgaatcacaagtattatcaggactgcagcggtggggaccgcaagaaattagaggagctgctcatcaaaactaagaaggagaagcccaccttcatcccttatttcatctgtgcctgcaaggaactgcccggcaagttcctactgggataccagccccggggtaaacccaggatagaatatgtaacggtgactccagagggattccggtaccggggccagatcttcccaaccgtgaatggactgtttagatggtttaaggatcactaccaggatcctgtaccaggcatcacccctagcagcagcagcaggacccggacacctgcctctatcaatgctaccccagccaacatcaaccttgcagatctgacacgggctgtgaatgccctgcctcagaacatgacttcacagatgttcagtgccattgctgcggtgacaggccaaggacagaaccctaatgccaccccagcccagtgggcctccagccagtacggctatggcggcagtggaggcggcagcagtgcttaccacgtattcccaacgccagcccagcagccagtggccacaccactaatgacccctagctactcctacacgaccccaagccagcccatcaccacccctcagtaccaccagctccaggccagcaccaccccacagtcggcccaggcccagccccagccctcttccagctcccggcaacggcagcagcagccaaagtccaacagccatgcagccatcgactggggaaaaatggcggagcagtggctgcaggaaaaggaggcagaacggcggaaacagaagcagcggctgacacctcggccctcccccagccccatgatcgaaagcacccccatgtccattgctggcgatgccaccccactcctggacgagatggatcggtagggggcctgctcctcggactctggttacctctgaggctgggaaaggcctggctgcccactgcctccctccctgcccctccttttatgtccataaagtggcgtgaagtgagacgttctctttggtggtcaacccggatgggtgacaggctggatggccttgtgaacttgagctcagtgtatgctaggcaacaattctcccgctccagaccctcaccgaccacctgtcctgggaccaggctgggaggggagtgtggcagggaggaggaagaggaaggtgagaatgagtagaacagttttgtattctactccctacaagccattttgaacttctgccctcaccggactctgggctgtgactggggcaccaaactcagcacatgagtctcccctagctctcgtggggagagggatgctatttattcagtttggggcaggagggagaggagggaaagtatttctgaccctgatgccaacagccgggtggctgtccaagcaggattgcaggggacacagggaagcactgcccagcccctgcctggctgccctttcccccctgctgctgccaccgcttcctgcctgtcatttgaataaacagtgtttctattgaaaaaaaaaaaaa

SEQ ID NO: 64083 - DNA, 5764 bp, Homo sapiens
  misc_feature (1567)..(1567): n is a, c, g, or t
atagatccccccttccaacatctcatttgtggtaccccgagtcaccaagaaatttgtggaagaggaggatgatgatgaggaggaggaggaggagaacctagatgatcaggatgagcaaggcaacttgaaaggctttatcaatgacgatgatgatgaagatgaaggggaggaggatgagggcagtgactctggtgattcagaagatgatgttggccacaagaagagaaaacgcacctcttttgatgaccgcctggaggatgatgattttgacctcattgaggagaatttgggtgtcaaagtcaaaagaggacaaaagtaccggcgtgtcaaaaaaatgtcagatgacgaggacgatgacgaggaggaatatggcaaggaggaacatgaaaaagaagctattgcggaagaaatcttccaggatggggaaggggaagaagggcaggaggccatggaggcccccatggctcctccagaggaggaggaagaagatgatgaggagtcagatattgacgacttcattgtggatgatgatggacagcctctgaaaaaacctaagtggcggaaaaagcttcctggatacacagacgcggccctgcaagaagcccaggaaatcttcggtgtggactttgactatgatgaatttgagaaatacaatgagtatgatgaagaactggaggaagagtatgagtatgaggatgatgaggctgagggtgaaatccgagtgcgccccaagaagaccaccaagaagcgtgtgagccgtaggagcatctttgaaatgtatgagcccagtgagctagaaagcagccacctcacagatcaggacaatgaaatccgagccactgacctgcctgagaggttccagctccgctccatcccagtcaagggggctgaagatgatgaactagaagaagaagctgactggatctacaggaatgcttttgccacaccaaccatttctctccaggaaagctgtgattacctagaccgagggcagccagccagcagcttcagtcggaaagggcccagcacaattcagaagatcaaagaggccctgggcttcatgcgaaatcagcattttgaggtgccttttattgccttctatcgaaaggagtatgtggagcctgagttgcacatcaatgacctatggagagtctggcagtgggatgaaaagtggacccagctgcggatccgtaaagagaacctaacacggctgtttgagaagatgcaggcttatcagtatgaacagatctctgctgaccctgacaaacctcttgctgatggcatccgggctctggacaccactgacatggagaggctcaaggatgtccaatcaatggatgagctgaaagatgtctacaaccattttcttctttattatggccgagacatccctaagatgcagaacgccgccaaagctagccgcaagaagctgaagcgtgtcagggaagagggagatgaagaaggtgaaggtgacgaggcagaagatgaggagcagagggggcctgagctcaagcaagcctctcgccgagacatgtacaccatctgccagagtgctgggctagatggnctggccaaaaagtttgggcttactcccgagcagtttggggagaacctgcgggatagctaccagcggcacgagacagagcagtttcccgcggagcccttggagctggccaaggattacgtttgcagccagttccctactccagaagctgtgctagaaggcgcccgctacatggtagccctgcagattgcccgtgagccccttgtccggcaggtgctgaggcaaaccttccaagagagagccaagttaaatataacccccaccaagaaaggtagaaaggatgtggatgaggcccactatgcctattccttcaagtatttaaagaacaagcctgttaaggaactgagagatgaccagtttctcaagatatgcctggctgaagacgaagggctcctcaccactgacatcagcatagatttgaagggagtggaaggctatggcaacgaccagacatattttgaggagataaaacagttttactaccgagatgagttcagccaccaggtgcaggagtggaaccggcagcgcaccatggccatcgaacgggctttacagcagttcctctatgtgcagatggccaaagaactcaagaacaagctgctggctgaagccaaggaatatgtcataaaggcctgtagtcgaaagctctacaattggttgagagtggcaccctaccgaccagatcagcaggtggaagaagatgacgactttatggacgagaaccaagggaagggcattcgagtcctcggcattgctttctcctctgccagagatcaccctgtgttctgcgccctggtcaatggtgaaggagaagtgacagacttccttcgactgccccattttaccaaacggcgaactgcatggagagaggaagagcgggaaaagaaggctcaagacattgaaacgctaaagaaatttctcctgaataagaagcctcatgtagtgacagttgcaggagagaacagggacgcccagatgttgattgaagatgtgaagcgcattgtacatgagctggaccagggccagcagctgtcatctattggggtagagctggttgacaacgagttggccattctctatatgaacagcaagaagtcagaggcagagttccgggattatcctccagtgctgagacaggccgtctccctggcccggcgcatccaggaccctctgattgaatttgcccaggtgtgcagttccgatgaagacatcctgtgtctcaagtttcaccccttgcaggagcatgtggtgaaagaggagctgctcaacgccttgtactgtgaatttatcaaccgagtcaatgaggtcggggtcgatgtcaaccgtgccattgcccacccttacagccaggccttgatccagtatgtttgtggcctgggacctcggaaagggacccacctcctgaagatcctgaagcagaacaacacccggctcgagagccggacccagctggtcaccatgtgccacatgggtcccaaagtcttcatgaattgtgctggcttcctcaagatcgacacggcctccctgggggacagcactgactcatatattgaagtccttgatggttcccgtgtccaccctgagacttatgagtgggctaggaagatggcagtggatgccctggaatacgatgaatcagccgaggatgccaatcctgcaggagcccttgaagaaatcttggaaaacccagagcgactgaaagacctggaccttgatgcctttgcagaagagctggagaggcagggctatggtgacaaacacatcacactctatgacatccgggcagagctgagctgtcgatataaggacctccggacagcctaccgctctcccaacacagaggagatcttcaatatgttaaccaaagaaacaccagagaccttctacattggaaagctcatcatctgcaatgtcactggcattgcccacaggcgtccccagggtgagagctatgaccaggcgatccgcaatgatgagacagggctgtggcagtgccccttctgtcagcaggacaatttccctgaactaagcgaggtgtggaaccactttgacagcggttcgtgcccaggccaggccatcggtgtcaaaacacggctagacaatggtgtcaccggcttcatccccaccaaattcctcagtgacaaagtggtaaagcggccagaagaacgagtgaaggtgggaatgactgttcactgccgcatcatgaagattgacattgagaagttcagtgcagacctgacctgccgcacctcagacctcatggacaggaacaatgagtggaagctgcccaaagacacctactatgactttgatgctgaagctgcagaccacaagcaggaggaggacatgaagcggaagcagcagcggaccacatacatcaagagagtgatcgcacacccatccttccataatatcaatttcaagcaagcagaaaagatgatggagaccatggaccagggtgatgtgattatccgaccaagcagcaagggcgagaaccacctgacagtgacctggaaagtcagtgatggcatctaccagcatgtggatgtgcgggaggagggcaaggaaaatgccttcagcctgggagccactctgtggatcaacagtgaggaattcgaagatttggatgagattgttgctcgctatgtccagcccatggcatcctttgcccgggaccttctgaatcacaagtattatcaggactgcagcggtggggaccgcaagaaattagaggagctgctcatcaaaactaagaaggagaagcccaccttcatcccttatttcatctgtgcctgcaaggaactgcccggcaagttcctactgggataccagccccggggtaaacccaggatagaatatgtaacggtgactccagagggattccggtaccggggccagatcttcccaaccgtgaatggactgtttagatggtttaaggatcactaccaggatcctgtaccaggcatcacccctagcagcagcagcaggacccggacacctgcctctatcaatgctaccccagccaacatcaaccttgcagatctgacacgggctgtgaatgccctgcctcagaacatgacttcacagatgttcagtgccattgctgcggtgacaggccaaggacagaaccctaatgccaccccagcccagtgggcctccagccagtacggctatggcggcagtggaggcggcagcagtgcttaccacgtattcccaacgccagcccagcagccagtggccacaccactaatgacccctagctactcctacacgaccccaagccagcccatcaccacccctcagtaccaccagctccaggccagcaccaccccacagtcggcccaggcccagccccagccctcttccagctcccggcaacggcagcagcagccaaagtccaacagccatgcagccatcgactggggaaaaatggcggagcagtggctgcaggaaaaggaggcagaacggcggaaacagaagcagcggctgacacctcggccctcccccagccccatgatcgaaagcacccccatgtccattgctggcgatgccaccccactcctggacgagatggatcggtagggggcctgctcctcggactctggttacctctgaggctgggaaaggcctggctgcccactgcctccctccctgcccctccttttatgtccataaagtggcgtgaagtgagacgttctctttggtggtcaacccggatgggtgacaggctggatggccttgtgaacttgagctcagtgtatgctaggcaacaattctcccgctccagaccctcaccgaccacctgtcctgggaccaggctgggaggggagtgtggcagggaggaggaagaggaaggtgagaatgagtagaacagttttgtattctactccctacaagccattttgaacttctgccctcaccggactctgggctgtgactggggcaccaaactcagcacatgagtctcccctagctctcgtggggagagggatgctatttattcagtttggggcaggagggagaggagggaaagtatttctgaccctgatgccaacagccgggtggctgtccaagcaggattgcaggggacacagggaagcactgcccagcccctgcctggctgccctttcccccctgctgctgccaccgcttcctgcctgtcatttgaataaacagtgtttctattgaaaaaaaaaaaaa

SEQ ID NO: 64084 - DNA, 3261 bp, Homo sapiens
gctcgttgtgctgtacggttcgatgggagtccagaaattaatcggtctcaggaaaaaagatcccagagaagcagagaaaatgatttaaaccagaatggttggattcctcttgatgtgtagctaaggggatttaaggccctgctgaccctcgtttgactctaggcagagttccgggattatcctccagtgctgagacaggccgtctccctggcccggcgcatccaggaccctctgattgaatttgcccaggtgtgcagttccgatgaagacatcctgtgtctcaagtttcaccccttgcaggagcatgtggtgaaagaggagctgctcaacgccttgtactgtgaatttatcaaccgagtcaatgaggtcggggtcgatgtcaaccgtgccattgcccacccttacagccaggccttgatccagtatgtttgtggcctgggacctcggaaagggacccacctcctgaagatcctgaagcagaacaacacccggctcgagagccggacccagctggtcaccatgtgccacatgggtcccaaagtcttcatgaattgtgctggcttcctcaagatcgacacggcctccctgggggacagcactgactcatatattgaagtccttgatggttcccgtgtccaccctgagacttatgagtgggctaggaagatggcagtggatgccctggaatacgatgaatcagccgaggatgccaatcctgcaggagcccttgaagaaatcttggaaaacccagagcgactgaaagacctggaccttgatgcctttgcagaagagctggagaggcagggctatggtgacaaacacatcacactctatgacatccgggcagagctgagctgtcgatataaggacctccggacagcctaccgctctcccaacacagaggagatcttcaatatgttaaccaaagaaacaccagagaccttctacattggaaagctcatcatctgcaatgtcactggcattgcccacaggcgtccccagggtgagagctatgaccaggcgatccgcaatgatgagacagggctgtggcagtgccccttctgtcagcaggacaatttccctgaactaagcgaggtgtggaaccactttgacagcggttcgtgcccaggccaggccatcggtgtcaaaacacggctagacaatggtgtcaccggcttcatccccaccaaattcctcagtgacaaagtggtaaagcggccagaagaacgagtgaaggtgggaatgactgttcactgccgcatcatgaagattgacattgagaagttcagtgcagacctgacctgccgcacctcagacctcatggacaggaacaatgagtggaagctgcccaaagacacctactatgactttgatgctgaagctgcagaccacaagcaggaggaggacatgaagcggaagcagcagcggaccacatacatcaagagagtgatcgcacacccatccttccataatatcaatttcaagcaagcagaaaagatgatggagaccatggaccagggtgatgtgattatccgaccaagcagcaagggcgagaaccacctgacagtgacctggaaagtcagtgatggcatctaccagcatgtggatgtgcgggaggagggcaaggaaaatgccttcagcctgggagccactctgtggatcaacagtgaggaattcgaagatttggatgagattgttgctcgctatgtccagcccatggcatcctttgcccgggaccttctgaatcacaagtattatcaggactgcagcggtggggaccgcaagaaattagaggagctgctcatcaaaactaagaaggagaagcccaccttcatcccttatttcatctgtgcctgcaaggaactgcccggcaagttcctactgggataccagccccggggtaaacccaggatagaatatgtaacggtgactccagagggattccggtaccggggccagatcttcccaaccgtgaatggactgtttagatggtttaaggatcactaccaggatcctgtaccaggcatcacccctagcagcagcagcaggacccggacacctgcctctatcaatgctaccccagccaacatcaaccttgcagatctgacacgggctgtgaatgccctgcctcagaacatgacttcacagatgttcagtgccattgctgcggtgacaggccaaggacagaaccctaatgccaccccagcccagtgggcctccagccagtacggctatggcggcagtggaggcggcagcagtgcttaccacgtattcccaacgccagcccagcagccagtggccacaccactaatgacccctagctactcctacacgaccccaagccagcccatcaccacccctcagtaccaccagctccaggccagcaccaccccacagtcggcccaggcccagccccagccctcttccagctcccggcaacggcagcagcagccaaagtccaacagccatgcagccatcgactggggaaaaatggcggagcagtggctgcaggaaaaggaggcagaacggcggaaacagaagcagcggctgacacctcggccctcccccagccccatgatcgaaagcacccccatgtccattgctggcgatgccaccccactcctggacgagatggatcggtagggggcctgctcctcggactctggttacctctgaggctgggaaaggcctggctgcccactgcctccctccctgcccctccttttatgtccataaagtggcgtgaagtgagacgttctctttggtggtcaacccggatgggtgacaggctggatggccttgtgaacttgagctcagtgtatgctaggcaacaattctcccgctccagaccctcaccgaccacctgtcctgggaccaggctgggaggggagtgtggcagggaggaggaagaggaaggtgagaatgagtagaacagttttgtattctactccctacaagccattttgaacttctgccctcaccggactctgggctgtgactggggcaccaaactcagcacatgagtctcccctagctctcgtggggagagggatgctatttattcagtttggggcaggagggagaggagggaaagtatttctgaccctgatgccaacagccgggtggctgtccaagcaggattgcaggggacacagggaagcactgcccagcccctgcctggctgccctttcccccctgctgctgccaccgcttcctgcctgtcatttgaataaacagtgtttctattgaaaaaaaaaaaaa

SEQ ID NO: 64085 - DNA, 3262 bp, Homo sapiens
ccgggcttgccaggtctctccaccttccggattcaagagattctcctgcctcagcctcctgagtagcctggcttttgccttctttttgaaattatcttcaggcagagtgagaagctgcagcaatgtctgattttgtggaaagcgaggctgaggagtcagaggaagaatacaatgatgaaggcgaggtggtaccccgagtcaccaagaaatttgtggaagaggaggatgatggtgaggagccccagcctcaagcttctccccactattgctaagctttggatagttggattcttgctgatgaaaagctcaggctcagcacagaagttatcacacatgagatgaggaggaggaggaggagaacctagatgatcaggatgagcaaggcaacttgaaaggctttatcaatgacgatgatgatgaagatgaaggggaggaggatgagggcagtgactctggtgattcagaagatgatgttggccacaagaagagaaaacgcacctcttttgatgaccgcctggaggatgatgattttgacctcattgaggagaatttgggtgtcaaagtcaaaagaggacaaaagtaccggcgtgtcaaaaaaatgtcagatgacgaggacgatgacgaggaggaatatggcaaggaggaacatgaaaaagaagctattgcggaagaaatcttccaggatggggaaggggaagaagggcaggaggccatggaggcccccatggctcctccagaggaggaggaagaagatgatgaggagtcagatattgacgacttcattgtggatgatgatggacagcctctgaaaaaacctaagtggcggaaaaagcttcctggatacacagacgcggccctgcaagaagcccaggaaatcttcggtgtggactttgactatgatgaatttatcttcaatatgttaaccaaagaaacaccagagaccttctacattggaaagctcatcatctgcaatgtcactggcattgcccacaggcgtccccagggtgagagctatgaccaggcgatccgcaatgatgagacagggctgtggcagtgccccttctgtcagcaggacaatttccctgaactaagcgaggtgtggaaccactttgacagcggttcgtgcccaggccaggccatcggtgtcaaaacacggctagacaatggtgtcaccggcttcatccccaccaaattcctcagtgacaaagtggtaaagcggccagaagaacgagtgaaggtgggaatgactgttcactgccgcatcatgaagattgacattgagaagttcagtgcagacctgacctgccgcacctcagacctcatggacaggaacaatgagtggaagctgcccaaagacacctactatgactttgatgctgaagctgcagaccacaagcaggaggaggacatgaagcggaagcagcagcggaccacatacatcaagagagtgatcgcacacccatccttccataatatcaatttcaagcaagcagaaaagatgatggagaccatggaccagggtgatgtgattatccgaccaagcagcaagggcgagaaccacctgacagtgacctggaaagtcagtgatggcatctaccagcatgtggatgtgcgggaggagggcaaggaaaatgccttcagcctgggagccactctgtggatcaacagtgaggaattcgaagatttggatgagattgttgctcgctatgtccagcccatggcatcctttgcccgggaccttctgaatcacaagtattatcaggactgcagcggtggggaccgcaagaaattagaggagctgctcatcaaaactaagaaggagaagcccaccttcatcccttatttcatctgtgcctgcaaggaactgcccggcaagttcctactgggataccagccccggggtaaacccaggatagaatatgtaacggtgactccagagggattccggtaccggggccagatcttcccaaccgtgaatggactgtttagatggtttaaggatcactaccaggatcctgtaccaggcatcacccctagcagcagcagcaggacccggacacctgcctctatcaatgctaccccagccaacatcaaccttgcagatctgacacgggctgtgaatgccctgcctcagaacatgacttcacagatgttcagtgccattgctgcggtgacaggccaaggacagaaccctaatgccaccccagcccagtgggcctccagccagtacggctatggcggcagtggaggcggcagcagtgcttaccacgtattcccaacgccagcccagcagccagtggccacaccactaatgacccctagctactcctacacgaccccaagccagcccatcaccacccctcagtaccaccagctccaggccagcaccaccccacagtcggcccaggcccagccccagccctcttccagctcccggcaacggcagcagcagccaaagtccaacagccatgcagccatcgactggggaaaaatggcggagcagtggctgcaggaaaaggaggcagaacggcggaaacagaagcagcggctgacacctcggccctcccccagccccatgatcgaaagcacccccatgtccattgctggcgatgccaccccactcctggacgagatggatcggtagggggcctgctcctcggactctggttacctctgaggctgggaaaggcctggctgcccactgcctccctccctgcccctccttttatgtccataaagtggcgtgaagtgagacgttctctttggtggtcaacccggatgggtgacaggctggatggccttgtgaacttgagctcagtgtatgctaggcaacaattctcccgctccagaccctcaccgaccacctgtcctgggaccaggctgggaggggagtgtggcagggaggaggaagaggaaggtgagaatgagtagaacagttttgtattctactccctacaagccattttgaacttctgccctcaccggactctgggctgtgactggggcaccaaactcagcacatgagtctcccctagctctcgtggggagagggatgctatttattcagtttggggcaggagggagaggagggaaagtatttctgaccctgatgccaacagccgggtggctgtccaagcaggattgcaggggacacagggaagcactgcccagcccctgcctggctgccctttcccccctgctgctgccaccgcttcctgcctgtcatttgaataaacagtgtttctattgaaaaaaaaaaaaa

SEQ ID NO: 64086 - DNA, 2443 bp, Homo sapiens
cgccacacctttgtctagccgtgttttgacaccgatggcctgtcctgggcacgaaccgctgtcaaagtggcgccacacctcgcttagttcagggaaattcgccctgctgacagaaggggcactgccacagccctgaaagctcatcatctgcaatgtcactggcattgcccacaggcgtccccagggtgagagctatgaccaggcgatccgcaatgatgagacagggctgtggcagtgccccttctgtcagcaggacaatttccctgaactaagcgaggtgtggaaccactttgacagcggttcgtgcccaggccaggccatcggtgtcaaaacacggctagacaatggtgtcaccggcttcatccccaccaaattcctcagtgacaaagtggtaaagcggccagaagaacgagtgaaggtgggaatgactgttcactgccgcatcatgaagattgacattgagaagttcagtgcagacctgacctgccgcacctcagacctcatggacaggaacaatgagtggaagctgcccaaagacacctactatgactttgatgctgaagctgcagaccacaagcaggaggaggacatgaagcggaagcagcagcggaccacatacatcaagagagtgatcgcacacccatccttccataatatcaatttcaagcaagcagaaaagatgatggagaccatggaccagggtgatgtgattatccgaccaagcagcaagggcgagaaccacctgacagtgacctggaaagtcagtgatggcatctaccagcatgtggatgtgcgggaggagggcaaggaaaatgccttcagcctgggagccactctgtggatcaacagtgaggaattcgaagatttggatgagattgttgctcgctatgtccagcccatggcatcctttgcccgggaccttctgaatcacaagtattatcaggactgcagcggtggggaccgcaagaaattagaggagctgctcatcaaaactaagaaggagaagcccaccttcatcccttatttcatctgtgcctgcaaggaactgcccggcaagttcctactgggataccagccccggggtaaacccaggatagaatatgtaacggtgactccagagggattccggtaccggggccagatcttcccaaccgtgaatggactgtttagatggtttaaggatcactaccaggatcctgtaccaggcatcacccctagcagcagcagcaggacccggacacctgcctctatcaatgctaccccagccaacatcaaccttgcagatctgacacgggctgtgaatgccctgcctcagaacatgacttcacagatgttcagtgccattgctgcggtgacaggccaaggacagaaccctaatgccaccccagcccagtgggcctccagccagtacggctatggcggcagtggaggcggcagcagtgcttaccacgtattcccaacgccagcccagcagccagtggccacaccactaatgacccctagctactcctacacgaccccaagccagcccatcaccacccctcagtaccaccagctccaggccagcaccaccccacagtcggcccaggcccagccccagccctcttccagctcccggcaacggcagcagcagccaaagtccaacagccatgcagccatcgactggggaaaaatggcggagcagtggctgcaggaaaaggaggcagaacggcggaaacagaagcagcggctgacacctcggccctcccccagccccatgatcgaaagcacccccatgtccattgctggcgatgccaccccactcctggacgagatggatcggtagggggcctgctcctcggactctggttacctctgaggctgggaaaggcctggctgcccactgcctccctccctgcccctccttttatgtccataaagtggcgtgaagtgagacgttctctttggtggtcaacccggatgggtgacaggctggatggccttgtgaacttgagctcagtgtatgctaggcaacaattctcccgctccagaccctcaccgaccacctgtcctgggaccaggctgggaggggagtgtggcagggaggaggaagaggaaggtgagaatgagtagaacagttttgtattctactccctacaagccattttgaacttctgccctcaccggactctgggctgtgactggggcaccaaactcagcacatgagtctcccctagctctcgtggggagagggatgctatttattcagtttggggcaggagggagaggagggaaagtatttctgaccctgatgccaacagccgggtggctgtccaagcaggattgcaggggacacagggaagcactgcccagcccctgcctggctgccctttcccccctgctgctgccaccgcttcctgcctgtcatttgaataaacagtgtttctattgaaaaaaaaaaaaa

SEQ ID NO: 64087 - DNA, 4994 bp, Homo sapiens
  misc_feature (1307)..(1307): n is a, c, g, or t
gcctggaggatgatgattttctcctcaatgaggtcaaagtcaaaagaggacaaaagtaccggcgtgtcaaaaaaatgtcagatgacgaggacgatgacgaggaggaatatggcaaggaggaacatgaaaaagaagctattgcggaagaaatcttccaggatggggaaggggaagaagggcaggaggccatggaggcccccatggctcctccagaggaggaggaagaagatgatgaggagtcagatattgacgacttcattgtggatgatgatggacagcctctgaaaaaacctaagtggcggaaaaagcttcctggatacacagacgcggccctgcaagaagcccaggaaatcttcggtgtggactttgactatgatgaatttgagaaatacaatgagtatgatgaagaactggaggaagagtatgagtatgaggatgatgaggctgagggtgaaatccgagtgcgccccaagaagaccaccaagaagcgtgtgagccgtaggagcatctttgaaatgtatgagcccagtgagctagaaagcagccacctcacagatcaggacaatgaaatccgagccactgacctgcctgagaggttccagctccgctccatcccagtcaagggggctgaagatgatgaactagaagaagaagctgactggatctacaggaatgcttttgccacaccaaccatttctctccaggaaagctgtgattacctagaccgagggcagccagccagcagcttcagtcggaaagggcccagcacaattcagaagatcaaagaggccctgggcttcatgcgaaatcagcattttgaggtgccttttattgccttctatcgaaaggagtatgtggagcctgagttgcacatcaatgacctatggagagtctggcagtgggatgaaaagtggacccagctgcggatccgtaaagagaacctaacacggctgtttgagaagatgcaggcttatcagtatgaacagatctctgctgaccctgacaaacctcttgctgatggcatccgggctctggacaccactgacatggagaggctcaaggatgtccaatcaatggatgagctgaaagatgtctacaaccattttcttctttattatggccgagacatccctaagatgcagaacgccgccaaagctagccgcaagaagctgaagcgtgtcagggaagagggagatgaagaaggtgaaggtgacgaggcagaagatgaggagcagagggggcctgagctcaagcaagcctctcgccgagacatgtacaccatctgccagagtgctgggctagatggnctggccaaaaagtttgggcttactcccgagcagtttggggagaacctgcgggatagctaccagcggcacgagacagagcagtttcccgcggagcccttggagctggccaaggattacgtttgcagccagttccctactccagaagctgtgctagaaggcgcccgctacatggtagccctgcagattgcccgtgagccccttgtccggcaggtgctgaggcaaaccttccaagagagagccaagttaaatataacccccaccaagaaaggtagaaaggatgtggatgaggcccactatgcctattccttcaagtatttaaagaacaagcctgttaaggaactgagagatgaccagtttctcaagatatgcctggctgaagacgaagggctcctcaccactgacatcagcatagatttgaagggagtggaaggctatggcaacgaccagacatattttgaggagataaaacagttttactaccgagatgagttcagccaccaggtgcaggagtggaaccggcagcgcaccatggccatcgaacgggctttacagcagttcctctatgtgcagatggccaaagaactcaagaacaagctgctggctgaagccaaggaatatgtcataaaggcctgtagtcgaaagctctacaattggttgagagtggcaccctaccgaccagatcagcaggtggaagaagatgacgactttatggacgagaaccaagggaagggcattcgagtcctcggcattgctttctcctctgccagagatcaccctgtgttctgcgccctggtcaatggtgaaggagaagtgacagacttccttcgactgccccattttaccaaacggcgaactgcatggagagaggaagagcgggaaaagaaggctcaagacattgaaacgctaaagaaatttctcctgaataagaagcctcatgtagtgacagttgcaggagagaacagggacgcccagatgttgattgaagatgtgaagcgcattgtacatgagctggaccagggccagcagctgtcatctattggggtagagctggttgacaacgagttggccattctctatatgaacagcaagaagtcagaggcagagttccgggattatcctccagtgctgagacaggccgtctccctggcccggcgcatccaggaccctctgattgaatttgcccaggtgtgcagttccgatgaagacatcctgtgtctcaagtttcaccccttgcaggagcatgtggtgaaagaggagctgctcaacgccttgtactgtgaatttatcaaccgagtcaatgaggtcggggtcgatgtcaaccgtgccattgcccacccttacagccaggccttgatccagtatgtttgtggcctgggacctcggaaagggacccacctcctgaagatcctgaagcagaacaacacccggctcgagagccggacccagctggtcaccatgtgccacatgggtcccaaagtcttcatgaattgtgctggcttcctcaagatcgacacggcctccctgggggacagcactgactcatatattgaagtccttgatggttcccgtgtccaccctgagacttatgagtgggctaggaagatggcagtggatgccctggaatacgatgaatcagccgaggatgccaatcctgcaggagcccttgaagaaatcttggaaaacccagagcgactgaaagacctggaccttgatgcctttgcagaagagctggagaggcagggctatggtgacaaacacatcacactctatgacatccgggcagagctgagctgtcgatataaggacctccggacagcctaccgctctcccaacacagaggagatcttcaatatgttaaccaaagaaacaccagagaccttctacattggaaagctcatcatctgcaatgtcactggcattgcccacaggcgtccccagggtgagagctatgaccaggcgatccgcaatgatgagacagggctgtggcagtgccccttctgtcagcaggacaatttccctgaactaagcgaggtgtggaaccactttgacagcggttcgtgcccaggccaggccatcggtgtcaaaacacggctagacaatggtgtcaccggcttcatccccaccaaattcctcagtgacaaagtggtaaagcggccagaagaacgagtgaaggtgggaatgactgttcactgccgcatcatgaagattgacattgagaagttcagtgcagacctgacctgccgcacctcagacctcatggacaggaacaatgagtggaagctgcccaaagacacctactatgactttgatgctgaagctgcagaccacaagcaggaggaggacatgaagcggaagcagcagcggaccacatacatcaagagagtgatcgcacacccatccttccataatatcaatttcaagcaagcagaaaagatgatggagaccatggaccagggtgatgtgattatccgaccaagcagcaagggcgagaaccacctgacagtgacctggaaagtcagtgatggcatctaccagcatgtggatgtgcgggaggagggcaaggaaaatgccttcagcctgggagccactctgtggatcaacagtgaggaattcgaagatttggatgagattgttgctcgctatgtccagcccatggcatcctttgcccgggaccttctgaatcacaagtattatcaggactgcagcggtggggaccgcaagaaattagaggagctgctcatcaaaactaagaaggagaagcccaccttcatcccttatttcatctgtgcctgcaaggaactgcccggcaagttcctactgggataccagccccggggtaaacccaggatagaatatgtaacggtgactccagagggattccggtaccggggccagatcttcccaaccgtgaatggactgtttagatggtttaaggatcactaccaggatcctgtaccaggcatcacccctagcagcagcagcaggacccggacacctgcctctatcaatgctaccccagccaacatcaaccttgcagatctgacacgggctgtgaatgccctgcctcagaacatgacttcacagatgttcagtgccattgctgcggtgacaggccaaggacagaaccctaatgccaccccagcccagtgggcctccagccagtacggctatggcggcagtggaggcggcagcagtgcttaccacgtattcccaacgccagcccagcagccagtggccacaccactaatgacccctagctactcctacacgaccccaagccagcccatcaccacccctcagtaccaccagctccaggccagcaccaccccacagtcggcccaggcccagccccagccctcttccagctcccggcaacggcagcagcagccaaagtccaacagccatgcagccatcgactggggaaaaatggcggagcagtggctgcaggaaaaggaggcagaacggcggaaacagaagcagcggctgacacctcggccctcccccagccccatgatcgaaagcacccccatgtccattgctggcgatgccaccccactcctggacgagatggatcggtagggggcctgctcctcggactctggttacctctgaggctgggaaaggcctggctgcccactgcctccctccctgcccctccttttatgtccataaagtggcgtgaagtga

SEQ ID NO: 64088 - DNA, 4917 bp, Homo sapiens
  misc_feature (1307)..(1307): n is a, c, g, or t
gcctggaggatgatgattttctcctcaatgaggtcaaagtcaaaagaggacaaaagtaccggcgtgtcaaaaaaatgtcagatgacgaggacgatgacgaggaggaatatggcaaggaggaacatgaaaaagaagctattgcggaagaaatcttccaggatggggaaggggaagaagggcaggaggccatggaggcccccatggctcctccagaggaggaggaagaagatgatgaggagtcagatattgacgacttcattgtggatgatgatggacagcctctgaaaaaacctaagtggcggaaaaagcttcctggatacacagacgcggccctgcaagaagcccaggaaatcttcggtgtggactttgactatgatgaatttgagaaatacaatgagtatgatgaagaactggaggaagagtatgagtatgaggatgatgaggctgagggtgaaatccgagtgcgccccaagaagaccaccaagaagcgtgtgagccgtaggagcatctttgaaatgtatgagcccagtgagctagaaagcagccacctcacagatcaggacaatgaaatccgagccactgacctgcctgagaggttccagctccgctccatcccagtcaagggggctgaagatgatgaactagaagaagaagctgactggatctacaggaatgcttttgccacaccaaccatttctctccaggaaagctgtgattacctagaccgagggcagccagccagcagcttcagtcggaaagggcccagcacaattcagaagatcaaagaggccctgggcttcatgcgaaatcagcattttgaggtgccttttattgccttctatcgaaaggagtatgtggagcctgagttgcacatcaatgacctatggagagtctggcagtgggatgaaaagtggacccagctgcggatccgtaaagagaacctaacacggctgtttgagaagatgcaggcttatcagtatgaacagatctctgctgaccctgacaaacctcttgctgatggcatccgggctctggacaccactgacatggagaggctcaaggatgtccaatcaatggatgagctgaaagatgtctacaaccattttcttctttattatggccgagacatccctaagatgcagaacgccgccaaagctagccgcaagaagctgaagcgtgtcagggaagagggagatgaagaaggtgaaggtgacgaggcagaagatgaggagcagagggggcctgagctcaagcaagcctctcgccgagacatgtacaccatctgccagagtgctgggctagatggnctggccaaaaagtttgggcttactcccgagcagtttggggagaacctgcgggatagctaccagcggcacgagacagagcagtttcccgcggagcccttggagctggccaaggattacgtttgcagccagttccctactccagaagctgtgctagaaggcgcccgctacatggtagccctgcagattgcccgtgagccccttgtccggcaggtgctgaggcaaaccttccaagagagagccaagttaaatataacccccaccaagaaaggtagaaaggatgtggatgaggcccactatgcctattccttcaagtatttaaagaacaagcctgttaaggaactgagagatgaccagtttctcaagatatgcctggctgaagacgaagggctcctcaccactgacatcagcatagatttgaagggagtggaaggctatggcaacgaccagacatattttgaggagataaaacagttttactaccgagatgagttcagccaccaggtgcaggagtggaaccggcagcgcaccatggccatcgaacgggctttacagcagttcctctatgtgcagatggccaaagaactcaagaacaagctgctggctgaagccaaggaatatgtcataaaggcctgtagtcgaaagctctacaattggttgagagtggcaccctaccgaccagatcagcaggtggaagaagatgacgactttatggacgagaaccaagggaagggcattcgagtcctcggcattgctttctcctctgccagagatcaccctgtgttctgcgccctggtcaatggtgaaggagaagtgacagacttccttcgactgccccattttaccaaacggcgaactgcatggagagaggaagagcgggaaaagaaggctcaagacattgaaacgctaaagaaatttctcctgaataagaagcctcatgtagtgacagttgcaggagagaacagggacgcccagatgttgattgaagatgtgaagcgcattgtacatgagctggaccagggccagcagctgtcatctattggggtagagctggttgacaacgagttggccattctctatatgaacagcaagaagtcagaggcagagttccgggattatcctccagtgctgagacaggccgtctccctggcccggcgcatccaggaccctctgattgaatttgcccaggtgtgcagttccgatgaagacatcctgtgtctcaagtttcaccccttgcaggagcatgtggtgaaagaggagctgctcaacgccttgtactgtgaatttatcaaccgagtcaatgaggtcggggtcgatgtcaaccgtgccattgcccacccttacagccaggccttgatccagtatgtttgtggcctgggacctcggaaagggacccacctcctgaagatcctgaagcagaacaacacccggctcgagagccggacccagctggtcaccatgtgccacatgggtcccaaagtcttcatgaattgtgctggcttcctcaagatcgacacggcctccctgggggacagcactgactcatatattgaagtccttgatggttcccgtgtccaccctgagacttatgagtgggctaggaagatggcagtggatgccctggaatacgatgaatcagccgaggatgccaatcctgcaggagcccttgaagaaatcttggaaaacccagagcgactgaaagacctggaccttgatgcctttgcagaagagctggagaggcagggctatggtgacaaacacatcacactctatgacatccgggcagagctgagctgtcgatataaggacctccggacagcctaccgctctcccaacacagaggagatcttcaatatgttaaccaaagaaacaccagagaccttctacattggaaagctcatcatctgcaatgtcactggcattgcccacaggcgtccccagggtgagagctatgaccaggcgatccgcaatgatgagacagggctgtggcagtgccccttctgtcagcaggacaatttccctgaactaagcgaggtgtggaaccactttgacagcggttcgtgcccaggccaggccatcggtgtcaaaacacggctagacaatggtgtcaccggcttcatccccaccaaattcctcagtgacaaagtggtaaagcggccagaagaacgagtgaaggtgggaatgactgttcactgccgcatcatgaagattgacattgagaagttcagtgcagacctgacctgccgcacctcagacctcatggacaggaacaatgagtggaagctgcccaaagacacctactatgactttgatgctgaagctgcagaccacaagcaggaggaggacatgaagcggaagcagcagcggaccacatacatcaagagagtgatcgcacacccatccttccataatatcaatttcaagcaagcagaaaagatgatggagaccatggaccagggtgatgtgattatccgaccaagcagcaagggcgagaaccacctgacagtgacctggaaagtcagtgatggcatctaccagcatgtggatgtgcgggaggagggcaaggaaaatgccttcagcctgggagccactctgtggatcaacagtgaggaattcgaagatttggatgagattgttgctcgctatgtccagcccatggcatcctttgcccgggaccttctgaatcacaagtattatcaggactgcagcggtggggaccgcaagaaattagaggagctgctcatcaaaactaagaaggagaagcccaccttcatcccttatttcatctgtgcctgcaaggaactgcccggcaagttcctactgggataccagccccggggtaaacccaggatagaatatgtaacggtgactccagagggattccggtaccggggccagatcttcccaaccgtgaatggactgtttagatggtttaaggatcactaccaggatcctgtaccaggcatcacccctagcagcagcagcaggacccggacacctgcctctatcaatgctaccccagccaacatcaaccttgcagatctgacacgggctgtgaatgccctgcctcagaacatgacttcacagatgttcagtgccattgctgcggtgacaggccaaggacagaaccctaatgccaccccagcccagtgggcctccagccagtacggctatggcggcagtggaggcggcagcagtgcttaccacgtattcccaacgccagcccagcagccagtggccacaccactaatgacccctagctactcctacacgaccccaagccagcccatcaccacccctcagtaccaccagctccaggccctcttccagctcccggcaacggcagcagcagcaaagtccaacaggcatgcagcatcgactggggaaaatgcggacagtggtgcaggaaaggcgcgaacggggaaacggagcgggtgcaactcgggccccccagcgagaagagacccaggctgggggagcccccccgggagggaggaggcggcccagccggaaccagggaaagggcgcggccccgcctgcaaggggaggacgggcacggaagggaagggagacccgcctccggggggagctctcctcgtggccgggacttcgc

SEQ ID NO: 64089 - DNA, 1667 bp, Homo sapiens
ggtcccgaaaacgacatagaggcaagggcaaggaaaatgccttcagcctgggagccactctgtggatcaacagtgaggaattcgaagatttggatgagattgttgctcgctatgtccagcccatggcatcctttgcccgggaccttctgaatcacaagtattatcaggactgcagcggtggggaccgcaagaaattagaggagctgctcatcaaaactaagaaggagaagcccaccttcatcccttatttcatctgtgcctgcaaggaactgcccggcaagttcctactgggataccagccccggggtaaacccaggatagaatatgtaacggtgactccagagggattccggtaccggggccagatcttcccaaccgtgaatggactgtttagatggtttaaggatcactaccaggatcctgtaccaggcatcacccctagcagcagcagcaggacccggacacctgcctctatcaatgctaccccagccaacatcaaccttgcagatctgacacgggctgtgaatgccctgcctcagaacatgacttcacagatgttcagtgccattgctgcggtgacaggccaaggacagaaccctaatgccaccccagcccagtgggcctccagccagtacggctatggcggcagtggaggcggcagcagtgcttaccacgtattcccaacgccagcccagcagccagtggccacaccactaatgacccctagctactcctacacgaccccaagccagcccatcaccacccctcagtaccaccagctccaggccagcaccaccccacagtcggcccaggcccagccccagccctcttccagctcccggcaacggcagcagcagccaaagtccaacagccatgcagccatcgactggggaaaaatggcggagcagtggctgcaggaaaaggaggcagaacggcggaaacagaagcagcggctgacacctcggccctcccccagccccatgatcgaaagcacccccatgtccattgctggcgatgccaccccactcctggacgagatggatcggtagggggcctgctcctcggactctggttacctctgaggctgggaaaggcctggctgcccactgcctccctccctgcccctccttttatgtccataaagtggcgtgaagtgagacgttctctttggtggtcaacccggatgggtgacaggctggatggccttgtgaacttgagctcagtgtatgctaggcaacaattctcccgctccagaccctcaccgaccacctgtcctgggaccaggctgggaggggagtgtggcagggaggaggaagaggaaggtgagaatgagtagaacagttttgtattctactccctacaagccattttgaacttctgccctcaccggactctgggctgtgactggggcaccaaactcagcacatgagtctcccctagctctcgtggggagagggatgctatttattcagtttggggcaggagggagaggagggaaagtatttctgaccctgatgccaacagccgggtggctgtccaagcaggattgcaggggacacagggaagcactgcccagcccctgcctggctgccctttcccccctgctgctgccaccgcttcctgcctgtcatttgaataaacagtgtttctattgaaaaaaaaaaaaa

SEQ ID NO: 64090 - DNA, 4266 bp, Homo sapiens
  misc_feature (1307)..(1307): n is a, c, g, or t
gcctggaggatgatgattttctcctcaatgaggtcaaagtcaaaagaggacaaaagtaccggcgtgtcaaaaaaatgtcagatgacgaggacgatgacgaggaggaatatggcaaggaggaacatgaaaaagaagctattgcggaagaaatcttccaggatggggaaggggaagaagggcaggaggccatggaggcccccatggctcctccagaggaggaggaagaagatgatgaggagtcagatattgacgacttcattgtggatgatgatggacagcctctgaaaaaacctaagtggcggaaaaagcttcctggatacacagacgcggccctgcaagaagcccaggaaatcttcggtgtggactttgactatgatgaatttgagaaatacaatgagtatgatgaagaactggaggaagagtatgagtatgaggatgatgaggctgagggtgaaatccgagtgcgccccaagaagaccaccaagaagcgtgtgagccgtaggagcatctttgaaatgtatgagcccagtgagctagaaagcagccacctcacagatcaggacaatgaaatccgagccactgacctgcctgagaggttccagctccgctccatcccagtcaagggggctgaagatgatgaactagaagaagaagctgactggatctacaggaatgcttttgccacaccaaccatttctctccaggaaagctgtgattacctagaccgagggcagccagccagcagcttcagtcggaaagggcccagcacaattcagaagatcaaagaggccctgggcttcatgcgaaatcagcattttgaggtgccttttattgccttctatcgaaaggagtatgtggagcctgagttgcacatcaatgacctatggagagtctggcagtgggatgaaaagtggacccagctgcggatccgtaaagagaacctaacacggctgtttgagaagatgcaggcttatcagtatgaacagatctctgctgaccctgacaaacctcttgctgatggcatccgggctctggacaccactgacatggagaggctcaaggatgtccaatcaatggatgagctgaaagatgtctacaaccattttcttctttattatggccgagacatccctaagatgcagaacgccgccaaagctagccgcaagaagctgaagcgtgtcagggaagagggagatgaagaaggtgaaggtgacgaggcagaagatgaggagcagagggggcctgagctcaagcaagcctctcgccgagacatgtacaccatctgccagagtgctgggctagatggnctggccaaaaagtttgggcttactcccgagcagtttggggagaacctgcgggatagctaccagcggcacgagacagagcagtttcccgcggagcccttggagctggccaaggattacgtttgcagccagttccctactccagaagctgtgctagaaggcgcccgctacatggtagccctgcagattgcccgtgagccccttgtccggcaggtgctgaggcaaaccttccaagagagagccaagttaaatataacccccaccaagaaaggtagaaaggatgtggatgaggcccactatgcctattccttcaagtatttaaagaacaagcctgttaaggaactgagagatgaccagtttctcaagatatgcctggctgaagacgaagggctcctcaccactgacatcagcatagatttgaagggagtggaaggctatggcaacgaccagacatattttgaggagataaaacagttttactaccgagatgagttcagccaccaggtgcaggagtggaaccggcagcgcaccatggccatcgaacgggctttacagcagttcctctatgtgcagatggccaaagaactcaagaacaagctgctggctgaagccaaggaatatgtcataaaggcctgtagtcgaaagctctacaattggttgagagtggcaccctaccgaccagatcagcaggtggaagaagatgacgactttatggacgagaaccaagggaagggcattcgagtcctcggcattgctttctcctctgccagagatcaccctgtgttctgcgccctggtcaatggtgaaggagaagtgacagacttccttcgactgccccattttaccaaacggcgaactgcatggagagaggaagagcgggaaaagaaggctcaagacattgaaacgctaaagaaatttctcctgaataagaagcctcatgtagtgacagttgcaggagagaacagggacgcccagatgttgattgaagatgtgaagcgcattgtacatgagctggaccagggccagcagctgtcatctattggggtagagctggttgacaacgagttggccattctctatatgaacagcaagaagtcagaggcagagttccgggattatcctccagtgctgagacaggccgtctccctggcccggcgcatccaggaccctctgattgaatttgcccaggtgtgcagttccgatgaagacatcctgtgtctcaagtttcaccccttgcaggagcatgtggtgaaagaggagctgctcaacgccttgtactgtgaatttatcaaccgagtcaatgaggtcggggtcgatgtcaaccgtgccattgcccacccttacagccaggccttgatccagtatgtttgtggcctgggacctcggaaagggacccacctcctgaagatcctgaagcagaacaacacccggctcgagagccggacccagctggtcaccatgtgccacatgggtcccaaagtcttcatgaattgtgctggcttcctcaagatcgacacggcctccctgggggacagcactgactcatatattgaagtccttgatggttcccgtgtccaccctgagacttatgagtgggctaggaagatggcagtggatgccctggaatacgatgaatcagccgaggatgccaatcctgcagatcttcccaaccgtgaatggactgtttagatggtttaaggatcactaccaggatcctgtaccaggcatcacccctagcagcagcagcaggacccggacacctgcctctatcaatgctaccccagccaacatcaaccttgcagatctgacacgggctgtgaatgccctgcctcagaacatgacttcacagatgttcagtgccattgctgcggtgacaggccaaggacagaaccctaatgccaccccagcccagtgggcctccagccagtacggctatggcggcagtggaggcggcagcagtgcttaccacgtattcccaacgccagcccagcagccagtggccacaccactaatgacccctagctactcctacacgaccccaagccagcccatcaccacccctcagtaccaccagctccaggccagcaccaccccacagtcggcccaggcccagccccagccctcttccagctcccggcaacggcagcagcagccaaagtccaacagccatgcagccatcgactggggaaaaatggcggagcagtggctgcaggaaaaggaggcagaacggcggaaacagaagcagcggctgacacctcggccctcccccagccccatgatcgaaagcacccccatgtccattgctggcgatgccaccccactcctggacgagatggatcggtagggggcctgctcctcggactctggttacctctgaggctgggaaaggcctggctgcccactgcctccctccctgcccctccttttatgtccataaagtggcgtgaagtgagacgttctctttggtggtcaacccggatgggtgacaggctggatggccttgtgaacttgagctcagtgtatgctaggcaacaattctcccgctccagaccctcaccgaccacctgtcctgggaccaggctgggaggggagtgtggcagggaggaggaagaggaaggtgagaatgagtagaacagttttgtattctactccctacaagccattttgaacttctgccctcaccggactctgggctgtgactggggcaccaaactcagcacatgagtctcccctagctctcgtggggagagggatgctatttattcagtttggggcaggagggagaggagggaaagtatttctgaccctgatgccaacagccgggtggctgtccaagcaggattgcaggggacacagggaagcactgcccagcccctgcctggctgccctttcccccctgctgctgccaccgcttcctgcctgtcatttgaataaacagtgtttctattgaaaaaaaaaaaaa

SEQ ID NO: 64091 - DNA, 1742 bp, Homo sapiens
gcctagaggacccctgctgactatttggttgtaggaggacatagaagcggaagcagcagcgaccacatacatcaagagagtgatcgcacacccatccttccataatatcaatttcaagcaagcagaaaagatgatggagaccatggaccagggtgatgtgattatccgaccaagcagcaagggcgagaaccacctgacagtgacctggaaagtcagtgatggcatctaccagcatgtggatgtgcgggaggagggcaaggaaaatgccttcagcctgggagccactctgtggatcaacagtgaggaattcgaagatttggatgagattgttgctcgctatgtccagcccatggcatcctttgcccgggaccttctgaatcacaagtattatgatagaatatgtaacggtgactccagagggattccggtaccggggccagatcttcccaaccgtgaatggactgtttagatggtttaaggatcactaccaggatcctgtaccaggcatcacccctagcagcagcagcaggacccggacacctgcctctatcaatgctaccccagccaacatcaaccttgcagatctgacacgggctgtgaatgccctgcctcagaacatgacttcacagatgttcagtgccattgctgcggtgacaggccaaggacagaaccctaatgccaccccagcccagtgggcctccagccagtacggctatggcggcagtggaggcggcagcagtgcttaccacgtattcccaacgccagcccagcagccagtggccacaccactaatgacccctagctactcctacacgaccccaagccagcccatcaccacccctcagtaccaccagctccaggccagcaccaccccacagtcggcccaggcccagccccagccctcttccagctcccggcaacggcagcagcagccaaagtccaacagccatgcagccatcgactggggaaaaatggcggagcagtggctgcaggaaaaggaggcagaacggcggaaacagaagcagcggctgacacctcggccctcccccagccccatgatcgaaagcacccccatgtccattgctggcgatgccaccccactcctggacgagatggatcggtagggggcctgctcctcggactctggttacctctgaggctgggaaaggcctggctgcccactgcctccctccctgcccctccttttatgtccataaagtggcgtgaagtgagacgttctctttggtggtcaacccggatgggtgacaggctggatggccttgtgaacttgagctcagtgtatgctaggcaacaattctcccgctccagaccctcaccgaccacctgtcctgggaccaggctgggaggggagtgtggcagggaggaggaagaggaaggtgagaatgagtagaacagttttgtattctactccctacaagccattttgaacttctgccctcaccggactctgggctgtgactggggcaccaaactcagcacatgagtctcccctagctctcgtggggagagggatgctatttattcagtttggggcaggagggagaggagggaaagtatttctgaccctgatgccaacagccgggtggctgtccaagcaggattgcaggggacacagggaagcactgcccagcccctgcctggctgccctttcccccctgctgctgccaccgcttcctgcctgtcatttgaataaacagtgtttctattgaaaaaaaaaaaaa

SEQ ID NO: 64092 - DNA, 1056 bp, Homo sapiens
ggtcggtccctggttaccaggtcttgtgtgaggagcagtggaggcggcagcagtgcttaccacgtattcccaacgccagcccagcagccagtggccacaccactaatgacccctagctactcctacacgaccccaagccagcccatcaccacccctcagtaccaccagctccaggccagcaccaccccacagtcggcccaggcccagccccagccctcttccagctcccggcaacggcagcagcagccaaagtccaacagccatgcagccatcgactggggaaaaatggcggagcagtggctgcaggaaaaggaggcagaacggcggaaacagaagcagcggctgacacctcggccctcccccagccccatgatcgaaagcacccccatgtccattgctggcgatgccaccccactcctggacgagatggatcggtagggggcctgctcctcggactctggttacctctgaggctgggaaaggcctggctgcccactgcctccctccctgcccctccttttatgtccataaagtggcgtgaagtgagacgttctctttggtggtcaacccggatgggtgacaggctggatggccttgtgaacttgagctcagtgtatgctaggcaacaattctcccgctccagaccctcaccgaccacctgtcctgggaccaggctgggaggggagtgtggcagggaggaggaagaggaaggtgagaatgagtagaacagttttgtattctactccctacaagccattttgaacttctgccctcaccggactctgggctgtgactggggcaccaaactcagcacatgagtctcccctagctctcgtggggagagggatgctatttattcagtttggggcaggagggagaggagggaaagtatttctgaccctgatgccaacagccgggtggctgtccaagcaggattgcaggggacacagggaagcactgcccagcccctgcctggctgccctttcccccctgctgctgccaccgcttcctgcctgtcatttgaataaacagtgtttctattgaaaaaaaaaaaaa

SEQ ID NO: 64093 - DNA, 2623 bp, Homo sapiens
tccctccgcggggctcctcgtccccgtcacgctgactttccgtgcagtgctgtggtgcgaaaatgcctcgccggtgcgcaccgggtcggcagcctcggcggcgggggcgagattggcgggaggggggcgcggggggggcgcggtaagaggtggcggcgggcagagggtgttttttttcttttccctccagagccggggtttgtaaaccgaggccagagtgtccccgtgggccgagcgcacttttttcttgtccgggtgcgctcagtcactggtgcctgagaggaaacagtggaggcagcggggcaggtcgcctggggcgtcggcgattatattgcggccgagccggggcgcgccgggaaaggccgggagggcggcggcgcgcgggggctgggcgaggccccgcgacccgcgagggaggcggcgcgaagccgaggcggcgggcgcaagagccgggcatgagcgcccagtagctgagcgcccgcggctgcctggcctcagaagcgacgcgcgagcgcgggcgggcggcagcagcgacgtagcccggcggtcccggcggcgagagcagccgccccacaggcccccgcggcagtgcggccgagtcgaggctcgctctctggctgcttagcgccgcccgcccgcccggggccgccgccgctgacgccccaatgagttcgtacttcgtgaacccgctgtactccaagtacaaggcggcggctgcggcggcggcggcggcgggcgaggccatcaatcccacttactacgactgtcacttcgcgcccgaggtcggcggccgtcacgccgccgccgcagcagccctgcagctctatggcaacagcgccgccggcttcccgcacgcgcccccgcaggcgcacgcgcacccgcacccgtccccgccgccctccgggactgggtgcggcggtagggaaggccggggccaggagtacttccaccccggcgggggcagcccggccgctgcctaccaggccgccccccctcctcctccgcatcctccgcctccgccgccacctcccccctgcggcgggattgcctgtcacggggagcccgcgaagttttacggatacgataacttacagagacagccgatttttacgacccagcaagaggccgagctggtacaatatcctgactgtaaatcgtccagtggtaatattggcgaggacccagaccacttaaatcagagctcgtctccttctcaaatgtttccgtggatgagaccacaagcagctcctggtagacgaagaggaagacaaacctacagtcgcttccaaactctagagttggaaaaggaatttctttttaacccctatctgaccaggaaaagaagaatcgaggtttcccacgccctagccctcaccgagagacaggtaaaaatctggttccagaacaggagaatgaaatggaaaaaggaaaacaacaaggacaaatttcccgtttcccggcaggaggtgaaggacggggaaacgaaaaaggaagcccaagagctggaggaagacagagccgaaggcctgacaaattaacttctacctttaaaatttaccacagactattaaaactaataatcaccatatgctgtggacaccacctattttctttgttggaaaggaccttacctgtgtttcaagctaccttcatgtcactgctcttgaggttttctgtgctttgagagggatttgggtgtttaaaaaagtttctagtatcacatagaagctgtccttgagctgtcctatggaagggtaatttgatactgaccttgtagctatatttttataatggtttttaatgtctgagctagtgatttgcctcaacaacgtaaacttcctaatgattagcacttaataattgcatataaaatgctttattaattaaacaagtgcacttgaacattttaatatttgtggtgagtaaattaaaaggagtttattaattaaaaaaaattatgtctgcagaatactttatattatttgattacaatgtattatttatggattttttattctttcctttataatgaatagttcgggtgcgttttgtttactcctaaaaggtttctttgcgtattttctaaatgtaatatctcggggaaaatattagaaaagcacgtattagctgaagaatgtaacttgtagtccagctctgcagcttccttaaacttaagaaaaagattgggccagtgacaagaatttaaagacaatgtccaagttgacaattatttttctatagtccatacaaattaaataatctggcaactctggcaaatcgccttgtaaaatgcgtctcattttttaacttgctttcgttttgaaccgcccttgtaatcgcctgaaatcgctagttctttatgcggtggctgccgctgtgttccgttattttcagtaggtgtcatatttatttgtattgcctttgttctgttcgccgctggttttaaaccagcttgctgtgtgcatctcagacgtcggttggtacgtcctccgctgttcttcaggaaagcgatagcctcacctatttgaaacaagccctgagaggaaacgcagaaaaacctgagtgtaaacaactccggaatgtcgctagctccttagtaaataaatgaatctctttctggagc

SEQ ID NO: 64094 - DNA, 1622 bp, Homo sapiens
taaagtaatacagactttttttaaaaaagtaggaaccatgtaaagatgatggggacagaataattgtgaagacctctctgctcctcttgcctgcacaccctatatatatatatcggagctaaagagctctgtgtatatttcaccccgtagacccccgttccacaaacctccagcaacatgcagaggtaccataacatttttaaaacttttattcccccccctttttttttgttttaatcagcagctcctggtagacgaagaggaagacaaacctacagtcgcttccaaactctagagttggaaaaggaatttctttttaacccctatctgaccaggaaaagaagaatcgaggtttcccacgccctagccctcaccgagagacaggtaaaaatctggttccagaacaggagaatgaaatggaaaaaggaaaacaacaaggacaaatttcccgtttcccggcaggaggtgaaggacggggaaacgaaaaaggaagcccaagagctggaggaagacagagccgaaggcctgacaaattaacttctacctttaaaatttaccacagactattaaaactaataatcaccatatgctgtggacaccacctattttctttgttggaaaggaccttacctgtgtttcaagctaccttcatgtcactgctcttgaggttttctgtgctttgagagggatttgggtgtttaaaaaagtttctagtatcacatagaagctgtccttgagctgtcctatggaagggtaatttgatactgaccttgtagctatatttttataatggtttttaatgtctgagctagtgatttgcctcaacaacgtaaacttcctaatgattagcacttaataattgcatataaaatgctttattaattaaacaagtgcacttgaacattttaatatttgtggtgagtaaattaaaaggagtttattaattaaaaaaaattatgtctgcagaatactttatattatttgattacaatgtattatttatggattttttattctttcctttataatgaatagttcgggtgcgttttgtttactcctaaaaggtttctttgcgtattttctaaatgtaatatctcggggaaaatattagaaaagcacgtattagctgaagaatgtaacttgtagtccagctctgcagcttccttaaacttaagaaaaagattgggccagtgacaagaatttaaagacaatgtccaagttgacaattatttttctatagtccatacaaattaaataatctggcaactctggcaaatcgccttgtaaaatgcgtctcattttttaacttgctttcgttttgaaccgcccttgtaatcgcctgaaatcgctagttctttatgcggtggctgccgctgtgttccgttattttcagtaggtgtcatatttatttgtattgcctttgttctgttcgccgctggttttaaaccagcttgctgtgtgcatctcagacgtcggttggtacgtcctccgctgttcttcaggaaagcgatagcctcacctatttgaaacaagccctgagaggaaacgcagaaaaacctgagtgtaaacaactccggaatgtcgctagctccttagtaaataaatgaatctctttctggagc

SEQ ID NO: 64095 - DNA, 1469 bp, Homo sapiens
gaagacaaacctacagtcgcttcctcttcgtctaccaggagctgcttgtggtctcatccacggaaacatttgagaaggagacgacaagcagctcctggtagacgaagaggaagacaaacctacagtcgcttccaaactctagagttggaaaaggaatttctttttaacccctatctgaccaggaaaagaagaatcgaggtttcccacgccctagccctcaccgagagacaggtaaaaatctggttccagaacaggagaatgaaatggaaaaaggaaaacaacaaggacaaatttcccgtttcccggcaggaggtgaaggacggggaaacgaaaaaggaagcccaagagctggaggaagacagagccgaaggcctgacaaattaacttctacctttaaaatttaccacagactattaaaactaataatcaccatatgctgtggacaccacctattttctttgttggaaaggaccttacctgtgtttcaagctaccttcatgtcactgctcttgaggttttctgtgctttgagagggatttgggtgtttaaaaaagtttctagtatcacatagaagctgtccttgagctgtcctatggaagggtaatttgatactgaccttgtagctatatttttataatggtttttaatgtctgagctagtgatttgcctcaacaacgtaaacttcctaatgattagcacttaataattgcatataaaatgctttattaattaaacaagtgcacttgaacattttaatatttgtggtgagtaaattaaaaggagtttattaattaaaaaaaattatgtctgcagaatactttatattatttgattacaatgtattatttatggattttttattctttcctttataatgaatagttcgggtgcgttttgtttactcctaaaaggtttctttgcgtattttctaaatgtaatatctcggggaaaatattagaaaagcacgtattagctgaagaatgtaacttgtagtccagctctgcagcttccttaaacttaagaaaaagattgggccagtgacaagaatttaaagacaatgtccaagttgacaattatttttctatagtccatacaaattaaataatctggcaactctggcaaatcgccttgtaaaatgcgtctcattttttaacttgctttcgttttgaaccgcccttgtaatcgcctgaaatcgctagttctttatgcggtggctgccgctgtgttccgttattttcagtaggtgtcatatttatttgtattgcctttgttctgttcgccgctggttttaaaccagcttgctgtgtgcatctcagacgtcggttggtacgtcctccgctgttcttcaggaaagcgatagcctcacctatttgaaacaagccctgagaggaaacgcagaaaaacctgagtgtaaacaactccggaatgtcgctagctccttagtaaataaatgaatctctttctggagc

SEQ ID NO: 64096 - DNA, 1602 bp, Homo sapiens
tccctccgcggggctcctcgtccccgtcacgctgactttccgtgcagtgctgtggtgcgaaaatgcctcgccgagacagccgatttttacgacccagcaagaggccgagctggtacaatatcctgactgtaaatcgtccagtggtaatattggcgaggacccagaccacttaaatcagagctcgtctccttctcaaatgtttccgtggatgagaccacaagcagctcctggtagacgaagaggaagacaaacctacagtcgcttccaaactctagagttggaaaaggaatttctttttaacccctatctgaccaggaaaagaagaatcgaggtttcccacgccctagccctcaccgagagacaggtaaaaatctggttccagaacaggagaatgaaatggaaaaaggaaaacaacaaggacaaatttcccgtttcccggcaggaggtgaaggacggggaaacgaaaaaggaagcccaagagctggaggaagacagagccgaaggcctgacaaattaacttctacctttaaaatttaccacagactattaaaactaataatcaccatatgctgtggacaccacctattttctttgttggaaaggaccttacctgtgtttcaagctaccttcatgtcactgctcttgaggttttctgtgctttgagagggatttgggtgtttaaaaaagtttctagtatcacatagaagctgtccttgagctgtcctatggaagggtaatttgatactgaccttgtagctatatttttataatggtttttaatgtctgagctagtgatttgcctcaacaacgtaaacttcctaatgattagcacttaataattgcatataaaatgctttattaattaaacaagtgcacttgaacattttaatatttgtggtgagtaaattaaaaggagtttattaattaaaaaaaattatgtctgcagaatactttatattatttgattacaatgtattatttatggattttttattctttcctttataatgaatagttcgggtgcgttttgtttactcctaaaaggtttctttgcgtattttctaaatgtaatatctcggggaaaatattagaaaagcacgtattagctgaagaatgtaacttgtagtccagctctgcagcttccttaaacttaagaaaaagattgggccagtgacaagaatttaaagacaatgtccaagttgacaattatttttctatagtccatacaaattaaataatctggcaactctggcaaatcgccttgtaaaatgcgtctcattttttaacttgctttcgttttgaaccgcccttgtaatcgcctgaaatcgctagttctttatgcggtggctgccgctgtgttccgttattttcagtaggtgtcatatttatttgtattgcctttgttctgttcgccgctggttttaaaccagcttgctgtgtgcatctcagacgtcggttggtacgtcctccgctgttcttcaggaaagcgatagcctcacctatttgaaacaagccctgagaggaaacgcagaaaaacctgagtgtaaacaactccggaatgtcgctagctccttagtaaataaatgaatctctttctggagc

SEQ ID NO: 64097 - DNA, 490 bp, Homo sapiens
ccttaagcctctggatgagagttaagcatgtccaggtagtagtgggtgttttgaaacataaaaggttgcaccctcgtgtgtgcctgtgttaaaaggagcccacgcagccgacagcagcaggagcaaatggcctgctctgatggggacaggcaggaagtccttcggggcatttctgtttcatcacagcttttcctggggctggaagctgatcagtatctcctttggggacctgaaccctttccccgtacgccagatccggaaccaacgcgcctaccacttggagaaagtccggctggagctgaccgagctggaggccatccgtgaggacttcctgcatgagcgggacaccagccctgacaagggtgagctggtcagtgacgaggaggaggatacctgagtgggctccgggacgctgctcttcctgccttcacaaccaaagtgtgcccaaagggtgaaagtgcacttaaaagccagaatgtaaagtgtgtgg

SEQ ID NO: 64098 - DNA, 289 bp, Homo sapiens
atgcaatggagacatttgctcgtttacttttctacaaagtacctccaagagcattttgtgaagagttttggtttcatctttttgtctcctttgattttttttctctctgaagcctgtttctgttgtgttctagtactttcaatctcattaaagaaagagtaagaaataaacaattatttttacaagcatacaaagaaatatattgctcttttatatgaaagagagtttgacaatttgtgtaatgtttcaattgctacttataaaactatctgaaagatgtttatccaaa

SEQ ID NO: 64099 - DNA, 311 bp, Homo sapiens
aggcagatgcagttccagggttggttgattctacaacggtgtcagagctctggattaaattctgttattctcttacatttgcattcatgttgtgggattattgctgctgcttttaaggattgcatctaaaatcaggaaggaatgggggcttttcattattaaagataaaagtatttcccagcagcctctagacttatcggcatctcagtagtcagacctggttcctgtgctgctcaccttaaaactgatcactgtcagaggagaatggggttcttgtgattgacttggtctaatcatggtatcatcccttt

SEQ ID NO: 64100 - DNA, 2728 bp, Homo sapiens
  misc_feature (1)..(1): n is a, c, g, or t
ncacaaacaagctggagcagcccagaggacaagaattttgggcagatttgaatgccatgaacgtgtatgaaacaactgaatttgaccaactacgaaggctgtccacaccaccctctagcaatgtcaactctatttaccacacagtctggaaattcttctgtagggaccactttggatggagagagtatcccgagtctgtcattcgattgattgaagaagccaactctcggggtctgaaagaggttcgatttatgatgtggaataaccactacatcctccacaattcattcttcaggagagagataaaaaggagacccctcttccgctcctgttttatactgcttccatatttacagacacttggtggggttcccacacaagctcctccacctcttgaagcaacttcatcatcacaaattatctgcccagatggggtcacttcagcaaacttttaccctgaaacttgggtttatatgcatccatctcaggacttcatccaagtccctgtttctgcagaggataaaagttatcggatcatttacaatctttttcataagactgtgcctgagtttaaatacagaattttgcagatattgagagtccaaaaccagtttctttgggagaaatataaaaggaaaaaggaatatatgaacaggaaaatgtttggccgtgacaggataataaatgagagacatttatttcatggaacatcccaggatgtggtagatggaatctgcaaacacaactttgaccctcgagtctgtggaaagcatgctacaatgtttggacaaggcagttattttgcaaagaaggcaagctactctcataacttttctaagaagtcctccaaaggagtccacttcatgtttctggccaaagtgctgacgggcagatacacaatgggcagtcatggcatgagaaggcccccgccagtcaatcctggcagtgtcaccagtgacctttatgactcttgtgtggataatttctttgagcctcagatttttgtcatttttaatgatgaccagagttacccttattttgttatccaatatgaagaagtcagtaacactgtttccatttgaaaaatcttggtactgctaaattatttgatatgaactcaatccagcatttgtagcaggttttgaatgggtgggactgggtggggaacagcattggacattaatagggcacttttcagacccattttttaaagtgctagaaaatgctttttttaaaaaaaaaatacaagttttaaaatgaccacttactctttaattatttactaattgctagtgtactcagtgtggaaaagactacagattacacactcttttcattcacacttgtacatatagacagcaatgttattaggagcattaaattaaaaaactgaacagcctaatttaaatgtggcttgggcctggtagaagtttgaccaaatggaatggaggctgtgagcaatgtgaggattctatttatttatttacgtttgataaaacttactggaactagtactaccatgcgtattccctgtccaaagcatcactgctttggtatagtataagttcatgaaattctggtgggtagaaagaaatttttatttctatcagcagtactaaaatgtatcagccaaccagagaacatcagtgactttaacttctgcagagtttgccccagaattcagagttctatttagaggaagttaaaacaacaacaaaaaacaaccatttgaaaaatttttgtcaccagcaaaacttttcactaattagtgatatgaaatgtgatttttgtgttgttaaacttcagctttggaaaactcagtctctttcattatcatccattccaatttgaaggagttgggcagctaatttggttaaaggcagtcttgagggttagaagtattacttccttttcgggttccagacctagcttgtgactgaaagttttagaaaaaggaagtacatctatagccgaattgataaggttattactgtgttttgcacaaagtatattagcaaaagtatttgctggaattattggtagatggcagtcccactcctacacctgctttgtcagatacagctgggttccctggctgactctgtaccttacttacactacttacttaatagaaacacaaacttggaaattgtgccagtggtccagctggagcacaacgtttggtgaatatgctgtttcctcagttcagagaggtagcaactaggtaaactccttataaaaagcaaatacctggatttacaaaagtgaaagtagttgttcacaaaagaattcgccatggaattctttcagttaccaagctctcctggtaatgtttgtggttatatcatttacacaaaacttttcaggaacttctgtgttgtttaagcaagatgtatctgtactgatgtctcagtgaatcagtctgtttattaagcacttatcagggcttccacacacttatttattttgccctagttaatcctgttgtttgctgccattggcatgaaatggccaactgtggctgttacagttctttcattcaattataacttgtaaaccagtgactcctaatctttttcaagttaagacaccttaccattgcttatttggttttatgagacttgttcctttttttctccctaaggaaaaagaaagctttatgacatatttatttttttaataaaactaagcaaaaataaaacttatggtaattctttaaaaaaaaaaa

SEQ ID NO: 64101 - DNA, 3946 bp, Homo sapiens
ccccaccgaactccggccgcccaggctccgcctccgcgacgggccgtcgggaggaggcgaccggaagccacttaaagcagagatcgaggtgacaggcgagctggctggactcggagcgcggtcgaggctttctgcgttcgcggcggcggaatggcccgtgcgcggctcgccgcgtcgcggctctgtggtccctagacgtcggctcccgccctcggcgctgatctccggcgcgggcactgctttccactcggctcctgtcgtccgttctctcaggctcccgttcaggatttttagactctgaggagcagttggagctaatccacattatggaaatggaaaccaccgaacctgagccagactgtgtagtgcagcctccctctcctcctgatgacttttcatgccaaatgagactctctgagaagatcactccattgaagacttgttttaagaaaaaggatcagaaaagattgggaactggaaccctgaggtctttgaggccaatattaaacactcttctagaatctggctcacttgatggggtttttagatctaggaaccagagtacagatgagaacagcttacatgaacctatgatgaagaaagccatggaaatcaattcatcatgcccaccagcagaaaataatatgtctgttctgattcctgataggacaaatgttggggaccagataccggaagcccatccttccactgaagctccagaacgagtggttccaatccaagatcacagctttccatcagaaaccctcagtgggacggtggcagattccacaccagctcacttccagactgatcttttgcacccagtttcaagtgatgttcctactagtcctgactgcttagacaaagtcatagattatgttccaggcattttccaagaaaacagttttacaatccaatacattctggacaccagtgataagctgagtactgagctctttcaggacaaaagtgaagaggcttcccttgacctcgtgtttgagctggtgaaccagttgcagtaccacactcaccaagagaacggaattgaaatttgcatggactttctgcaaggcacttgtatttatggcagggattgtttgaagcaccacactgtcttgccatatcattggcagatcaaaaggacaactactcaaaagtggcagagtgtattcaatgattctcaggagcacttggaaagattttactgtaacccagaaaatgatagaatgagaatgaagtatggaggacaagaattttgggcagatttgaatgccatgaacgtgtatgaaacaactgaatttgaccaactacgaaggctgtccacaccaccctctagcaatgtcaactctatttaccacacagtctggaaattcttctgtagggaccactttggatggagagagtatcccgagtctgtcattcgattgattgaagaagccaactctcggggtctgaaagaggttcgatttatgatgtggaataaccactacatcctccacaattcattcttcaggagagagataaaaaggagacccctcttccgctcctgttttatactgcttccatatttacagacacttggtggggttcccacacaagctcctccacctcttgaagcaacttcatcatcacaaattatctgcccagatggggtcacttcagcaaacttttaccctgaaacttgggtttatatgcatccatctcaggacttcatccaagtccctgtttctgcagaggataaaagttatcggatcatttacaatctttttcataagactgtgcctgagtttaaatacagaattttgcagatattgagagtccaaaaccagtttctttgggagaaatataaaaggaaaaaggaatatatgaacaggaaaatgtttggccgtgacaggataataaatgagagacatttatttcatggaacatcccaggatgtggtagatggaatctgcaaacacaactttgaccctcgagtctgtggaaagcatgctacaatgtttggacaaggcagttattttgcaaagaaggcaagctactctcataacttttctaagaagtcctccaaaggagtccacttcatgtttctggccaaagtgctgacgggcagatacacaatgggcagtcatggcatgagaaggcccccgccagtcaatcctggcagtgtcaccagtgacctttatgactcttgtgtggataatttctttgagcctcagatttttgtcatttttaatgatgaccagagttacccttattttgttatccaatatgaagaagtcagtaacactgtttccatttgaaaaatcttggtactgctaaattatttgatatgaactcaatccagcatttgtagcaggttttgaatgggtgggactgggtggggaacagcattggacattaatagggcacttttcagacccattttttaaagtgctagaaaatgctttttttaaaaaaaaaatacaagttttaaaatgaccacttactctttaattatttactaattgctagtgtactcagtgtggaaaagactacagattacacactcttttcattcacacttgtacatatagacagcaatgttattaggagcattaaattaaaaaactgaacagcctaatttaaatgtggcttgggcctggtagaagtttgaccaaatggaatggaggctgtgagcaatgtgaggattctatttatttatttacgtttgataaaacttactggaactagtactaccatgcgtattccctgtccaaagcatcactgctttggtatagtataagttcatgaaattctggtgggtagaaagaaatttttatttctatcagcagtactaaaatgtatcagccaaccagagaacatcagtgactttaacttctgcagagtttgccccagaattcagagttctatttagaggaagttaaaacaacaacaaaaaacaaccatttgaaaaatttttgtcaccagcaaaacttttcactaattagtgatatgaaatgtgatttttgtgttgttaaacttcagctttggaaaactcagtctctttcattatcatccattccaatttgaaggagttgggcagctaatttggttaaaggcagtcttgagggttagaagtattacttccttttcgggttccagacctagcttgtgactgaaagttttagaaaaaggaagtacatctatagccgaattgataaggttattactgtgttttgcacaaagtatattagcaaaagtatttgctggaattattggtagatggcagtcccactcctacacctgctttgtcagatacagctgggttccctggctgactctgtaccttacttacactacttacttaatagaaacacaaacttggaaattgtgccagtggtccagctggagcacaacgtttggtgaatatgctgtttcctcagttcagagaggtagcaactaggtaaactccttataaaaagcaaatacctggatttacaaaagtgaaagtagttgttcacaaaagaattcgccatggaattctttcagttaccaagctctcctggtaatgtttgtggttatatcatttacacaaaacttttcaggaacttctgtgttgtttaagcaagatgtatctgtactgatgtctcagtgaatcagtctgtttattaagcacttatcagggcttccacacacttatttattttgccctagttaatcctgttgtttgctgccattggcatgaaatggccaactgtggctgttacagttctttcattcaattataacttgtaaaccagtgactcctaatctttttcaagttaagacaccttaccattgcttatttggttttatgagacttgttcctttttttctccctaaggaaaaagaaagctttatgacatatttatttttttaataaaactaagcaaaaataaaacttatggtaattctttaaaaaaaaaaa

SEQ ID NO: 64102 - DNA, 3692 bp, Homo sapiens
caccattcctttctcacctggcacaatctcagatttttagactctgaggagcagttggagctaatccacattatggaaatggaaaccaccgaacctgagccagactgtgtagtgcagcctccctctcctcctgatgacttttcatgccaaatgagactctctgagaagatcactccattgaagacttgttttaagaaaaaggatcagaaaagattgggaactggaaccctgaggtctttgaggccaatattaaacactcttctagaatctggctcacttgatggggtttttagatctaggaaccagagtacagatgagaacagcttacatgaacctatgatgaagaaagccatggaaatcaattcatcatgcccaccagcagaaaataatatgtctgttctgattcctgataggacaaatgttggggaccagataccggaagcccatccttccactgaagctccagaacgagtggttccaatccaagatcacagctttccatcagaaaccctcagtgggacggtggcagattccacaccagctcacttccagactgatcttttgcacccagtttcaagtgatgttcctactagtcctgactgcttagacaaagtcatagattatgttccaggcattttccaagaaaacagttttacaatccaatacattctggacaccagtgataagctgagtactgagctctttcaggacaaaagtgaagaggcttcccttgacctcgtgtttgagctggtgaaccagttgcagtaccacactcaccaagagaacggaattgaaatttgcatggactttctgcaaggcacttgtatttatggcagggattgtttgaagcaccacactgtcttgccatatcattggcagatcaaaaggacaactactcaaaagtggcagagtgtattcaatgattctcaggagcacttggaaagattttactgtaacccagaaaatgatagaatgagaatgaagtatggaggacaagaattttgggcagatttgaatgccatgaacgtgtatgaaacaactgaatttgaccaactacgaaggctgtccacaccaccctctagcaatgtcaactctatttaccacacagtctggaaattcttctgtagggaccactttggatggagagagtatcccgagtctgtcattcgattgattgaagaagccaactctcggggtctgaaagaggttcgatttatgatgtggaataaccactacatcctccacaattcattcttcaggagagagataaaaaggagacccctcttccgctcctgttttatactgcttccatatttacagacacttggtggggttcccacacaagctcctccacctcttgaagcaacttcatcatcacaaattatctgcccagatggggtcacttcagcaaacttttaccctgaaacttgggtttatatgcatccatctcaggacttcatccaagtccctgtttctgcagaggataaaagttatcggatcatttacaatctttttcataagactgtgcctgagtttaaatacagaattttgcagatattgagagtccaaaaccagtttctttgggagaaatataaaaggaaaaaggaatatatgaacaggaaaatgtttggccgtgacaggataataaatgagagacatttatttcatggaacatcccaggatgtggtagatggaatctgcaaacacaactttgaccctcgagtctgtggaaagcatgctacaatgtttggacaaggcagttattttgcaaagaaggcaagctactctcataacttttctaagaagtcctccaaaggagtccacttcatgtttctggccaaagtgctgacgggcagatacacaatgggcagtcatggcatgagaaggcccccgccagtcaatcctggcagtgtcaccagtgacctttatgactcttgtgtggataatttctttgagcctcagatttttgtcatttttaatgatgaccagagttacccttattttgttatccaatatgaagaagtcagtaacactgtttccatttgaaaaatcttggtactgctaaattatttgatatgaactcaatccagcatttgtagcaggttttgaatgggtgggactgggtggggaacagcattggacattaatagggcacttttcagacccattttttaaagtgctagaaaatgctttttttaaaaaaaaaatacaagttttaaaatgaccacttactctttaattatttactaattgctagtgtactcagtgtggaaaagactacagattacacactcttttcattcacacttgtacatatagacagcaatgttattaggagcattaaattaaaaaactgaacagcctaatttaaatgtggcttgggcctggtagaagtttgaccaaatggaatggaggctgtgagcaatgtgaggattctatttatttatttacgtttgataaaacttactggaactagtactaccatgcgtattccctgtccaaagcatcactgctttggtatagtataagttcatgaaattctggtgggtagaaagaaatttttatttctatcagcagtactaaaatgtatcagccaaccagagaacatcagtgactttaacttctgcagagtttgccccagaattcagagttctatttagaggaagttaaaacaacaacaaaaaacaaccatttgaaaaatttttgtcaccagcaaaacttttcactaattagtgatatgaaatgtgatttttgtgttgttaaacttcagctttggaaaactcagtctctttcattatcatccattccaatttgaaggagttgggcagctaatttggttaaaggcagtcttgagggttagaagtattacttccttttcgggttccagacctagcttgtgactgaaagttttagaaaaaggaagtacatctatagccgaattgataaggttattactgtgttttgcacaaagtatattagcaaaagtatttgctggaattattggtagatggcagtcccactcctacacctgctttgtcagatacagctgggttccctggctgactctgtaccttacttacactacttacttaatagaaacacaaacttggaaattgtgccagtggtccagctggagcacaacgtttggtgaatatgctgtttcctcagttcagagaggtagcaactaggtaaactccttataaaaagcaaatacctggatttacaaaagtgaaagtagttgttcacaaaagaattcgccatggaattctttcagttaccaagctctcctggtaatgtttgtggttatatcatttacacaaaacttttcaggaacttctgtgttgtttaagcaagatgtatctgtactgatgtctcagtgaatcagtctgtttattaagcacttatcagggcttccacacacttatttattttgccctagttaatcctgttgtttgctgccattggcatgaaatggccaactgtggctgttacagttctttcattcaattataacttgtaaaccagtgactcctaatctttttcaagttaagacaccttaccattgcttatttggttttatgagacttgttcctttttttctccctaaggaaaaagaaagctttatgacatatttatttttttaataaaactaagcaaaaataaaacttatggtaattctttaaaaaaaaaaa

SEQ ID NO: 64103 - DNA, 3862 bp, Homo sapiens
  misc_feature (3847)..(3847): n is a, c, g, or t
ccccaccgaactccggccgcccaggctccgcctccgcgacgggccgtcgggaggaggcgaccggaagccacttaaagcagagatcgaggtgacaggcgagctggctggactcggagcgcggtcgaggctttctgcgttcgcggcggcggaatggcccgtgcgcggctcgccgcgtcgcggctctgtggtccctagacgtcggctcccgccctcggcgctgatctccggcgcgggcactgctttccactcggctcctgtcgtccgttctctcaggctcccgttcaggatttttagactctgaggagcagttggagctaatccacattatggaaatggaaaccaccgaacctgagccagactgtgtagtgcagcctccctctcctcctgatgacttttcatgccaaatgagactctctgagaagatcactccattgaagacttgttttaagaaaaaggatcagaaaagattgggaactggaaccctgaggtctttgaggccaatattaaacactcttctagaatctggctcacttgatggggtttttagatctaggaaccagagtacagatgagaacagcttacatgaacctatgatgaagaaagccatggaaatcaattcatcatgcccaccagcagaaaataatatgtctgttctgattcctgataggacaaatgttggggaccagataccggaagcccatccttccactgaagctccagaacgagtggttccaatccaagatcacagctttccatcagaaaccctcagtgggacggtggcagattccacaccagctcacttccagactgatcttttgcacccagtttcaagtgatgttcctactagtcctgactgcttagacaaagtcatagattatgttccaggcattttccaagaaaacagttttacaatccaatacattctggacaccagtgataagctgagtactgagctctttcaggacaaaagtgaagaggcttcccttgacctcgtgtttgagctggtgaaccagttgcagtaccacactcaccaagagaacggaattgaaatttgcatggactttctgcaaggcacttgtatttatggcagggattgtttgaagcaccacactgtcttgccatatcattggcagatcaaaaggacaactactcaaaagtggcagagtgtattcaatgattctcaggagcacttggaaagattttactgtaacccagaaaatgatagaatgagaatgaagtatggaggacaagaattttgggcagatttgaatgccatgaacgtgtatgaaacaactgaatttgaccaactacgaaggctgtccacaccaccctctagcaatgtcaactctatttaccacacagtctggaaattcttctgtagggaccactttggatggagagagtatcccgagtctgtcattcgattgattgaagaagccaactctcggggtctgaaagaggttcgatttatgatgtggaataaccactacatcctccacaattcattcttcaggagagagataaaaaggagacccctcttccgctcctgttttatactgcttccatatttacagacacttggtggggttcccacacaagctcctccacctcttgaagcaacttcatcatcacaaattatctgcccagatggggtcacttcagcaaacttttaccctgaaacttgggtttatatgcatccatctcaggacttcatccaagtccctgtttctgcagaggataaaagttatcggatcatttacaatctttttcataagactgtgcctgagtttaaatacagaattttgcagatattgagagtccaaaaccagtttctttgggagaaatataaaaggaaaaaggaatatatgaacaggaaaatgtttggccgtgacaggataataaatgagagacatttatttcatggaacatcccaggatgtggtagatggaatctgcaaacacaactttgaccctcgagtctgtggaaagcatgctacaatgtttggacaaggcagttattttgcaaagaaggcaagctactctcataacttttctaagaagtcctccaaaggagtccacttcatgtttctggccaaagtgctgacgggcagatacacaatgggcagtcatggcatgagaaggcccccgccagtcaatcctggcagtgtcaccagtgacctttatgactcttgtgtggataatttctttgagcctcagatttttgtcatttttaatgatgaccagagttacccttattttgttatccaatatgaagaagtcagtaacactgtttccatttgaaaaatcttggtactgctaaattatttgatatgaactcaatccagcatttgtagcaggttttgaatgggtgggactgggtggggaacagcattggacattaatagggcacttttcagacccattttttaaagtgctagaaaatgctttttttaaaaaaaaaatacaagttttaaaatgaccacttactctttaattatttactaattgctagtgtactcagtgtggaaaagactacagattacacactcttttcattcacacttgtacatatagacagcaatgttattaggagcattaaattaaaaaactgaacagcctaatttaaatgtggcttgggcctggtagaagtttgaccaaatggaatggaggctgtgagcaatgtgaggattctatttatttatttacgtttgataaaacttactggaactagtactaccatgcgtattccctgtccaaagcatcactgctttggtatagtataagttcatgaaattctggtgggtagaaagaaatttttatttctatcagcagtactaaaatgtatcagccaaccagagaacatcagtgactttaacttctgcagagtttgccccagaattcagagttctatttagaggaagttaaaacaacaacaaaaaacaaccatttgaaaaatttttgtcaccagcaaaacttttcactaattagtgatatgaaatgtgatttttgtgttgttaaacttcagctttggaaaactcagtctctttcattatcatccattccaatttgaaggagttgggcagctaatttggttaaaggcagtcttgagggttagaagtattacttccttttcgggttccagacctagcttgtgactgaaagttttagaaaaaggaagtacatctatagccgaattgataaggttattactgtgttttgcacaaagtatattagcaaaagtatttgctggaattattggtagatggcagtcccactcctacacctgctttgtcagatacagctgggttccctggctgactctgtaccttacttacactacttacttaatagaaacacaaacttggaaattgtgccagtggtccagctggagcacaacgtttggtgaatatgctgtttcctcagttcagagaggtagcaactaggtaaactccttataaaaagcaaatacctggatttacaaaagtgaaagtagttgttcacaaaagaattcgccatggaattctttcagttaccaagctctcctggtaatgtttgtggttatatcatttacacaaaacttttcaggaacttctgtgttgtttaagcaagatgtatctgtactgatgtctcagtgaatcagtctgtttattaagcacttatcagggcttccacacacttatttattttgccctagttaatcctgttgtttgctgccattggcatgaaatggccaactgtggctgttacagttctttcattcaattataacttgtaaaccagtgactcctaatctttttcaagttaagacaccttaccattgcttatttggttttatgagacagcatatncagggatcctgtaga

SEQ ID NO: 64104 - DNA, 3892 bp, Homo sapiens
ccccaccgaactccggccgcccaggctccgcctccgcgacgggccgtcgggaggaggcgaccggaagccacttaaagcagagatcgaggtgacaggcgagctggctggactcggagcgcggtcgaggctttctgcgttcgcggcggcggaatggcccgtgcgcggctcgccgcgtcgcggctctgtggtccctagacgtcggctcccgccctcggcgctgatctccggcgcgggcactgctttccactcggctcctgtcgtccgttctctcaggctcccgttcaggatttttagactctgaggagcagttggagctaatccacattatggaaatggaaaccaccgaacctgagccagactgtgtagtgcagcctccctctcctcctgatgacttttcatgccaaatgagactctctgagaagatcactccattgaagacttgttttaagaaaaaggatcagaaaagattgggaactggaaccctgaggtctttgaggccaatattaaacactcttctagaatctggctcacttgatggggtttttagatctaggaaccagagtacagatgagaacagcttacatgaacctatgatgaagaaagccatggaaatcaattcatcatgcccaccagcagaaaataatatgtctgttctgattcctgataggacaaatgttggggaccagataccggaagcccatccttccactgaagctccagaacgagtggttccaatccaagatcacagctttccatcagaaaccctcagtgggacggtggcagattccacaccagctcacttccagactgatcttttgcacccagtttcaagtgatgttcctactagtcctgactgcttagacaaagtcatagattatgttccaggcattttccaagaaaacagttttacaatccaatacattctggacaccagtgataagctgagtactgagctctttcaggacaaaagtgaagaggcttcccttgacctcgtgtttgagctggtgaaccagttgcagtaccacactcaccaagagaacggaattgaaatttgcatggactttctgcaaggcacttgtatttatggcagggattgtttgaagcaccacactgtcttgccatatcattggcagatcaaaaggacaactactcaaaagtggcagagtgtattcaatgattctcaggagcacttggaaagattttactgtaacccagaaaatgatagaatgagaatgaagtatggaggacaagaattttgggcagatttgaatgccatgaacgtgtatgaaacaactgaatttgaccaactacgaaggctgtccacaccaccctctagcaatgtcaactctatttaccacacagtctggaaattcttctgtagggaccactttggatggagagagtatcccgagtctgtcattcgattgattgaagaagccaactctcggggtctgaaagaggttcgatttatgatgtggaataaccactacatcctccacaattcattcttcaggagagagataaaaaggagacccctcttccgctcctgttttatactgcttccatatttacagacacttggtggggttcccacacaagctcctccacctcttgaagcaacttcatcatcacaaattatctgcccagatggggtcacttcagcaaacttttaccctgaaacttgggtttatatgcatccatctcaggacttcatccaagtccctgtttctgcagaggataaaagttatcggatcatttacaatctttttcataagactgtgcctgagtttaaatacagaattttgcagatattgagagtccaaaaccagtttctttgggagaaatataaaaggaaaaaggaatatatgaacaggaaaatgtttggccgtgacaggataataaatgagagacatttatttcatggaacatcccaggatgtggtagatggaatctgcaaacacaactttgaccctcgagtctgtggaaagcatgctacaatgtttggacaaggcagttattttgcaaagaaggcaagctactctcataacttttctaagaagtcctccaaaggagtccacttcatgtttctggccaaagtgctgacgggcagatacacaatgggcagtcatggcatgagaaggcccccgccagtcaatcctggcagtgtcaccagtgacctttatgactcttgtgtggataatttctttgagcctcagatttttgtcatttttaatgatgaccagagttacccttattttgttatccaatatgaagaagtcagtaacactgtttccatttgaaaaatcttggtactgctaaattatttgatatgaactcaatccagcatttgtagcaggttttgaatgggtgggactgggtggggaacagcattggacattaatagggcacttttcagacccattttttaaagtgctagaaaatgctttttttaaaaaaaaaatacaagttttaaaatgaccacttactctttaattatttactaattgctagtgtactcagtgtggaaaagactacagattacacactcttttcattcacacttgtacatatagacagcaatgttattaggagcattaaattaaaaaactgaacagcctaatttaaatgtggcttgggcctggtagaagtttgaccaaatggaatggaggctgtgagcaatgtgaggattctatttatttatttacgtttgataaaacttactggaactagtactaccatgcgtattccctgtccaaagcatcactgctttggtatagtataagttcatgaaattctggtgggtagaaagaaatttttatttctatcagcagtactaaaatgtatcagccaaccagagaacatcagtgactttaacttctgcagagtttgccccagaattcagagttctatttagaggaagttaaaacaacaacaaaaaacaaccatttgaaaaatttttgtcaccagcaaaacttttcactaattagtgatatgaaatgtgatttttgtgttgttaaacttcagctttggaaaactcagtctctttcattatcatccattccaatttgaaggagttgggcagctaatttggttaaaggcagtcttgagggttagaagtattacttccttttcgggttccagacctagcttgtgactgaaagttttagaaaaaggaagtacatctatagccgaattgataaggttattactgtgttttgcacaaagtatattagcaaaagtatttgctggaattattggtagatggcagtcccactcctacacctgctttgtcagatacagctgggttccctggctgactctgtaccttacttacactacttacttaatagaaacacaaacttggaaattgtgccagtggtccagctggagcacaacgtttggtgaatatgctgtttcctcagttcagagaggtagcaactaggtaaactccttataaaaagcaaatacctggatttacaaaagtgaaagtagttgttcacaaaagaattcgccatggaattctttcagttaccaagctctcctggtaatgtttgtggttatatcatttacacctcagtgaatcagtctgtttattaagcacttatcagggcttccacacacttatttattttgccctagttaatcctgttgtttgctgccattggcatgaaatggccaactgtggctgttacagttctttcattcaattataacttgtaaaccagtgactcctaatctttttcaagttaagacaccttaccattgcttatttggttttatgagacttgttcctttttttctccctaaggaaaaagaaagctttatgacatatttatttttttaataaaactaagcaaaaataaaacttatggtaattctttaaaaaaaaaaa

SEQ ID NO: 64105 - DNA, 440 bp, Homo sapiens
gggtttatcgatgccacaaacattaccaagctctcctggtaatgtttgtggttatatcatttacacaaaacttttcaggaacttctgtgttgtttaagcaagatgtatctgtactgatgtctcagtgaatcagtctgtttattaagcacttatcagggcttccacacacttatttattttgccctagttaatcctgttgtttgctgccattggcatgaaatggccaactgtggctgttacagttctttcattcaattataacttgtaaaccagtgactcctaatctttttcaagttaagacaccttaccattgcttatttggttttatgagacttgttcctttttttctccctaaggaaaaagaaagctttatgacatatttatttttttaataaaactaagcaaaaataaaacttatggtaattctttaaaaaaaaaaa

SEQ ID NO: 64106 - DNA, 1594 bp, Homo sapiens
ccccaccgaactccggccgcccaggctccgcctccgcgacgggccgtcgggaggaggcgaccggaagccacttaaagcagagatcgaggtgacaggcgagctggctggactcggagcgcggtcgaggctttctgcgttcgcggcggcggaatggcccgtgcgcggctcgccgcgtcgcggctctgtggtccctagacgtcggctcccgccctcggcgctgatctccggcgcgggcactgctttccactcggctcctgtcgtccgttctctcaggctcccgttcaggatttttagactctgaggagcagttggagctaatccacattatggaaatggaaaccaccgaacctgagccagactgtgtagtgcagcctccctctcctcctgatgacttttcatgccaaatgagactctctgagaagatcactccattgaagacttgttttaagaaaaaggatcagaaaagattgggaactggaaccctgaggtctttgaggccaatattaaacactcttctagaatctggctcacttgatggggtttttagatctaggaaccagagtacagatgagaacagcttacatgaacctatgatgaagaaagccatggaaatcaattcatcatgcccaccagcagaaaataatatgtctgttctgattcctgataggacaaatgttggggaccagataccggaagcccatccttccactgaagctccagaacgagtggttccaatccaagatcacagctttccatcagaaaccctcagtgggacggtggcagattccacaccagctcacttccagactgatcttttgcacccagtttcaagtgatgttcctactagtcctgactgcttagacaaagtcatagattatgttccaggcattttccaagaaaacagttttacaatccaatacattctggacaccagtgataagctgagtactgagctctttcaggacaaaagtgaagaggcttcccttgacctcgtgtttgagctggtgaaccagttgcagtaccacactcaccaagagaacggaattgaaatttgcatggactttctgcaaggcacttgtatttatggcagggattgtttgaagcaccacactgtcttgccatatcattggcagatcaaaaggacaactactcaaaagtggcagagtgtattcaatgattctcaggagcacttggaaagattttactgtaacccagaaaatgatagaatgagaatgaagtatggaggacaagaattttgggcagatttgaatgccatgaacgtgtatgaaacaactgaatttgaccaactacgaaggctgtccacaccaccctctagcaatgtcaactctatttaccacacagtctggaaattcttctgtagggaccactttggatggagagagtatcccgagtctgtcattcgattgattgaagaagccaactctcggggtctgaaagaggttcgatttatgatgtggaataaccactacatcctccacaattcattcttcaggagagagataaaaaggagacccctcttccgctcctgttttatactgcttccatatttacaggtggggttcccacaaagcgc

SEQ ID NO: 64107 - DNA, 1637 bp, Homo sapiens
ccccaccgaactccggccgcccaggctccgcctccgcgacgggccgtcgggaggaggcgaccggaagccacttaaagcagagatcgaggtgacaggcgagctggctggactcggagcgcggtcgaggctttctgcgttcgcggcggcggaatggcccgtgcgcggctcgccgcgtcgcggctctgtggtccctagacgtcggctcccgccctcggcgctgatctccggcgcgggcactgctttccactcggctcctgtcgtccgttctctcaggctcccgttcaggatttttagactctgaggagcagttggagctaatccacattatggaaatggaaaccaccgaacctgagccagactgtgtagtgcagcctccctctcctcctgatgacttttcatgccaaatgagactctctgagaagatcactccattgaagacttgttttaagaaaaaggatcagaaaagattgggaactggaaccctgaggtctttgaggccaatattaaacactcttctagaatctggctcacttgatggggtttttagatctaggaaccagagtacagatgagaacagcttacatgaacctatgatgaagaaagccatggaaatcaattcatcatgcccaccagcagaaaataatatgtctgttctgattcctgataggacaaatgttggggaccagataccggaagcccatccttccactgaagctccagaacgagtggttccaatccaagatcacagctttccatcagaaaccctcagtgggacggtggcagattccacaccagctcacttccagactgatcttttgcacccagtttcaagtgatgttcctactagtcctgactgcttagacaaagtcatagattatgttccaggcattttccaagaaaacagttttacaatccaatacattctggacaccagtgataagctgagtactgagctctttcaggacaaaagtgaagaggcttcccttgacctcgtgtttgagctggtgaaccagttgcagtaccacactcaccaagagaacggaattgaaatttgcatggactttctgcaaggcacttgtatttatggcagggattgtttgaagcaccacactgtcttgccatatcattggcagatcaaaaggacaactactcaaaagtggcagagtgtattcaatgattctcaggagcacttggaaagattttactgtaacccagaaaatgatagaatgagaatgaagtatggaggacaagaattttgggcagatttgaatgccatgaacgtgtatgaaacaactgaatttgaccaactacgaaggctgtccacaccaccctctagcaatgtcaactctatttaccacacagtctggaaattcttctgtagggaccactttggatggagagagtatcccgagtctgtcattcgattgattgaagaagccaactctcggggtctgaaagaggttcgatttatgatgtggaataaccactacatcctccacaattcattcttcaggagagagataaaaaggagacccctcttccgctcctgttttatactgcttccatatttacagacacttggtggggttcccacacagctcctccaaccatactccaactcatatcatacatgcgat

SEQ ID NO: 64108 - DNA, 2992 bp, Homo sapiens
  misc_feature (1)..(1): n is a, c, g, or t
  misc_feature (2810)..(2810): n is a, c, g, or t
  misc_feature (2924)..(2924): n is a, c, g, or t
  misc_feature (2974)..(2974): n is a, c, g, or t
ncacaaacaagctggagcagcccagaggacaagaattttgggcagatttgaatgccatgaacgtgtatgaaacaactgaatttgaccaactacgaaggctgtccacaccaccctctagcaatgtcaactctatttaccacacagtctggaaattcttctgtagggaccactttggatggagagagtatcccgagtctgtcattcgattgattgaagaagccaactctcggggtctgaaagaggttcgatttatgatgtggaataaccactacatcctccacaattcattcttcaggagagagataaaaaggagacccctcttccgctcctgttttatactgcttccatatttacagacacttggtggggttcccacacaagctcctccacctcttgaagcaacttcatcatcacaaattatctgcccagatggggtcacttcagcaaacttttaccctgaaacttgggtttatatgcatccatctcaggacttcatccaagtccctgtttctgcagaggataaaagttatcggatcatttacaatctttttcataagactgtgcctgagtttaaatacagaattttgcagatattgagagtccaaaaccagtttctttgggagaaatataaaaggaaaaaggaatatatgaacaggaaaatgtttggccgtgacaggataataaatgagagacatttatttcatggaacatcccaggatgtggtagatggaatctgcaaacacaactttgaccctcgagtctgtggaaagcatgctacaatgtttggacaaggcagttattttgcaaagaaggcaagctactctcataacttttctaagaagtcctccaaaggagtccacttcatgtttctggccaaagtgctgacgggcagatacacaatgggcagtcatggcatgagaaggcccccgccagtcaatcctggcagtgtcaccagtgacctttatgactcttgtgtggataatttctttgagcctcagatttttgtcatttttaatgatgaccagagttacccttattttgttatccaatatgaagaagtcagtaacactgtttccatttgaaaaatcttggtactgctaaattatttgatatgaactcaatccagcatttgtagcaggttttgaatgggtgggactgggtggggaacagcattggacattaatagggcacttttcagacccattttttaaagtgctagaaaatgctttttttaaaaaaaaaatacaagttttaaaatgaccacttactctttaattatttactaattgctagtgtactcagtgtggaaaagactacagattacacactcttttcattcacacttgtacatatagacagcaatgttattaggagcattaaattaaaaaactgaacagcctaatttaaatgtggcttgggcctggtagaagtttgaccaaatggaatggaggctgtgagcaatgtgaggattctatttatttatttacgtttgataaaacttactggaactagtactaccatgcgtattccctgtccaaagcatcactgctttggtatagtataagttcatgaaattctggtgggtagaaagaaatttttatttctatcagcagtactaaaatgtatcagccaaccagagaacatcagtgactttaacttctgcagagtttgccccagaattcagagttctatttagaggaagttaaaacaacaacaaaaaacaaccatttgaaaaatttttgtcaccagcaaaacttttcactaattagtgatatgaaatgtgatttttgtgttgttaaacttcagctttggaaaactcagtctctttcattatcatccattccaatttgaaggagttgggcagctaatttggttaaaggcagtcttgagggttagaagtattacttccttttcgggttccagacctagcttgtgactgaaagttttagaaaaaggaagtacatctatagccgaattgataaggttattactgtgttttgcacaaagtatattagcaaaagtatttgctggaattattggtagatggcagtcccactcctacacctgctttgtcagatacagctgggttccctggctgactctgtaccttacttacactacttacttaatagaaacacaaacttggaaattgtgccagtggtccagctggagcacaacgtttggtgaatatgctgtttcctcagttcagagaggtagcaactaggtaaactccttataaaaagcaaatacctggatttacaaaagtgaaagtagttgttcacaaaagaattcgccatggaattctttcagttaccaagctctcctggtaatgtttgtggttatatcatttacacaaaacttttcaggaacttctgtgttgtttaagcaagatgtatctgtactgatgtctcagtgaatcagtctgtttattaagcacttatcagggcttccacacacttatttattttgccctagttaatcctgttgtttgctgccattggcatgaaatggccaactgtggctgttacagttctttcattcaattataacttgtaaaccagtgactcctaatctttttcaagttaagacaccttaccattgcttatttggttttatgagacttgttcctttttttctccctaaggaaaaagaaagctttatgacatatttatttttttaataaaactaagcaaaaataaaaaaaaaaaggtgaatggagctcagttgtgtggggggaccctgatcaacaccatctgggtgggtctccggggccactggtttcgactcaagaactgaggaacctgatcgcngtgcttggcgagcacgacctcagcgagcacgacggggatgagcagagcccggcgggtggcgcaagtcatcatccccagcacgtacgtcccgggcaccaccaaccacgacatcgngctgctccgcctgcaccagcccgtggtccttactgacccatgtgtgcccncttgcctgcccgcggcgt

SEQ ID NO: 64109 - DNA, 3891 bp, Homo sapiens
ccccaccgaactccggccgcccaggctccgcctccgcgacgggccgtcgggaggaggcgaccggaagccacttaaagcagagatcgaggtgacaggcgagctggctggactcggagcgcggtcgaggctttctgcgttcgcggcggcggaatggcccgtgcgcggctcgccgcgtcgcggctctgtggtccctagacgtcggctcccgccctcggcgctgatctccggcgcgggcactgctttccactcggctcctgtcgtccgttctctcaggctcccgttcaggatttttagactctgaggagcagttggagctaatccacattatggaaatggaaaccaccgaacctgagccagactgtgtagtgcagcctccctctcctcctgatgacttttcatgccaaatgagactctctgagaagatcactccattgaagacttgttttaagaaaaaggatcagaaaagattgggaactggaaccctgaggtctttgaggccaatattaaacactcttctagaatctggctcacttgatggggtttttagatctaggaaccagagtacagatgagaacagcttacatgaacctatgatgaagaaagccatggaaatcaattcatcatgcccaccagcagaaaataatatgtctgttctgattcctgataggacaaatgttggggaccagataccggaagcccatccttccactgaagctccagaacgagtggttccaatccaagatcacagctttccatcagaaaccctcagtgggacggtggcagattccacaccagctcacttccagactgatcttttgcacccagtttcaagtgatgttcctactagtcctgactgcttagacaaagtcatagattatgttccaggcattttccaagaaaacagttttacaatccaatacattctggacaccagtgataagctgagtactgagctctttcaggacaaaagtgaagaggcttcccttgacctcgtgtttgagctggtgaaccagttgcagtaccacactcaccaagagaacggaattgaaatttgcatggactttctgcaaggcacttgtatttatggcagggattgtttgaagcaccacactgtcttgccatatcattggcagatcaaaaggacaactactcaaaagtggcagagtgtattcaatgattctcaggagcacttggaaagattttactgtaacccagaaaatgatagaatgagaatgaagtatggaggacaagaattttgggcagatttgaatgccatgaacgtgtatgaaacaactgaatttgaccaactacgaaggctgtccacaccaccctctagcaatgtcaactctatttaccacacagtctggaaattcttctgtagggaccactttggatggagagagtatcccgagtctgtcattcgattgattgaagaagccaactctcggggtctgaaagaggttcgatttatgatgtggaataaccactacatcctccacaattcattcttcaggagagagataaaaaggagacccctcttccgctcctgttttatactgcttccatatttacagacacttggtggggttcccacacaagctcctccacctcttgaagcaacttcatcatcacaaattatctgcccagatggggtcacttcagcaaacttttaccctgaaacttgggtttatatgcatccatctcaggacttcatccaagtccctgtttctgcagaggataaaagttatcggatcatttacaatctttttcataagactgtgcctgagtttaaatacagaattttgcagatattgagagtccaaaaccagtttctttgggagaaatataaaaggaaaaaggaatatatgaacaggaaaatgtttggccgtgacaggataataaatgagagacatttatttcatggaacatcccaggatgtggtagatggaatctgcaaacacaactttgaccctcgagtctgtggaaagcatgctacaatgtttggacaaggcagttattttgcaaagaaggcaagctactctcataacttttctaagaagtcctccaaaggagtccacttcatgtttctggccaaagtgctgacgggcagatacacaatgggcagtcatggcatgagaaggcccccgccagtcaatcctggcagtgtcaccagtgacctttatgactcttgtgtggataatttctttgagcctcagatttttgtcatttttaatgatgaccagagttacccttattttgttatccaatatgaagaagtcagtaacactgtttccatttgaaaaatcttggtactgctaaattatttgatatgaactcaatccagcatttgtagcaggttttgaatgggtgggactgggtggggaacagcattggacattaatagggcacttttcagacccattttttaaagtgctagaaaatgctttttttaaaaaaaaaatacaagttttaaaatgaccacttactctttaattatttactaattgctagtgtactcagtgtggaaaagactacagattacacactcttttcattcacacttgtacatatagacagcaatgttattaggagcattaaattaaaaaactgaacagcctaatttaaatgtggcttgggcctggtagaagtttgaccaaatggaatggaggctgtgagcaatgtgaggattctatttatttatttacgtttgataaaacttactggaactagtactaccatgcgtattccctgtccaaagcatcactgctttggtatagtataagttcatgaaattctggtgggtagaaagaaatttttatttctatcagcagtactaaaatgtatcagccaaccagagaacatcagtgactttaacttctgcagagtttgccccagaattcagagttctatttagaggaagttaaaacaacaacaaaaaacaaccatttgaaaaatttttgtcaccagcaaaacttttcactaattagtgatatgaaatgtgatttttgtgttgttaaacttcagctttggaaaactcagtctctttcattatcatccattccaatttgaaggagttgggcagctaatttggttaaaggcagtcttgagggttagaagtattacttccttttcgggttccagacctagcttgtgactgaaagttttagaaaaaggaagtacatctatagccgaattgataaggttattactgtgttttgcacaaagtatattagcgtcagatacagctgggttccctggctgactctgtaccttacttacactacttacttaatagaaacacaaacttggaaattgtgccagtggtccagctggagcacaacgtttggtgaatatgctgtttcctcagttcagagaggtagcaactaggtaaactccttataaaaagcaaatacctggatttacaaaagtgaaagtagttgttcacaaaagaattcgccatggaattctttcagttaccaagctctcctggtaatgtttgtggttatatcatttacacaaaacttttcaggaacttctgtgttgtttaagcaagatgtatctgtactgatgtctcagtgaatcagtctgtttattaagcacttatcagggcttccacacacttatttattttgccctagttaatcctgttgtttgctgccattggcatgaaatggccaactgtggctgttacagttctttcattcaattataacttgtaaaccagtgactcctaatctttttcaagttaagacaccttaccattgcttatttggttttatgagacttgttcctttttttctccctaaggaaaaagaaagctttatgacatatttatttttttaataaaactaagcaaaaataaaacttatggtaattctttaaaaaaaaaaa

SEQ ID NO: 64110 - DNA, 3046 bp, Homo sapiens
ccccaccgaactccggccgcccaggctccgcctccgcgacgggccgtcgggaggaggcgaccggaagccacttaaagcagagatcgaggtgacaggcgagctggctggactcggagcgcggtcgaggctttctgcgttcgcggcggcggaatggcccgtgcgcggctcgccgcgtcgcggctctgtggtccctagacgtcggctcccgccctcggcgctgatctccggcgcgggcactgctttccactcggctcctgtcgtccgttctctcaggctcccgttcaggatttttagactctgaggagcagttggagctaatccacattatggaaatggaaaccaccgaacctgagccagactgtgtagtgcagcctccctctcctcctgatgacttttcatgccaaatgagactctctgagaagatcactccattgaagacttgttttaagaaaaaggatcagaaaagattgggaactggaaccctgaggtctttgaggccaatattaaacactcttctagaatctggctcacttgatggggtttttagatctaggaaccagagtacagatgagaacagcttacatgaacctatgatgaagaaagccatggaaatcaattcatcatgcccaccagcagaaaataatatgtctgttctgattcctgataggacaaatgttggggaccagataccggaagcccatccttccactgaagctccagaacgagtggttccaatccaagatcacagctttccatcagaaaccctcagtgggacggtggcagattccacaccagctcacttccagactgatcttttgcacccagtttcaagtgatgttcctactagtcctgactgcttagacaaagtcatagattatgttccaggcattttccaagaaaacagttttacaatccaatacattctggacaccagtgataagctgagtactgagctctttcaggacaaaagtgaagaggcttcccttgacctcgtgtttgagctggtgaaccagttgcagtaccacactcaccaagagaacggaattgaaatttgcatggactttctgcaaggcacttgtatttatggcagggattgtttgaagcaccacactgtcttgccatatcattggcagatcaaaaggacaactactcaaaagtggcagagtgtattcaatgattctcaggagcacttggaaagattttactgtaacccagaaaatgatagaatgagaatgaagtatggaggacaagaattttgggcagatttgaatgccatgaacgtgtatgaaacaactgaatttgaccaactacgaaggctgtccacaccaccctctagcaatgtcaactctatttaccacacagtctggaaattcttctgtagggaccactttggatggagagagtatcccgagtctgtcattcgattgattgaagaagccaactctcggggtctgaaagaggttcgatttatgatgtggaataaccactacatcctccacaattcattcttcaggagagagataaaaaggagacccctcttccgctcctgttttatactgcttccatatttacagacacttggtggggttcccacacaagctcctccacctcttgaagcaacttcatcatcacaaattatctgcccagatggggtcacttcagcaaacttttaccctgaaacttgggtttatatgcatccatctcaggacttcatccaagtccctgtttctgcagaggataaaagttatcggatcatttacaatctttttcataagactgtgcctgagtttaaatacagaattttgcagatattgagagtccaaaaccagtttctttgggagaaatataaaaggaaaaaggaatatatgaacaggaaaatgtttggccgtgacaggataataaatgagagacatttatttcatggaacatcccaggatgtggtagatggaatctgcaaacacaactttgaccctcgagtctgtggaaagcatgctacaatgtttggacaaggcagttattttgcaaagaaggcaagctactctcataacttttctaagaagtcctccaaaggagtccacttcatgtttctggccaaagtgctgacgggcagatacacaatgggcagtcatggcatgagaaggcccccgccagtcaatcctggcagtgtcaccagtgacctttatgactcttgtgtggataatttctttgagcctcagatttttgtcatttttaatgatgaccagagttacccttattttgttatccaatatgaagaagtcagtaacactgtttccatttgaaaaatcttggtactgctaaattatttgatatgaactcaatccagcatttgtagcaggttttgaatgggtgggactgggtggggaacagcattggacattaatagggcacttttcagacccattttttaaagtgctagaaaatgctttttttaaaaaaaaaatacaagttttaaaatgaccacttactctttaattatttactaattgctagtgtactcagtgtggaaaagactacagattacacactcttttcattcacacttgtacatatagacagcaatgttattaggagcattaaattaaaaaactgaacagcctaatttaaatgtggcttgggcctggtagaagtttgaccaaatggaatggaggctgtgagcaatgtgaggattctatttatttatttacgtttgataaaacttactggaactagtactaccatgcgtattccctgtccaaagcatcactgctttggtatagtataagttcatgaaattctggtgggtagaaagaaatttttatttctatcagcagtactaaaatgtatcagccaaccagagaacatcagtgactttaacttctgcagagtttgccccagaattcagagttctatttagaggaagttaaaacaaccaccccccccccgcgggcgaccccccccccccactctttggtcacccaggcaaaaacttttttcacctaatccacccgactcctgaaatggtgaatttttggtggttgggttaaaa

SEQ ID NO: 64111 - DNA, 5258 bp, Homo sapiens
  misc_feature (1112)..(1113): n is a, c, g, or t
  misc_feature (1166)..(1166): n is a, c, g, or t
  misc_feature (1452)..(1452): n is a, c, g, or t
  misc_feature (1590)..(1590): n is a, c, g, or t
  misc_feature (4055)..(4055): n is a, c, g, or t
  misc_feature (4087)..(4087): n is a, c, g, or t
  misc_feature (4807)..(4807): n is a, c, g, or t
  misc_feature (4982)..(4982): n is a, c, g, or t
  misc_feature (4989)..(4989): n is a, c, g, or t
  misc_feature (5072)..(5072): n is a, c, g, or t
  misc_feature (5087)..(5087): n is a, c, g, or t
  misc_feature (5104)..(5104): n is a, c, g, or t
  misc_feature (5255)..(5258): n is a, c, g, or t
gcggcggccccgagcgccgcgtccgccgcgctgccccgcagcctgtcccgcctgcgcgagtgcccgggccgctcccgcatcgtgctggcgctcggggccacgcagatggcgctcggatgcctcatcgtggcagtcagcttcgccgcgctggcgctcaccacctcggcccgcgtccgccactcctgccccttctgggcaggcttctcggtgctgctgtcgggactcataggtgtcgtctcctggaagaggcctctctcccttgtgataacctttttcatgctgctttctgcagtgtgtgtaatgctgaatttggctggttcaattctctcttgtcagaatgctcagctagtcaactccctagaaggctgccagttgattaagtttgacagtgtggaggtgtgtgtctgctgtgagctgcagcaccagtcgtccggctgcagcaacctcggggagacgctgaagctgaacccgctgcaggagaactgcaacgctgtgaggctgaccttgaaggatctcctcttcagcgtgtgtgccctcaacgtcctgtccactatcgtgtgtgcgctggccacagccatgtgctgtatgcagatggtctcctccgatgtcctgcagatgttccttccgcagaggtcacatcctgccaaccccacctgcgtgactcctcacggcaccgttctccaccagaccctggatttcgacgagttcatccccccactcccgcctccaccctattaccccccagagtacacctgcacaccgtccactgaggcccagaggggcctccacctggactttgctccgtctccattcggcactttgtatgacgtggccatcaatagccccggcctgctctatcctgctgagctcccccctccgtacgaggcggtggtgggccagccccctgccagccaggttacaagtataggtcagcaggtggccgagtccagctccggggacccaaacaccagtgctggcttcagcactccagtaccagctgacagcacaagcctcctggtgtccgagggcactgctacgccaggttccagcccatcccccgatggccctgtgggcgccccagcaccctccgaacctgcccttccccctggccnngtgtctccagaggatcctggcatgggctcacaggtgcagccaggtcccgggcntgtgtcccgctccaccagcgaccccaccttgtgcacatctagcatggcaggcgatgcctcttcacacaggccgtcgtgtagccaggacctggaagcgggactgtctgaggctgtgcctgggagcgcttccatgtctcgctctgccacggctgcctgtcgggcccagctttcaccagcgggggacccagatacctggaaaactgaccaacggccaacaccagagcccttcccagcgacctccaaagagcggccacgctctttagtggacagcaaggcctatgcggangccagggttttggtggccaagtttttggaacactcacactgtgccctccccaccgaggcacagcacatggtgggtgccatgcgcttggctgtcaccaacgaggagcgcctcgaggaggaggccgtcttcggcgctgangttctggaccaggtatgaaggagccacatttctgaccgtggacaccaacgcctggcgccacagatgttcttggcagaagccatcatgcctgacaaagaggccttcaggcccagcttggcggaggataaatgtgggggggacacccaggatgatctgggggcggtgtgggcagggaactgttaccccctctctcgaggggagccgagcagtgtctctttggggattgcatttcctgcctagcccagtaattcggaaagatgactttcacgtccacagtgaactctctggttttatctggcgtgcagcaccttgaactgagcagtgttgcacaaatgtgaatacagcaacaggcgacacttacgtcacctaaagactcaaagtatctccaaaatcagggccttccaaagcaggagtctcccatcccccatttaacttagtgttcagtggacagagggtgacatcgagtcatgaaacattttctcatgtggctcgatggctctatcattaggcgttcatcacgctctggcctatttcctgtgaaaggaaataggtagtgttagcacagatggcagcctgggcccaactttctgtccacagggctattgtgcaaacaaatgtgcagtgcgggcctctgccatagcccggccccccccagggaacaggccggtgttgcgggggttggaggaacccaccatctcctgggccttgagctcggcctccctccgtggggtgccttccccccctcctcttgggccccctttctccaggctcccatcctgtccctggagcagttgtgtgatccgtaacaacaagtgccgattcccagctcctttgtgtctgagctcacttgattgagctcagcgggtcacagttctgcaggagagaggccggtttctctgagaagtagcccctcctgataaagcaggtccctttgacccagagctgacctttccccgggcatgcggcagcagacacacctgcgcaggaggatcataaaccacttacaaacccacgcgagaagggaagcagacacccaacgtgctgcttatggagaagcagacacgcccagcttggggacagcctggggaccttggactttcttagcccccatccccttgttttctggtggcatcagtggcagctgctcccaacaatggccgtggaacagcgccatccacgagaactttgtgcagtgatggaaatgcctgttcagggccactagcagccacagcccctgagctgcgttgggtgggccctgcggtgaacaaaacagcctagaggccaaggtctccccagagagcccatgagcctggcatgggggcacagggggaccagagggtgtcttccactcctgggtgccagggcagggggctcacgctgctgttccctcggctttgtggggcttgtccttgagctcccccaattccctaatgccactgtggccagtgtgctggggagcttctgtgtggctggaagctgggaagggggtgaggttccaatccaggtgcccagagccttcctccagtcctttatccctgccctgggggctgcggtgtgggactccttcagctgtggtcggctgaaaaggcttcgattgctttagagagctgaaaacacataagccaggccttttgatgacaacctgcacttttgcaggagagacgtactagagatgaatttttgagcactttattcagactataaaacaggaaatctctaattttcctcaagtgggggcttttgaattccctcaaggcaagtccctttgcaggtgaaattaattggtggattttcagaatggccgccctggagccgagcttcagccacgcctgacgccctggcctctgaatctccactgtctctgaggtgcgctggggccacaccgcaggggtttcacctgcttgggggggtccacactagggcttgggggttcacacagcattgtccctgggctgagcccttgggtgggctagagctgcagtcctcagacatggctgcaattccagcgaggccaagaccaccagccacccagtggactcggtctctggggtgttctcctcatgcagccggggcagaggcctactggaccccctcagcctgctgctcagcatccttcccttctctgcagcagggcccggtcccaatggccaatggggctgctgccccagcagtgcctccctgcgggcccctcacctgcaccccaccttcacccagctctgggtttgcgctggtggcagctctgttttgtggatacggaaactgtacccaacttgatgccgctgggctggaaccttctgccccttcgaaatgaggcagtcagggacggggtggggtgcccccatcagccccgctgctcagggccactcatggactctaggagggtccaggttctgggcttcctgggaaggtccccagaagagagaggtgctggtagactagggaatgtgctggcaacttgacccagnagctgtggtccccttggccccggctccacggnatccgggtaccagcagcaagagcccaggccccgggctgcacgtcagctcacagcccaggagaaagctggctgcttcccctccctatgcgtctttcccccgctccaatcatgctccctctgggatctgaaatgggccaactgtggctgctttgggggtgacacgctccttctccaactcagctgggccccgggcatcccctgcccctcccctgagacccaaagggggttggcacctgctgtgacaccaccgttgaccccagcctgggggccacaaggttgctgagtggggagaacatggaccccaactctatggcaagcaagatcgcagaagggggagcatcatccgcaaggacttcaggtctcccttggctggagatgaggatccacattaaatgtttgtaacacaccaggccacagaaagctcgctacacacagatgcttctccccacccatgctgactctcagaggctgctaaggcagaatttataggaaattgttttcaagccaccagagacctgtctgtacaactggaaaggctgtatttatttaatgtacctcaaggtgttttaataatgatccgtgttttaataaaaagaagtatttctggcctctgtgtctctgaggtctaactgggacagaggcaggctgagaggctgtgtaccccagtggccaggggcagggtcctgagaggaccttgcagtagccagccggggagcctgngatacccatgccactcagctgtgcttccagaagccttccggagagggtcaactccggggcagagtggggagggccagggcctggacacacccacgcccgtccacgctggccatggcagcccctccatggacatggcctccaagggctgctgggaggaatgcaggccatggctcanatgtttncttaaatacaggttttttaaagatgtgtatgatttggtgggagtcctgcctgcatgtcctcagctagccagggctctctcccngggacctgcttcccngccttgtcctgggcacngcaggaatgtcccccttggcctcctgagtggaatcccgttccctccagctttgactcaggcgacatttctcttcattccccaaggatgtggccatccctggcattcttgtttgttggccacgtcgagaattgtatttgcttttcattcttnnnn

SEQ ID NO: 64112 - DNA, 4694 bp, Homo sapiens
  misc_feature (1112)..(1113): n is a, c, g, or t
  misc_feature (1166)..(1166): n is a, c, g, or t
  misc_feature (1452)..(1452): n is a, c, g, or t
  misc_feature (1590)..(1590): n is a, c, g, or t
  misc_feature (4055)..(4055): n is a, c, g, or t
  misc_feature (4087)..(4087): n is a, c, g, or t
gcggcggccccgagcgccgcgtccgccgcgctgccccgcagcctgtcccgcctgcgcgagtgcccgggccgctcccgcatcgtgctggcgctcggggccacgcagatggcgctcggatgcctcatcgtggcagtcagcttcgccgcgctggcgctcaccacctcggcccgcgtccgccactcctgccccttctgggcaggcttctcggtgctgctgtcgggactcataggtgtcgtctcctggaagaggcctctctcccttgtgataacctttttcatgctgctttctgcagtgtgtgtaatgctgaatttggctggttcaattctctcttgtcagaatgctcagctagtcaactccctagaaggctgccagttgattaagtttgacagtgtggaggtgtgtgtctgctgtgagctgcagcaccagtcgtccggctgcagcaacctcggggagacgctgaagctgaacccgctgcaggagaactgcaacgctgtgaggctgaccttgaaggatctcctcttcagcgtgtgtgccctcaacgtcctgtccactatcgtgtgtgcgctggccacagccatgtgctgtatgcagatggtctcctccgatgtcctgcagatgttccttccgcagaggtcacatcctgccaaccccacctgcgtgactcctcacggcaccgttctccaccagaccctggatttcgacgagttcatccccccactcccgcctccaccctattaccccccagagtacacctgcacaccgtccactgaggcccagaggggcctccacctggactttgctccgtctccattcggcactttgtatgacgtggccatcaatagccccggcctgctctatcctgctgagctcccccctccgtacgaggcggtggtgggccagccccctgccagccaggttacaagtataggtcagcaggtggccgagtccagctccggggacccaaacaccagtgctggcttcagcactccagtaccagctgacagcacaagcctcctggtgtccgagggcactgctacgccaggttccagcccatcccccgatggccctgtgggcgccccagcaccctccgaacctgcccttccccctggccnngtgtctccagaggatcctggcatgggctcacaggtgcagccaggtcccgggcntgtgtcccgctccaccagcgaccccaccttgtgcacatctagcatggcaggcgatgcctcttcacacaggccgtcgtgtagccaggacctggaagcgggactgtctgaggctgtgcctgggagcgcttccatgtctcgctctgccacggctgcctgtcgggcccagctttcaccagcgggggacccagatacctggaaaactgaccaacggccaacaccagagcccttcccagcgacctccaaagagcggccacgctctttagtggacagcaaggcctatgcggangccagggttttggtggccaagtttttggaacactcacactgtgccctccccaccgaggcacagcacatggtgggtgccatgcgcttggctgtcaccaacgaggagcgcctcgaggaggaggccgtcttcggcgctgangttctggaccaggtatgaaggagccacatttctgaccgtggacaccaacgcctggcgccacagatgttcttggcagaagccatcatgcctgacaaagaggccttcaggcccagcttggcggaggataaatgtgggggggacacccaggatgatctgggggcggtgtgggcagggaactgttaccccctctctcgaggggagccgagcagtgtctctttggggattgcatttcctgcctagcccagtaattcggaaagatgactttcacgtccacagtgaactctctggttttatctggcgtgcagcaccttgaactgagcagtgttgcacaaatgtgaatacagcaacaggcgacacttacgtcacctaaagactcaaagtatctccaaaatcagggccttccaaagcaggagtctcccatcccccatttaacttagtgttcagtggacagagggtgacatcgagtcatgaaacattttctcatgtggctcgatggctctatcattaggcgttcatcacgctctggcctatttcctgtgaaaggaaataggtagtgttagcacagatggcagcctgggcccaactttctgtccacagggctattgtgcaaacaaatgtgcagtgcgggcctctgccatagcccggccccccccagggaacaggccggtgttgcgggggttggaggaacccaccatctcctgggccttgagctcggcctccctccgtggggtgccttccccccctcctcttgggccccctttctccaggctcccatcctgtccctggagcagttgtgtgatccgtaacaacaagtgccgattcccagctcctttgtgtctgagctcacttgattgagctcagcgggtcacagttctgcaggagagaggccggtttctctgagaagtagcccctcctgataaagcaggtccctttgacccagagctgacctttccccgggcatgcggcagcagacacacctgcgcaggaggatcataaaccacttacaaacccacgcgagaagggaagcagacacccaacgtgctgcttatggagaagcagacacgcccagcttggggacagcctggggaccttggactttcttagcccccatccccttgttttctggtggcatcagtggcagctgctcccaacaatggccgtggaacagcgccatccacgagaactttgtgcagtgatggaaatgcctgttcagggccactagcagccacagcccctgagctgcgttgggtgggccctgcggtgaacaaaacagcctagaggccaaggtctccccagagagcccatgagcctggcatgggggcacagggggaccagagggtgtcttccactcctgggtgccagggcagggggctcacgctgctgttccctcggctttgtggggcttgtccttgagctcccccaattccctaatgccactgtggccagtgtgctggggagcttctgtgtggctggaagctgggaagggggtgaggttccaatccaggtgcccagagccttcctccagtcctttatccctgccctgggggctgcggtgtgggactccttcagctgtggtcggctgaaaaggcttcgattgctttagagagctgaaaacacataagccaggccttttgatgacaacctgcacttttgcaggagagacgtactagagatgaatttttgagcactttattcagactataaaacaggaaatctctaattttcctcaagtgggggcttttgaattccctcaaggcaagtccctttgcaggtgaaattaattggtggattttcagaatggccgccctggagccgagcttcagccacgcctgacgccctggcctctgaatctccactgtctctgaggtgcgctggggccacaccgcaggggtttcacctgcttgggggggtccacactagggcttgggggttcacacagcattgtccctgggctgagcccttgggtgggctagagctgcagtcctcagacatggctgcaattccagcgaggccaagaccaccagccacccagtggactcggtctctggggtgttctcctcatgcagccggggcagaggcctactggaccccctcagcctgctgctcagcatccttcccttctctgcagcagggcccggtcccaatggccaatggggctgctgccccagcagtgcctccctgcgggcccctcacctgcaccccaccttcacccagctctgggtttgcgctggtggcagctctgttttgtggatacggaaactgtacccaacttgatgccgctgggctggaaccttctgccccttcgaaatgaggcagtcagggacggggtggggtgcccccatcagccccgctgctcagggccactcatggactctaggagggtccaggttctgggcttcctgggaaggtccccagaagagagaggtgctggtagactagggaatgtgctggcaacttgacccagnagctgtggtccccttggccccggctccacggnatccgggtaccagcagcaagagcccaggccccgggctgcacgtcagctcacagcccaggagaaagctggctgcttcccctccctatgcgtctttcccccgctccaatcatgctccctctgggatctgaaatgggccaactgtggctgctttgggggtgacacgctccttctccaactcagctgggccccgggcatcccctgcccctcccctgagacccaaagggggttggcacctgctgtgacaccaccgttgaccccagcctgggggccacaaggttgctgagtggggagaacatggaccccaactctatggcaagcaagatcgcagaagggggagcatcatccgcaaggacttcaggtctcccttggctggagatgaggatccacattaaatgtttgtaacacaccaggccacagaaagctcgctacacacagatgcttctccccacccatgctgactctcagaggctgctaaggcagaatttataggaaattgttttcaagccaccagagacctgtctgtacaactggaaaggctgtatttatttaatgtacctcaaggtgttttaataatgatccgtgttttaataaaaagaagtatttctgg

SEQ ID NO: 64113 - DNA, 2634 bp, Homo sapiens
  misc_feature (1112)..(1113): n is a, c, g, or t
  misc_feature (1166)..(1166): n is a, c, g, or t
  misc_feature (1452)..(1452): n is a, c, g, or t
  misc_feature (1590)..(1590): n is a, c, g, or t
gcggcggccccgagcgccgcgtccgccgcgctgccccgcagcctgtcccgcctgcgcgagtgcccgggccgctcccgcatcgtgctggcgctcggggccacgcagatggcgctcggatgcctcatcgtggcagtcagcttcgccgcgctggcgctcaccacctcggcccgcgtccgccactcctgccccttctgggcaggcttctcggtgctgctgtcgggactcataggtgtcgtctcctggaagaggcctctctcccttgtgataacctttttcatgctgctttctgcagtgtgtgtaatgctgaatttggctggttcaattctctcttgtcagaatgctcagctagtcaactccctagaaggctgccagttgattaagtttgacagtgtggaggtgtgtgtctgctgtgagctgcagcaccagtcgtccggctgcagcaacctcggggagacgctgaagctgaacccgctgcaggagaactgcaacgctgtgaggctgaccttgaaggatctcctcttcagcgtgtgtgccctcaacgtcctgtccactatcgtgtgtgcgctggccacagccatgtgctgtatgcagatggtctcctccgatgtcctgcagatgttccttccgcagaggtcacatcctgccaaccccacctgcgtgactcctcacggcaccgttctccaccagaccctggatttcgacgagttcatccccccactcccgcctccaccctattaccccccagagtacacctgcacaccgtccactgaggcccagaggggcctccacctggactttgctccgtctccattcggcactttgtatgacgtggccatcaatagccccggcctgctctatcctgctgagctcccccctccgtacgaggcggtggtgggccagccccctgccagccaggttacaagtataggtcagcaggtggccgagtccagctccggggacccaaacaccagtgctggcttcagcactccagtaccagctgacagcacaagcctcctggtgtccgagggcactgctacgccaggttccagcccatcccccgatggccctgtgggcgccccagcaccctccgaacctgcccttccccctggccnngtgtctccagaggatcctggcatgggctcacaggtgcagccaggtcccgggcntgtgtcccgctccaccagcgaccccaccttgtgcacatctagcatggcaggcgatgcctcttcacacaggccgtcgtgtagccaggacctggaagcgggactgtctgaggctgtgcctgggagcgcttccatgtctcgctctgccacggctgcctgtcgggcccagctttcaccagcgggggacccagatacctggaaaactgaccaacggccaacaccagagcccttcccagcgacctccaaagagcggccacgctctttagtggacagcaaggcctatgcggangccagggttttggtggccaagtttttggaacactcacactgtgccctccccaccgaggcacagcacatggtgggtgccatgcgcttggctgtcaccaacgaggagcgcctcgaggaggaggccgtcttcggcgctgangttctggaccaggtatgaaggagccacatttctgaccgtggacaccaacgcctggcgccacagatgttcttggcagaagccatcatgcctgacaaagaggccttcaggcccagcttggcggaggataaatgtgggggggacacccaggatgatctgggggcggtgtgggcagggaactgttaccccctctctcgaggggagccgagcagtgtctctttggggattgcatttcctgcctagcccagtaattcggaaagatgactttcacgtccacagtgaactctctggttttatctggcgtgcagcaccttgaactgagcagtgttgcacaaatgtgaatacagcaacaggcgacacttacgtcacctaaagactcaaagtatctccaaaatcagggccttccaaagcaggagtctcccatcccccatttaacttagtgttcagtggacagagggtgacatcgagtcatgaaacattttctcatgtggctcgatggctctatcattaggcgttcatcacgctctggcctatttcctgtgaaaggaaataggtagtgttagcacagatggcagcctgggcccaactttctgtccacagggctattgtgcaaacaaatgtgcagtgcgggcctctgccatagcccggccccccccagggaacaggccggtgttgcgggggttggaggaacccaccatctcctgggccttgagctcggcctccctccgtggggtgccttccccccctcctcttgggccccctttctccaggctcccatcctgtccctggagcagttgtgtgatccgtaacaacaagtgccgattcccagctcctttgtgtctgagctcacttgattgagctcagcgggtcacagttctgcaggagagaggccggtttctctgagaagtagcccctcctgataaagcaggtccctttgacccagagctgacctttccccgggccattgcgggcaacaagaacaccacccttgcgcccagggagggaatccattaaacctcccttttccaaaaactccatctccttaga

SEQ ID NO: 64114 - DNA, 1760 bp, Homo sapiens
agcgcggataaatgtagcgccgcggcgcgggccagcagctctgcgaggggccggagcgcggcggagccatgcagtacccgcaccccgggccggcggcgggcgccgtgggggtgccgctgtacgcgcccacgccgctgctgcaacccgcacacccgacgcccttttacatcgaggacatcctgggccgcgggcccgccgcgcccacgcccgcccccacgctgccgtcccccaactcctccttcaccagcctcgtgtccccctaccggaccccggtgtacgagcccacgccgatccatccagccttctcgcaccactccgccgccgcgctggccgctgcctacggacccggcggcttcgggggccctctgtaccccttcccgcggacggtgaacgactacacgcacgccctgctccgccacgaccccctgggcaaacctctactctggagccccttcttgcagaggcctctgcataaaaggaaaggcggccaggtgagattctccaacgaccagaccatcgagctggagaagaaattcgagacgcagaaatatctctctccgcccgagaggaagcgtctggccaagatgctgcagctcagcgagagacaggtcaaaacctggtttcagaatcgacgcgctaaatggaggagactaaaacaggagaaccctcaaagcaataaaaaagaagaactggaaagtttggacagttcctgtgatcagaggcaagatttgcccagtgaacagaataaaggtgcttctttggatagctctcaatgttcgccctcccctgcctcccaggaagaccttgaatcagagatttcagaggattctgatcaggaagtggacattgagggcgataaaagctattttaatgctggatgatgaccactggcattggcatgttcagaaaactggatttaggaataatgttttgctacagaaaatcttcatagaagaactggaaggctatataagaaagggaatcaattctctggtattctggaaacctaaaaatatttggtgcactgctcaattaacaaacctacatggagaccttaattttgacttaacaaatagtttatgtactgctcttaggttgttttgataaagtgacattatagtgattaaattcttccccctttaaaaaaacagttagtggttttcactatttataaaaaattaattttgaactttttgttaaatttttaagttatagctttaaaggttttaataggaccttcttgaacgacttttctgtaatctgtttatctcccacttaatggaaaggcaaaggggtaccccaaatccagaggtgcctacatttcaggcagccttggagtattttaaaaggaaaacattctttacttttatatgacattcttatactgctgtctcaaatccaaaaacatttcagagctcttgtctcagagatgtgtgttctttttgtcagagatatggttgatgagaatcttaaatgcttgttttgcactatcacttagtacctgtttgaccaaggtgttaaggggatagtacctcccaattcaagcagagaaactgacctgactaaagttaatcgcagatgaactagaagtcacaggttaattaaatgtaagtagattgtagatactgttttatatcaaacaatgtttataatgtgtatatagaattgttcactgtaaaaaaaatggccaaaatgtgttttttttttaataagtaacttgactataaaataaagccgtccgtgggacgactgacctcgtt

SEQ ID NO: 64115 - DNA, 1738 bp, Homo sapiens
cacccggtgttcgcaagtgcggctcaccaagggagatccaagggggcaaaaagttatgtataaatccgagagccactggggaaagagggtcgtggtattgtaagcccagccggtagtgcccattctttttggggttaaaggtatgtcggatttagttctaggtgtgacggctgtgtgtgtgtgtgtgtgtgtacaaggctgtgtgcatctgcggtgtcagtgtgtgactttgggtatgtttgtgtgtcggtgggaacgtgttaggtccacgtgccggtgggtgtatgtgaatgtgtctggttgggtggcctcctggcctacctttgtcatccctggggcccgacagctctggggtctggccaggccgctccagggcagtgggtgagcgccgctcttcccgctcgcaggcaaacctctactctggagccccttcttgcagaggcctctgcataaaaggaaaggcggccaggtgagattctccaacgaccagaccatcgagctggagaagaaattcgagacgcagaaatatctctctccgcccgagaggaagcgtctggccaagatgctgcagctcagcgagagacaggtcaaaacctggtttcagaatcgacgcgctaaatggaggagactaaaacaggagaaccctcaaagcaataaaaaagaagaactggaaagtttggacagttcctgtgatcagaggcaagatttgcccagtgaacagaataaaggtgcttctttggatagctctcaatgttcgccctcccctgcctcccaggaagaccttgaatcagagatttcagaggattctgatcaggaagtggacattgagggcgataaaagctattttaatgctggatgatgaccactggcattggcatgttcagaaaactggatttaggaataatgttttgctacagaaaatcttcatagaagaactggaaggctatataagaaagggaatcaattctctggtattctggaaacctaaaaatatttggtgcactgctcaattaacaaacctacatggagaccttaattttgacttaacaaatagtttatgtactgctcttaggttgttttgataaagtgacattatagtgattaaattcttccccctttaaaaaaacagttagtggttttcactatttataaaaaattaattttgaactttttgttaaatttttaagttatagctttaaaggttttaataggaccttcttgaacgacttttctgtaatctgtttatctcccacttaatggaaaggcaaaggggtaccccaaatccagaggtgcctacatttcaggcagccttggagtattttaaaaggaaaacattctttacttttatatgacattcttatactgctgtctcaaatccaaaaacatttcagagctcttgtctcagagatgtgtgttctttttgtcagagatatggttgatgagaatcttaaatgcttgttttgcactatcacttagtacctgtttgaccaaggtgttaaggggatagtacctcccaattcaagcagagaaactgacctgactaaagttaatcgcagatgaactagaagtcacaggttaattaaatgtaagtagattgtagatactgttttatatcaaacaatgtttataatgtgtatatagaattgttcactgtaaaaaaaatggccaaaatgtgttttttttttaataagtaacttgactataaaataaagccgtccgtgggacgactgacctcgtt

SEQ ID NO: 64116 - DNA, 1471 bp, Homo sapiens
cacccggtgttcgcaagtgcggctcaccaagggagatccaagggggcaaaaagttatgtataaatccgagagccactggggaaagagggtcgtggtattgtaagcccagccggtagtgcccattctttttggggttaaaggcaaacctctactctggagccccttcttgcagaggcctctgcataaaaggaaaggcggccaggtgagattctccaacgaccagaccatcgagctggagaagaaattcgagacgcagaaatatctctctccgcccgagaggaagcgtctggccaagatgctgcagctcagcgagagacaggtcaaaacctggtttcagaatcgacgcgctaaatggaggagactaaaacaggagaaccctcaaagcaataaaaaagaagaactggaaagtttggacagttcctgtgatcagaggcaagatttgcccagtgaacagaataaaggtgcttctttggatagctctcaatgttcgccctcccctgcctcccaggaagaccttgaatcagagatttcagaggattctgatcaggaagtggacattgagggcgataaaagctattttaatgctggatgatgaccactggcattggcatgttcagaaaactggatttaggaataatgttttgctacagaaaatcttcatagaagaactggaaggctatataagaaagggaatcaattctctggtattctggaaacctaaaaatatttggtgcactgctcaattaacaaacctacatggagaccttaattttgacttaacaaatagtttatgtactgctcttaggttgttttgataaagtgacattatagtgattaaattcttccccctttaaaaaaacagttagtggttttcactatttataaaaaattaattttgaactttttgttaaatttttaagttatagctttaaaggttttaataggaccttcttgaacgacttttctgtaatctgtttatctcccacttaatggaaaggcaaaggggtaccccaaatccagaggtgcctacatttcaggcagccttggagtattttaaaaggaaaacattctttacttttatatgacattcttatactgctgtctcaaatccaaaaacatttcagagctcttgtctcagagatgtgtgttctttttgtcagagatatggttgatgagaatcttaaatgcttgttttgcactatcacttagtacctgtttgaccaaggtgttaaggggatagtacctcccaattcaagcagagaaactgacctgactaaagttaatcgcagatgaactagaagtcacaggttaattaaatgtaagtagattgtagatactgttttatatcaaacaatgtttataatgtgtatatagaattgttcactgtaaaaaaaatggccaaaatgtgttttttttttaataagtaacttgactataaaataaagccgtccgtgggacgactgacctcgtt

SEQ ID NO: 64117 - DNA, 1683 bp, Homo sapiens
cacccggtgttcgcaagtgcggctcaccaagggagatccaagggggcaaaaagttatgtataaatccgagagccactggggaaagagggtcgtggtattgtaagcccagccggtagtgcccattctttttggggttaaaggtatgtcggatttagttctaggtgtgacggctgtgtgtgtgtgtgtgtgtgtacaaggctgtgtgcatctgcggtgtcagtgtgtgactttgggtatgtttgtgtgtcggtgggaacgtgttaggtccacgtgccggtgggtgtatgtgaatgtgtctggttgggtggcctcctggcctacctttgtcatccctggggcccgacagctctggggtctggccaggccgctccagggcagtgggtgagcgccgctcttcccgctcgcaggcaaacctctactctggagccccttcttgcagaggcctctgcataaaaggaaaggcggccaggtgagattctccaacgaccagaccatcgagctggagaagaaattcgagacgcagaaatatctctctccgcccgagaggaagcgtctggccaagatgctgcagctcagcgagagacaggtcaaaacctggtttcagaatcgacgcgctaaatggaggagactaaaacaggagaaccctcaaagcaataaaaaagaagaactggaaagtttggacagttcctgtgatcagaggcaagatttgcccagtgaacagaataaaggtgcttctttggatagctctcaatgttcgccctcccctgcctcccaggaagaccttgaatcagagatttcagaggattctgatcaggaagtggacattgagggcgataaaagctattttaatgctggatgatgaccactggcattggcatgttcagaaaactggatttaggaataatgttttgctacagaaaatcttcatagaagaactggaaggctatataagaaagggaatcaattctctggtattctggaaacctaaaaatatttggtgcactgctcaattaacaaacctacatggagaccttaattttgacttaacaaatagtttatgtactgctcttaggttgttttgataaagtgacattatagtgattaaattcttccccctttaaaaaaacagttagtggttttcactatttataaataggaccttcttgaacgacttttctgtaatctgtttatctcccacttaatggaaaggcaaaggggtaccccaaatccagaggtgcctacatttcaggcagccttggagtattttaaaaggaaaacattctttacttttatatgacattcttatactgctgtctcaaatccaaaaacatttcagagctcttgtctcagagatgtgtgttctttttgtcagagatatggttgatgagaatcttaaatgcttgttttgcactatcacttagtacctgtttgaccaaggtgttaaggggatagtacctcccaattcaagcagagaaactgacctgactaaagttaatcgcagatgaactagaagtcacaggttaattaaatgtaagtagattgtagatactgttttatatcaaacaatgtttataatgtgtatatagaattgttcactgtaaaaaaaatggccaaaatgtgttttttttttaataagtaacttgactataaaataaagccgtccgtgggacgactgacctcgtt

SEQ ID NO: 64118 - DNA, 1869 bp, Homo sapiens
cacccggtgttcgcaagtgcggctcaccaagggagatccaagggggcaaaaagttatgtataaatccgagagccactggggaaagagggtcgtggtattgtaagcccagccggtagtgcccattctttttggggttaaaggtatgtcggatttagttctaggtgtgacggctgtgtgtgtgtgtgtgtgtgtacaaggctgtgtgcatctgcggtgtcagtgtgtgactttgggtatgtttgtgtgtcggtgggaacgtgttaggtccacgtgccggtgggtgtatgtgaatgtgtctggttgggtggcctcctggcctacctttgtcatccctggggcccgacagctctggggtctggccaggccgctccagggcagtgggtgagcgccgctcttcccgctcgcaggcaaacctctactctggagccccttcttgcagaggcctctgcataaaaggaaaggcggccaggtgagattctccaacgaccagaccatcgagctggagaagaaattcgagacgcagaaatatctctctccgcccgagaggaagcgtctggccaagatgctgcagctcagcgagagacaggtcaaaacctggtttcagaatcgacgcgctaaatggaggagactaaaacaggagaaccctcaaagcaataaaaaagaagaactggaaagtttggacagttcctgtgatcagaggcaagatttgcccagtgaacagaataaaggtgcttctttggatagctctcaatgttcgccctcccctgcctcccaggaagaccttgaatcagagatttcagaggattctgatcaggaagtggacattgagggcgataaaagctattttaatgctggatgatgaccactggcattggcatgttcagaaaactggatttaggaataatgttttgctacagaaaatcttcatagaagaactggaaggctatataagaaagggaatcaattctctggtattctggaaacctaaaaatatttggtgcactgctcaattaacaaacctacatggagaccttaattttgacttaacaaatagtttatgtactgctcttaggttgttttgataaagtgacattatagtgattaaattcttccccctttaaaaaaacagttagtggttttcactatttataaaaaattaattttgaactttttgttaaatttttaagttatagctttaaaggttttaataggaccttcttgaacgacttttctgtaatctgtttatctcccacttaatggaaaggcaaaggggtaccccaaatccagaggtgcctacatttcaggcagccttggagtattttaaaaggaaaacattctttacttttatatgacattcttatactgctgtctcaaatccaaaaacatttcagagctcttgtctcagagatgtgtgttctttttgtcagagatatggttgatgagaatcttaaatgcttgttttgcactatcacttagtacctgtttgaccaaggtgttaaggggatagtacctcccaattcaagcagagaaactgacctgactaaagttaatcgcagatgaactagaagtcacaggttaattaaatgtaagtagattgtagatactgttttatatcaaacaatgtttataatgtgtatatagaattgttcactgtaaaaaaaatggccaaaatgtgttttttttttaataagtaacttgactataaaataaagccgtccgtgggacgactgacctcgttaaaaaaaaaaaaaaaaaaaaaagccaagaccaccaagaagcggccacagcgggccacatccaatgtcttcgcaatgtttgaccagtcccagatccaggagtttaaggaggctttcaacagtgttctacccc

SEQ ID NO: 64119 - DNA, 1238 bp, Homo sapiens
gtcatccatctgaaccagctcagcagcatccgcaacatctacaatggccttgactttttatttaatggtggccctagtggtgctcagctacaagtcattcagctctctgggctgtgatctgcctcagactcacagcctgggtaacaggagggccttgatactcctggcacaaatgcgaagaatctctcctttctcctgcctgaaggacagacatgactttgaattcccccaggaggagtttgatgataaacagttccagaaggctcaagccatctctgtcctccatgagatgatccagcagaccttcaacctcttcagcacaaaggactcatctgctgctttggatgagacccttctagatgaattctacatcgaacttgaccagcagctgaatgacctggaagtcctgtgtgatcaggaagtgggggtgatagagtctcccctgatgtacgaggactccatcctggctgtgaggaaatacttccaaagaatcactctatatctgacagagaagaaatacagctcttgtgcctgggaggttgtcagagcagaaatcatgagatccttctctttatcaatcaacttgcaaaaaagattgaagagtaaggaatgagacctggtacaacacggaaatgattctcatagactaatacagcagtctacactttgacaagttgtgctctttcaaagacccttgtttctgccaaaaccatgctatgaattgaatcaaatgtgtcaagtgttttcaggagtgttaagcaacatcctgttcagctgtatgggcactagtcccttacagatgaccatgctgatggatctattcatctatttatttaaatctttatttagttaactactatagggacttaaattagttttgttcatattatattatgtgaacttttacattgtgaattgtgtaacaaaaacatgttcttatatttattattttgccatgtttattaaatttttactatgaaaaaattctttatttattctttaaaattgaactccaacccatgaattgtgcaaactgattaaaggaagtggtgcacttgcaaacaagctctactatccctgaggaaataccagagactctggaaggtgatattcaaaaagcaaaaagcaaaattctaacactaattgaacctgacattaaaacagcacagatgactgctaccatagattcctgcctttcaaacgcagggcaagacattcattggtcatacgtagaaggc

SEQ ID NO: 64120 - DNA, 221 bp, Homo sapiens
atagacaaagtccttcccactagaacttacattccagtgggaagaattagaagcctcaggaattccattgcttacttttagttgttacttcaaaagtacttacatttaatttgattattaattatttgtcatgagcttcattttattacattttgggcacagtatgtgaattgtgtttcgttcctttaggaaaaggaaaaataatcactctttaaaaagta

SEQ ID NO: 64121 - DNA, 445 bp, Homo sapiens
agcgctttaagtagacacaatgccccagagagacatccgatcctcaggcgggtgcaccagccacctgggccccttactctgcctgtggtcccactcctggcctttgctctgggattcctgctctctgggatgcctggacttgtctccctctgtccccgggataggaagcgtcgtctttgccgagggcccagggctgctctttgtgttttcaggggttcgagtctcctctctactgcttccctgtagtatgatcttaggcaaattatttaaccccccgtacctcagtttacccacctgtaaaaatgggctaatagtatccaacctcagggagctgttgggaggcttaagtgggttaatttatgcaaaggacttagaaccctgcctggtgcatagtaacaattattatctcccctgttagtctttaaactccttcaagcctccagca

SEQ ID NO: 64122 - DNA, 472 bp, Homo sapiens
gtagtttcctggacgtatcaaatggttctttatagtcatatttcctgaaaataattttgctgtagcaatagtaactgccagttcttttgttccattgttaaaactgatgaacttcttttctgtgactcaggtgagaaaaaccagaagcttgaagaccatagtaagacatttttataaattctgggggcttggccaggcgtggtggcttatgcctgtaatcccagcactttgggaggccgaggcgggaggatcatgaggtcaggagattgagaccatcctggccaacatagtaaaaccccatctttactaaaaatacaaaaattagctgggcgtggtggcacatgcctgtagtcccagctactcgggaggctgaggcaggagaatcccttgaaccagggagctggaggttgcagtgagctgagatcgtgccacagcactgtagcctggaaacagagcgaggctccgtctcaaa

SEQ ID NO: 64123 - DNA, 1288 bp, Homo sapiens
gcacatggtctgtcccactcatcctcagagtatccgttggttttacttcatgttcagactgcagtgttgttaaagaaataaagctacagtgttttcagaaggatttgttatattatacttcatgttcccactgctccaggctaagcgtctcctctgggctccattgtttaatgcaggacaaagccaggttttctggcagcttccttttcatagcaattctcagtagaggtatagaatgagacctgcctaccttcttgggtgtttattaccccatttgtggattttactttaacttctgttaccttaaaaaaaaaaaaaaaagttggtgaggaaggcaagaaataaaagtgagtatgacagccagactgggtagtgtggatttttagcgttggtatttttgaatgtccagattttccaaatccttccttccttcctttcaacagttatagcaacaggtccagtgcttcttcattggtcacattattttcctctggttttgaaggacacttaacagaagaatgagtttacagtatggatagctcctcctagatttcaagggagtaaattcccccctctcattttgtcacaatgtttgcaatgctttttttttgcttttttttttttccttttttcttttttgagacagagtctcactctgtcacctaggctgaagtgcagtggcgtgatctcagctcactgcaacctccacctcccgggttcaagtgattctcttgcctcagcctcccgagtagctgggattacaggcatgtgccaccatgcctggctactttttgttttttcagtagagacaggatttcaacatgttggccaggctggtctcgaactcctgacctcaagtgatctgcctgcctcggcctccaaaagtgtgcaatgctttttttggttgcttccctatttggtaaaacaatgctgtgggtttttttgtttttttttttttcttgctgggatccggttttgagccaccaggcccgggccagttttttgggttttctggtaagagcacaggagtcttcacgatgtgcgcctcaggctggctctctcaaatttctgggccctcagggcgcctcctctcctgtgccaagagcctctcccaaaggtgcggggattcacgggcttgacgccacatttgcccagccccttgcctttcctgagatagcgtgggccataggtgggtgtttgccgtttgcgccaggcttccagctaatttcttaagcgtgtcaatacccacggcctttgagtttctccccttagaattagttgccctata

SEQ ID NO: 64124 - DNA, 405 bp, Homo sapiens
aaacaacattttgcctaacactgcagagcctctgaatcccacaattgagaatccaaggtagaaaggcctgcactaatagaaattttgatgtttttctcaggtaatttcccaaatggggatacagacaagtatttatctgacaccattcgacctttgagaaggcacttgaactagaattcccaggcgtctggatgcttttctgcttgtatttgagaaatgaaaatctcaaagactttcagattagtgtatggttgcagaacttggaaagcagtacagttaaatcagttatgactgcttagtccttgtattaggctctatgggccaaaaggtattgatttttgtgtagagcatcacccccaaattagctagagggtaaatttaaatgtcaatggacagtttttaaaa

SEQ ID NO: 64125 - DNA, 420 bp, Homo sapiens
aaacccaatgtcttgttcttcttctcaacccaattctaaaatgagggttttctctaagatgcaaattctaacacacacgaataatcttctcatataaggttgatggtttctctaacacaaaactcttaacagtctggatataaagtggctgtactaggatgtattcaatttcataaagttctctacagcttgtagctccattagaaacaaatctcagcgtctcaaaaaccctcagaaaactaggaatagagggaacttcctgaatttgattaagaacatctacaaaaccctgcatttaatactatacttaatggtgaaaaatggaatgctttctttctaagattgggaacaaggcaaggatgtccactctcaccactcttattcaacatacaactgaacattctaggcagtgtaacaggc

SEQ ID NO: 64126 - DNA, 788 bp, Homo sapiens
acaattcaataatattactgacatttgtttctggttcacagcctcatcttgtgaaatgctttgaaaatataaaacaattattgatatggaaacaagacattggccctcctgctgtaaaaatgctaatatctgctgaaggggaaggtctcgtgctgccaaagtatgataaatgttacaaactgtttagattctgtacaacgtcattatttaaaatctctgctttgaaatttttgatatattataaaagtgcgctaagcaaactgtttcttcaaagattatatccttacgtaaatatacttttgcctttccatattccctacaatacataatctcacctttgctctaattaaaagttgagaaagcagtcttcaaactcctgggtgcattctaatttgcacttacattttgttctgtcattaaattctgccttaagtttcctactctctttttagtgctttttccctttttggttttagtatatgaatatagataagaagaaaattggctatttggagttgttgatgctactcccactactgcttctgctgatctctggtttcactgtggtttgctcccaggcaataatgacaaactaggtccttccattacactggtcattgcagccaagaggtctctaaccctggatgtccgagtaagtgattaaaaaatgtggcccaccttttttacaaatctatcaccgtgtaagacacgagagcgggggttaaccggccacttggggcggggatccgcgggggacgcaggggtttaaaaaaaaaagcggggcgaaa

SEQ ID NO: 64127 - DNA, 334 bp, Homo sapiens
ctctatcttcataattccatctatagatgacatatcagctcagttagaagagtctcaagtcatacttgcaacaattaaaggatctccccacattgggcccattaaggatcttgtgaatgaatgggatcaaaacttgactctcttctcttacacccttgaggaatggatgaattgtcaaagaaattggctttatcttgaaccagtctttcattcttcagaaatacgaaggattaccttgaagttaaaagattaattttcccaagattttactttcttagcaatgccgagcttcttgatattctagctgatagcagaaatcctgagtctgtacagg

SEQ ID NO: 64128 - DNA, 1218 bp, Homo sapiens
aaagaagtcaaactgtctctcttcactgccgatatgattctatacctagaaaaccctaaagactctgccaaaaggctcctggaaccgataaatgacttaagtaaagtttcaggatagtaaatccatgtacaaaaatcagcatttccaaacacagtaacattcaagctgagcaccaaatcaagaacgcaatcccatttccaatagccacggaatgaaatacctaggaacacgtataaccaaggaggcaaaggatctctacaaggagaaccataaacgagatgctgagtcccagcgaggtcggaggtgccactgagccctcatcgtggtgccgttcccgctctgggttatttatctgttgctcatctcagctgttgttcctacctcaaatttcaagtccctcaacaaatataacagaaccacttctagaatgaacctttgagaagggaggtagcagtgcattgtataggaattggcattctatagaaaaccacagaaactggaaataatgaagggttgtctcttggttttaaaataatgtatacacctaaatcatccccttatgatactcatcctctaacagcaattgaacttcaatacaatgagtcattcctgagttcactcgcttcacattacatatgtttctctataaccacaagcatcctggcttggtagtgctcccacagcaccaaaaatccctgaggaggctgacaaacattgtgctgactcatgctggagacaagccacagagaacttccatcccccaccacatcagccacggagccagcccagcctctgcccacccaggcctcagtccccagtgttaagttctgatccctgatgctggcctgccagtggccagtcaagattctctttctgaaagctagtattttatgaggactgactgttgctagacattacactaagcacattatatgttgtacttcattttaccctttcaacaatcctattagtagcttactgtgggtctgcaaagccttactcaaaacatatagggctagaggttctcaggattctgaattttaaaaaaaatttgtaaaggcttatggctctcaccactgttattcaacgttgcattaaagtttctacccagagaaggcaataaaaggaaattaaagctatacagattggaagtgaagaaataaaagtctttattctcaagaatacaagacactatgtatagaaattgtaaggaatgca

SEQ ID NO: 64129 - DNA, 540 bp, Homo sapiens
tactactactagcctactactaaattcgcggccgcgtcgactctaggttcatctttcaatgttttgactgttacgaccttcaagaaggaggaactctcgcttcacttcttcctcctacgcctcaggcaaatacttattttcgtcaaccctgagttagaagcatccagaaaaagaatctgagagaatgaacttcccacttagccaagttgactcagagaaaaaaaaatcacgaagattacttgcttgcgttcaagtttcattgaagcttcagtgtatcaaagtcatgaaattaatagaatgtatgttttagggagattctgattctaaaatattttgatggaatttaatttctcaggccagaagagattttagttaagcattgattataattgacaagatttagtaatcagagaggaagatcgatgtcaatatttcacatttttatcaatataataagcatcaataataagtgagacattgtggttacagaaaaacaattatatgaactgtatactaatataatatgctttctcagtcaaa

SEQ ID NO: 64130 - DNA, 181 bp, Homo sapiens
ttctgtaaactgtgcatggctattgtcttgcagcccagaagctaagggggatgttaaacaaatatgcaagaaatgcatcactctgtatcaaaggtttagagggagaaagaggaagaaggaagagtcaattattttagaacgctgatacaaaggagtagaaagatttagctttaccatctga

SEQ ID NO: 64131 - DNA, 232 bp, Homo sapiens
catgaacacatattataaaagtacgtagggtcaaaggaacaggaccaccagcattcaaaagcagctctgtcaactaggcaataaaacactctatagcatgtgtctctgttgtccattgttgaatacactggcaggaactttgaagtgaaaaaaaaggtaagataggaaaaaaggagctattactccttttattttctctgtttaaaattaaacaggaaaacatcaattgttg

SEQ ID NO: 64132 - DNA, 2623 bp, Homo sapiens
agcgggggagtgtggaaagcgccgcatcccgggtgggaggcgaggcttccccttccccgcccctcccccggcctccagtccctcccagggccgcttcgcagagcggctaggagcacggcggcggcggcactttccccggcaggagctggagctgggctctggtgcgcgcgcggctgtgccgcccgagccggagggactggttggttgagagagagagaggaagggaatcccgggctgccgaaccgcacgttcagcccgctccgctcctgcagggcagcctttcggctctctgcgcgcgaagccgagtcccgggcgggtggggcgggggtccactgagaccgctaccggcccctcggcgctgacgggaccgcgcggggcgcacccgctgaaggcagccccggggcccgcggcccggacttggtcctgcgcagcgggcgcggggcagcgcagcgggaggaagcgagaggtgctgccctccccccggagttggaagcgcgttacccgggtccaaaatgcccaagaagaagccgacgcccatccagctgaacccggcccccgacggctctgcagttaacgggaccagctctgcggagaccaacttggaggccttgcagaagaagctggaggagctagagcttgatgagcagcagcgaaagcgccttgaggcctttcttacccagaagcagaaggtgggagaactgaaggatgacgactttgagaagatcagtgagctgggggctggcaatggcggtgtggtgttcaaggtctcccacaagccttctggcctggtcatggccagaaagctaattcatctggagatcaaacccgcaatccggaaccagatcataagggagctgcaggttctgcatgagtgcaactctccgtacatcgtgggcttctatggtgcgttctacagcgatggcgagatcagtatctgcatggagcacatggatggaggttctctggatcaagtcctgaagaaagctggaagaattcctgaacaaattttaggaaaagttagcattgctgtaataaaaggcctgacatatctgagggagaagcacaagatcatgcacagagatgtcaagccctccaacatcctagtcaactcccgtggggagatcaagctctgtgactttggggtcagcgggcagctcatcgactccatggccaactccttcgtgggcacaaggtcctacatgtcgccagaaagactccaggggactcattactctgtgcagtcagacatctggagcatgggactgtctctggtagagatggcggttgggaggtatcccatccctcctccagatgccaaggagctggagctgatgtttgggtgccaggtggaaggagatgcggctgagaccccacccaggccaaggacccccgggaggccccttagctcatacggaatggacagccgacctcccatggcaatttttgagttgttggattacatagtcaacgagcctcctccaaaactgcccagtggagtgttcagtctggaatttcaagattttgtgaataaatgcttaataaaaaaccccgcagagagagcagatttgaagcaactcatggttcatgcttttatcaagagatctgatgctgaggaagtggattttgcaggttggctctgctccaccatcggccttaaccagcccagcacaccaacccatgctgctggcgtctaagtgtttgggaagcaacaaagagcgagtcccctgcccggtggtttgccatgtcgcttttgggcctccttcccatgcctgtctctgttcagatgtgcatttcacctgtgacaaaggatgaagaacacagcatgtgccaagattctactcttgtcatttttaatattactgtctttattcttattactattattgttcccctaagtggattggctttgtgcttggggctatttgtgtgtatgctgatgatcaaaacctgtgccaggctgaattacagtgaaatttttggtgaatgtgggtagtcattcttacaattgcactgctgttcctgctccatgactggctgtctgcctgtattttcggactttgacatttgacatttggtggactttatcttgctgggcatactttctctctaggagggagccttgtgagatccttcacaggcagtgcatgtgaagcatgctttgctgctatgaaaatgagcatcagagagtgtacatcatgttattttattattattatttgcttttcatgtagaactcagcagttgacatccaaatctagccagagcccttcactgccatgatagctggggcttcaccagtctgtctactgtggtgatctgtagacttctggttgtatttctatatttattttcagtatactgtgtgggatacttagtggtatgtctctttaagttttgattaatgtttcttaaatggaattatttgaatgtcacaaattgatcaagatattaaaatgtcggatttatctttccccatatccaagtaccaatgctgttgtaaacaacgtgtatagtgcctaaaattgtatgaaaatccttttaaccattttaacctagatgtttaacaaatctaatctcttattctaataaatatactatgaaataaaaaaaaaaggagaaagct

SEQ ID NO: 64133 - DNA, 2093 bp, Homo sapiens
agcggaagtagttgagtgtgacgggtgcatcggttcgggtcgaaggaaatgaggctggagaggaccaacttggaggccttgcagaagaagctggaggagctagagcttgatgagcagcagcgaaagcgccttgaggcctttcttacccagaagcagaaggtgggagaactgaaggatgacgactttgagaagatcagtgagctgggggctggcaatggcggtgtggtgttcaaggtctcccacaagccttctggcctggtcatggccagaaagctaattcatctggagatcaaacccgcaatccggaaccagatcataagggagctgcaggttctgcatgagtgcaactctccgtacatcgtgggcttctatggtgcgttctacagcgatggcgagatcagtatctgcatggagcacatggatggaggttctctggatcaagtcctgaagaaagctggaagaattcctgaacaaattttaggaaaagttagcattgctgtaataaaaggcctgacatatctgagggagaagcacaagatcatgcacagagatgtcaagccctccaacatcctagtcaactcccgtggggagatcaagctctgtgactttggggtcagcgggcagctcatcgactccatggccaactccttcgtgggcacaaggtcctacatgtcgccagaaagactccaggggactcattactctgtgcagtcagacatctggagcatgggactgtctctggtagagatggcggttgggaggtatcccatccctcctccagatgccaaggagctggagctgatgtttgggtgccaggtggaaggagatgcggctgagaccccacccaggccaaggacccccgggaggccccttagctcatacggaatggacagccgacctcccatggcaatttttgagttgttggattacatagtcaacgagcctcctccaaaactgcccagtggagtgttcagtctggaatttcaagattttgtgaataaatgcttaataaaaaaccccgcagagagagcagatttgaagcaactcatggttcatgcttttatcaagagatctgatgctgaggaagtggattttgcaggttggctctgctccaccatcggccttaaccagcccagcacaccaacccatgctgctggcgtctaagtgtttgggaagcaacaaagagcgagtcccctgcccggtggtttgccatgtcgcttttgggcctccttcccatgcctgtctctgttcagatgtgcatttcacctgtgacaaaggatgaagaacacagcatgtgccaagattctactcttgtcatttttaatattactgtctttattcttattactattattgttcccctaagtggattggctttgtgcttggggctatttgtgtgtatgctgatgatcaaaacctgtgccaggctgaattacagtgaaatttttggtgaatgtgggtagtcattcttacaattgcactgctgttcctgctccatgactggctgtctgcctgtattttcggactttgacatttgacatttggtggactttatcttgctgggcatactttctctctaggagggagccttgtgagatccttcacaggcagtgcatgtgaagcatgctttgctgctatgaaaatgagcatcagagagtgtacatcatgttattttattattattatttgcttttcatgtagaactcagcagttgacatccaaatctagccagagcccttcactgccatgatagctggggcttcaccagtctgtctactgtggtgatctgtagacttctggttgtatttctatatttattttcagtatactgtgtgggatacttagtggtatgtctctttaagttttgattaatgtttcttaaatggaattatttgaatgtcacaaattgatcaagatattaaaatgtcggatttatctttccccatatccaagtaccaatgctgttgtaaacaacgtgtatagtgcctaaaattgtatgaaaatccttttaaccattttaacctagatgtttaacaaatctaatctcttattctaataaatatactatgaaataaaaaaaaaaggagaaagct

SEQ ID NO: 64134 - DNA, 1941 bp, Homo sapiens
agcgggggagtgtggaaagcgccgcatcccgggtgggaggcgaggcttccccttccccgcccctcccccggcctccagtccctcccagggccgcttcgcagagcggctaggagcacggcggcggcggcactttccccggcaggactgcaggttctgcatgagtgcaactctccgtacatcgtgggcttctatggtgcgttctacagcgatggcgagatcagtatctgcatggagcacatggatggaggttctctggatcaagtcctgaagaaagctggaagaattcctgaacacaacttcttcaggaacaacgttcagcacttgcctgtacactacacacagtgccctggacagtactcatgacggcgcagaagccacaaggatcagtgcaccagcagatgtcaagccctccaacatcctagtcaactcccgtggggagatcaagctctgtgactttggggtcagcgggcagctcatcgactccatggccaactccttcgtgggcacaaggtcctacatgtcgccagaaagactccaggggactcattactctgtgcagtcagacatctggagcatgggactgtctctggtagagatggcggttgggaggtatcccatccctcctccagatgccaaggagctggagctgatgtttgggtgccaggtggaaggagatgcggctgagaccccacccaggccaaggacccccgggaggccccttagctcatacggaatggacagccgacctcccatggcaatttttgagttgttggattacatagtcaacgagcctcctccaaaactgcccagtggagtgttcagtctggaatttcaagattttgtgaataaatgcttaataaaaaaccccgcagagagagcagatttgaagcaactcatggttcatgcttttatcaagagatctgatgctgaggaagtggattttgcaggttggctctgctccaccatcggccttaaccagcccagcacaccaacccatgctgctggcgtctaagtgtttgggaagcaacaaagagcgagtcccctgcccggtggtttgccatgtcgcttttgggcctccttcccatgcctgtctctgttcagatgtgcatttcacctgtgacaaaggatgaagaacacagcatgtgccaagattctactcttgtcatttttaatattactgtctttattcttattactattattgttcccctaagtggattggctttgtgcttggggctatttgtgtgtatgctgatgatcaaaacctgtgccaggctgaattacagtgaaatttttggtgaatgtgggtagtcattcttacaattgcactgctgttcctgctccatgactggctgtctgcctgtattttcggactttgacatttgacatttggtggactttatcttgctgggcatactttctctctaggagggagccttgtgagatccttcacaggcagtgcatgtgaagcatgctttgctgctatgaaaatgagcatcagagagtgtacatcatgttattttattattattatttgcttttcatgtagaactcagcagttgacatccaaatctagccagagcccttcactgccatgatagctggggcttcaccagtctgtctactgtggtgatctgtagacttctggttgtatttctatatttattttcagtatactgtgtgggatacttagtggtatgtctctttaagttttgattaatgtttcttaaatggaattatttgaatgtcacaaattgatcaagatattaaaatgtcggatttatctttccccatatccaagtaccaatgctgttgtaaacaacgtgtatagtgcctaaaattgtatgaaaatccttttaaccattttaacctagatgtttaacaaatctaatctcttattctaataaatatactatgaaataaaaaaaaaaggagaaagct

SEQ ID NO: 64135 - DNA, 878 bp, Homo sapiens
aaaaatagtgattaaaaaaaagaattcaaggccagaaccacagcccttaaaaacaaaaaaaaagtattcatatgcaggaaggtcagatgggtaagtcgtttgcatgaataattaatgccattccaagggcagtcttagaataaacaacccagatgaagtgtcaaactatttggtgttcatcaatttttctgttactttgaaaccctgctctaaccaagtacttttcaacccagtcaaaagtggctgcatctatgtgaaaaatttgcataagttaattaattccttttaaatgttatttattattattgtttttaatttagagatggggtctcactatgttactcaggctgctggtctctaactcctggcctcaagtgatcctccctcctgggccttccaaaatgcagggattacagatgtgaaccactgtacgcagcctacattttatttatgcacttaatttttatattaatgcatagacacatattaaaacgacatatcaaagtgaggtctcaagctgggtgtagtggtgcacatctgtagtcccagctactcaggaggctgaggcaggaggattgtttgagcccagtagttcaagatcagactgggcagcataaggagaccccatctttcaaacaaacaaacaaacaaaaaaacaaaatggcctcttctgcctcatccagccccctctctcactccaactctcactcaccatgggcaaccacactgaaacttagctttttgatctggtaatttgccaacatatttctaaacactatgtttatcctacgaatgtcttattatttcagttttatatactttatgtggaaaatgaagacttaatccttatacctgccctcccacatgtttccttcccc

SEQ ID NO: 64136 - DNA, 1796 bp, Homo sapiens
gttttcctagagatgtcagcctacaaaggacacaatctctcttcttcaaattcttccccaaaatgtcctttcccaacagctctcctgctgctaatacttttttagtagattccttgatcagtgcctgcaggagtgacagtttttattccagcagcgccagcatgtacatgccaccacctagcgcagacatggggacctatggaatgcaaacctgtggactgctcccgtctctggccaaaagagaagtgaaccaccaaaatatgggtatgaatgtgcatccttatatacctcaagtagacagttggacagatccgaacagatcttgtcgaatagagcaacctgttacacagcaagtccccacttgctccttcaccaccaacattaaggaagaatccaattgctgcatgtattctgataagcgcaacaaactcatttcggccgaggtcccttcgtaccagaggctggtccctgagtcttgtcccgttgagaaccctgaggttcccgtccctggatattttagactgagtcagacctacgccaccgggaaaacccaagagtacaataatagccccgaaggcagctccactgtcatgctccagctcaaccctcgtggcgcggccaagccgcagctctccgctgcccagctgcagatggaaaagaagatgaacgagcccgtgagcggccaggagcccaccaaagtctcccaggtggagagccccgaggccaaaggcggccttcccgaagagaggagctgcctggctgaggtctccgtgtccagtcccgaagtgcaggagaaggaaagcaaagaggaaatcaagtctgatacaccaaccagcaattggctcactgcaaagagtggcagaaagaagaggtgcccttacactaagcaccaaacgctggaattagaaaaagagttcttgttcaatatgtacctcacccgcgagcgccgcctagagatcagtaagagcgttaacctcaccgacaggcaggtcaagatttggtttcaaaaccgccgaatgaaactcaagaagatgagccgagagaaccggatccgagaactgaccgccaacctcacgttttcttaggtctgaggccggtctgaggccggtcagaggccaggattggagagggggcaccgcgttccagggcccagtgctggaggactgggaaagcggaaacaaaaccttcaccgctctttgtttgttgttttgttgtattttgttttcctgctagaatgtgactttggggtcattatgttcgtgctgcaagtgatctgtaatccctatgagtatatatatatatatatatatatatatataaaaacttagcacgtgtaatttattattttttcatcgtaatgcagggtaactattattgcgcattttcatttgggtcttaacttattggaactgtagagcatccatccatccatccatccagcaatgtgactttttcatgtctttcctaacacaaaaggtctatgtgtgtggttagtccatgaactcatggcattttgaatacatccagtactttaaaaatgacatatatatttaaaaaaaaaagattaagaaaacccacaagttggagggagggggacttaaaaagcacattacaatgtatcttttcacaaatgaatttagcagttgtccttggtgagatgggatattggcgatttatgccttgtagcctttcccttgtggtgcatctgtggtttggtagaagtacaacagcaacctgtcctttctgtgcatgttctggtcgcatgtataatgcaataaactctggaaatgagttca

SEQ ID NO: 64137 - DNA, 450 bp, Homo sapiens
  misc_feature (447)..(447): n is a, c, g, or t
cctcgttttagggcttaactcacaatgaatgggataatttgcctatttcttatgataaacctgtgatatttactctcgcttgatgtctttggtttcatttgtttactgttaaaggattctattagtaatagaattggtcataagtactttatgtaactttttaactgacaagagaacattatgatagatttggcctctcttccttaagtttaaaacttaagcaatttatttaaacagctaagacagaatgaaacagattgtctcattgagcaagttttaaagaatgatgacatgtaagtataacttaaggcctgaacagccttgttgatagcttttttgttttttgagatggagtttcactcttgttgcccaggctggatgcagaggttgcagtgagccgagactggccactgcactccagcctgggagacaagagcgagactcccnctc

SEQ ID NO: 64138 - DNA, 1416 bp, Homo sapiens
gcctcccaaagtgctgggattacaggcgtgagccaccgcacctggcctgtttattctcttaagagagaaaatgaggggattagtggactgtagttctggacaaggtggaaaactcttaaagtggaagtattggggcaagtgctctgacaggctaggatggtgcagtcagtcacttcacccagaaatcagtagaatgttaacagttcagactcaaaccttgtgaaaaacaggttctagaaaggaaatccctcacagcaactggcaccataatcaagacagaatttttgcagaataaatggagttacctgctttcagccccaggtcgtagctattgtctgccctgctgatatgtgataataatttgtgatcctgttgtcttaaaatggggtcactcatctccagtagaattaagtccacagtgaagttgtccccccatccccagagataaacatatatgaatgaactcacgtgataacaactactgctgcctgggatcatgagagacctgaactgaactgataggaagtgaaaggtggctgaggtaatgagaatagacccatctgcagaggatcatagaactctaaggacttctccagacctgttggctgctgctgtgatctctgcccaagaggagcctctgaccaacatccaaagggcttctggacccactggactcctctggaggtaccttggtctcccgatccatggctgtggttttttactccgtttatcactgcctgtgtgtagaatgataattgcacaattgatagtgtgaagacctcttgataaatggtgaatctgagcatatgtatttggctgacatgtcattgtgaaacctcacagcttcagtcagtgtcagcacagctagggagcatgtacctaatgcacatatcactgggcatagtctacaggcacctaataactcaggtaccttaacagtcactaatgagtgtctctccaaggtctaaacaatggaagactgtagaagatgttattcattaagatatctcaagaatgtggaagactattattcgcttctaaagggacaggacttcatagggcacctgaagaaactcccatgaaaaatcacttttacaaaatgtcaagttatgatatccaagatgaaaccaatgagtcacaacattcacataatacactgtacaaccctgatctcttgactgtcatcaaatgtttcttacctctaaaccaaagtttcattttataatttaatttttctcattttttctgttctcttagcttaagaaaagatcattacaaactttttgtaagtttttcatatatgcttgcaaagggttgtaaaactttattgtgattattcttgctttaagctgaaacttccctaatctttctttagagattgtggcatagcatgatagtttcttttccatatccaat

SEQ ID NO: 64139 - DNA, 447 bp, Homo sapiens
ttaagacggagtctcactctgttgcccaggctggagtgcagtggcgagatctcggcttactgcaagctccggttcacgccattctcctgcctcagcctccggagttactgggactacaggcgcctgacaccgcgcccggctaattttttgtattttttgtagagatggggtttcactgtggtctcgatctcctgactttgtgatctgcctgcctcggcctcccaaagtgctgggattacaggcatgagccactgcgcccagcaataattttctatttaccaaaatttagataagcataattcataaaagatggatttttttgttttaatatgaaacctctgaactttactttgttctctttcaaaaaagtatttattccctcaaagaaagatcacattctaaatgtagaacttaaaactcagaaataatggaataacataaagaaac

SEQ ID NO: 64140 - DNA, 504 bp, Homo sapiens
ttaatgaataaggtaaggaaacatctcaaaggtcatctagtaagctcattgtttgagggtgtacatccaccacctcttggctttggagttgttcatcctgctagacctgttgcacatgtttctaagttttacaagattgttagttgaattggcaaatgtaaagacccagttcagagcatctgctataaagccattcttgcaaagtgtccattctcccgcaacttgctgtgtgcaactaattcagctggatccggaaaaggaccctcagcctaggatatgttggcttttctacaggagaggaattactatttttctcccatgggatactaggggcaggcactatttcagtgctattcaagcacttgttaagagcactagctttcaggctagcctggtagcacatgcctataatcctagcactttcggagaccgaggtgggcggattgcttgagcttaggagttcaagaccagcctgggccacatggtgaaaccccttctctacca

SEQ ID NO: 64141 - DNA, 828 bp, Homo sapiens
ggagtgaataatgaattgtttctgctatactaagacacatagccagcctacttgaggagctattttcaaatgaccaagacccaggaggcccaggctaaactaatttagccctaattctacaagcacagcggtgaacagaagatctttaaatcttgtggactcaaatatctcttcagaatattaatattcacacagcatgcagcagactgcctataccttggcaatgctaatgacattgacatgtctacctccctgagcccagatcaccataaaaccaagcctaaactaaaagtgagcaaccaaaaaacccccagatttttatataagtcatgggacgaataaaatgatttaacaattgagccatatttttaaaaatacttgcaaaatatgcatatagataagtgctagtcccttcacttaacaaacttaaaagtcccatgccaaaaacttctaagaatcatttccaagtaaatacagagagaatagggaagtgccctaaacatatttttggaattcagttcttttctgatcaactctagcttgtcggaataaaagaacgtaaaaaagtataagaagaatacatttctttataagaataatacaatacctttgaatacaattcttcttatacttactctataattgtacttactctacagttttctgcaaacgtacttactctacaattttcatcatctaaaatcaaccagcaaacagtacctgcttactgtgggtgcttttcaacgttacctgttaaaaaaaaacgttgaggtctaatttacatttacttcttttaataaatataaagctaaggatcattggaatgaa

SEQ ID NO: 64142 - DNA, 843 bp, Homo sapiens
tagtcttgtttacctgggatgaggagaaacaaaactattgctattctgattagaattatgtattcctaagagtggctgcaatggcaatatttggtttaaagttgcttagctactgtataaactttcacacaatgtctttaatagctctattgagatggaatttacatacaaagaagttcacctgcttaaagtgattttcaatagattttagtatatttagtagattttagtatattgactatcataaccttttgatgatcactttcccctctccaaccgtaaacaaccactagtctactgtctgtatagacttaccagttctggacattttatttgaatggtgtcatacaatatttcataataagtttttaaaaaaatacaactttggatccagaattggtttggccttcatcataattagagttaggttcaagtgtattctatatataacaatataatttttaagaagtgataagtttctgattccatgggatactttaaagaaactcttcagtaaatttaatagaggacaaaagtatcttttaatggaaaatggtgcagtgtatattagagtagggcttttcaaagtgtgttgtcaggtctagcaccattagcatctcttgcgaactttaattaaaatgtaagttcttggctgggtgtggtggctgacacctgtaatcccaacactttgggaggccaaggcgggagggtcacttgagttcaggagttggagaccagcctgcaacatggtgaaactgtgtctctacaaaaaatacaaaaattagccgtttgtggtggcacacacatgtggtcccagctactccagaggctgaggtggaaccg

SEQ ID NO: 64143 - DNA, 323 bp, Homo sapiens
  misc_feature (171)..(171): n is a, c, g, or t
gatcttcatctatattccatcctcgttatttctagcaagtctatgaaatttcttacattaatagaaataatgtattaatattcagcaatgtgctaaacattgttgaaacattgtctcaatattactcttggaagagctctaaggtagacaatatttccaatatatgagtcntgaggaaactgaggaatggaaagattaaacaacttgttgagggtagcataattgtaaatggtgaagacataatacaaatcctaatatctatgactctaatgctttaaaaaatcattatatacactacgctgtctctgatgtgtgaatctacc

SEQ ID NO: 64144 - DNA, 4045 bp, Homo sapiens
aagcacaagctgggacgcaatgtgtgtccctctatccctacattgactttgcgggggtggggatggggtgcggggtgagtgagggaggactgcaagtgacaaacaggattcgtcaaaagagaggtgtattaaagtgccgatcaaatgtaatttaacagctaaactttccctccttggaaaacaggtgattgttgagtatttaacgtgaatcgatgtaaacctgtgtttggtgcttagacagggggcccccgggtagagtggaaccccttaagctaagcgaacaggagcctaacaaagcaaatttttccgtctgccctttccccctcttctcgttggcagggttgatcctcattactgtttgctcaaacgtttagaagtgaatttaggtccctccccccaacttatgattttatagccaataggtgatgaggtttatttgcatatttccagtcacataagcagccttggcgtgaaaacagtgtcagactcgattccccctcttcctcctcctcaagggaaagctgcccacttctagctgccctgccatcccctttaaagggcgacttgctcagcgccaaaccgcggctccagccctctccagcctccggctcagccggctcatcagtcggtccgcgccttgcagctcctccagagggacgcgccccgagatggagagcaaagccctgctcgtgctgactctggccgtgtggctccagagtctgaccgcctcccgcggaggggtggccgccgccgaccaaagaagagattttatcgacatcgaaagtaaatttgccctaaggacccctgaagacacagctgaggacacttgccacctcattcccggagtagcagagtccgtggctacctgtcatttcaatcacagcagcaaaaccttcatggtgatccatggctggacggtaacaggaatgtatgagagttgggtgccaaaacttgtggccgccctgtacaagagagaaccagactccaatgtcattgtggtggactggctgtcacgggctcaggagcattacccagtgtccgcgggctacaccaaactggtgggacaggatgtggcccggtttatcaactggatggaggaggagtttaactaccctctggacaatgtccatctcttgggatacagccttggagcccatgctgctggcattgcaggaagtctgaccaataagaaagtcaacagaattactggcctcgatccagctggacctaactttgagtatgcagaagccccgagtcgtctttctcctgatgatgcagattttgtagacgtcttacacacattcaccagagggtcccctggtcgaagcattggaatccagaaaccagttgggcatgttgacatttacccgaatggaggtacttttcagccaggatgtaacattggagaagctatccgcgtgattgcagagagaggacttggagatgtggaccagctagtgaagtgctcccacgagcgctccattcatctcttcatcgactctctgttgaatgaagaaaatccaagtaaggcctacaggtgcagttccaaggaagcctttgagaaagggctctgcttgagttgtagaaagaaccgctgcaacaatctgggctatgagatcaataaagtcagagccaaaagaagcagcaaaatgtacctgaagactcgttctcagatgccctacaaagtcttccattaccaagtaaagattcatttttctgggactgagagtgaaacccataccaatcaggcctttgagatttctctgtatggcaccgtggccgagagtgagaacatcccattcactctgcctgaagtttccacaaataagacctactccttcctaatttacacagaggtagatattggagaactactcatgttgaagctcaaatggaagagtgattcatactttagctggtcagactggtggagcagtcccggcttcgccattcagaagatcagagtaaaagcaggagagactcagaaaaaggtgatcttctgttctagggagaaagtgtctcatttgcagaaaggaaaggcacctgcggtatttgtgaaatgccatgacaagtctctgaataagaagtcaggctgaaactgggcgaatctacagaacaaagaacggcatgtgaattctgtgaagaatgaagtggaggaagtaacttttacaaaacatacccagtgtttggggtgtttcaaaagtggattttcctgaatattaatcccagccctacccttgttagttattttaggagacagtctcaagcactaaaaagtggctaattcaatttatggggtatagtggccaaatagcacatcctccaacgttaaaagacagtggatcatgaaaagtgctgttttgtcctttgagaaagaaataattgtttgagcgcagagtaaaataaggctccttcatgtggcgtattgggccatagcctataattggttagaacctcctattttaattggaattctggatctttcggactgaggccttctcaaactttactctaagtctccaagaatacagaaaatgcttttccgcggcacgaatcagactcatctacacagcagtatgaatgatgttttagaatgattccctcttgctattggaatgtggtccagacgtcaaccaggaacatgtaacttggagagggacgaagaaagggtctgataaacacagaggttttaaacagtccctaccattggcctgcatcatgacaaagttacaaattcaaggagatataaaatctagatcaattaattcttaataggctttatcgtttattgcttaatccctctctcccccttcttttttgtctcaagattatattataataatgttctctgggtaggtgttgaaaatgagcctgtaatcctcagctgacacataatttgaatggtgcagaaaaaaaaaaagaaaccgtaattttattattagattctccaaatgattttcatcaatttaaaatcattcaatatctgacagttactcttcagttttaggcttaccttggtcatgcttcagttgtacttccagtgcgtctcttttgttcctggctttgacatgaaaagataggtttgagttcaaattttgcattgtgtgagcttctacagattttagacaaggaccgtttttactaagtaaaagggtggagaggttcctggggtggattcctaagcagtgcttgtaaaccatcgcgtgcaatgagccagatggagtaccatgagggttgctatttgttgtttttaacaactaatcaagagtgagtgaacaactatttataaactagatctcctatttttcagaatgctcttctacgtataaatatgaaatgataaagatgtcaaatatctcagaggctatagctgggaacccgactgtgaaagtatgtgatatctgaacacatactagaaagctctgcatgtgtgttgtccttcagcataattcggaagggaaaacagtcgatcaagggatgtattggaacatgtcggagtagaaattgttcctgatgtgccagaacttcgaccctttctctgagagagatgatcgtgcctataaatagtaggaccaatgttgtgattaacatcatcaggcttggaatgaattctctctaaaaataaaatgatgtatgatttgttgttggcatcccctttattaattcattaaatttctggatttgggttgtgacccagggtgcattaacttaaaagattcactaaagcagcacatagcactgggaactctggctccgaaaaactttgttatatatatcaaggatgttctggctttacattttatttattagctgtaaatacatgtgtggatgtgtaaatggagcttgtacatattggaaaggtcattgtggctatctgcatttataaatgtgtggtgctaactgtatgtgtctttatcagtgatggtctcacagagccaactcactcttatgaaatgggctttaacaaaacaagaaagaaacgtacttaactgtgtgaagaaatggaatcagcttttaataaaattgacaacattttattaccaca

SEQ ID NO: 64145 - DNA, 4490 bp, Homo sapiens
aagcacaagctgggacgcaatgtgtgtccctctatccctacattgactttgcgggggtggggatggggtgcggggtgagtgagggaggactgcaagtgacaaacaggattcgtcaaaagagaggtgtattaaagtgccgatcaaatgtaatttaacagctaaactttccctccttggaaaacaggtgattgttgagtatttaacgtgaatcgatgtaaacctgtgtttggtgcttagacagggggcccccgggtagagtggaaccccttaagctaagcgaacaggagcctaacaaagcaaatttttccgtctgccctttccccctcttctcgttggcagggttgatcctcattactgtttgctcaaacgtttagaagtgaatttaggtccctccccccaacttatgattttatagccaataggtgatgaggtttatttgcatatttccagtcacataagcagccttggcgtgaaaacagtgtcagactcgattccccctcttcctcctcctcaagggaaagctgcccacttctagctgccctgccatcccctttaaagggcgacttgctcagcgccaaaccgcggctccagccctctccagcctccggctcagccggctcatcagtcggtccgcgccttgcagctcctccagagggacgcgccccgagatggagagcaaagccctgctcgtgctgactctggccgtgtggctccagagtctgaccgcctcccgcggaggggtggccgccgccgaccaaagaagagattttatcgacatcgaaagtaaatttgccctaaggacccctgaagacacagctgaggacacttgccacctcattcccggagtagcagagtccgtggctacctgtcatttcaatcacagcagcaaaaccttcatggtgatccatggctggacggtaacaggaatgtatgagagttgggtgccaaaacttgtggccgccctgtacaagagagaaccagactccaatgtcattgtggtggactggctgtcacgggctcaggagcattacccagtgtccgcgggctacaccaaactggtgggacaggatgtggcccggtttatcaactggatggaggaggagtttaactaccctctggacaatgtccatctcttgggatacagccttggagcccatgctgctggcattgcaggaagtctgaccaataagaaagtcaacagaattactggcctcgatccagctggacctaactttgagtatgcagaagccccgagtcgtctttctcctgatgatgcagattttgtagacgtcttacacacattcaccagagggtcccctggtcgaagcattggaatccagaaaccagttgggcatgttgacatttacccgaatggaggtacttttcagccaggatgtaacattggagaagctatccgcgtgattgcagagagaggacttggagatgtggaccagctagtgaagtgctcccacgagcgctccattcatctcttcatcgactctctgttgaatgaagaaaatccaagtaaggcctacaggtgcagttccaaggaagcctttgagaaagggctctgcttgagttgtagaaagaaccgctgcaacaatctgggctatgagatcaataaagtcagagccaaaagaagcagcaaaatgtacctgaagactcgttctcagatgccctacaaagtcttccattaccaagtaaagattcatttttctgggactgagagtgaaacccataccaatcaggcctttgagatttctctgtatggcaccgtggccgagagtgagaacatcccattcactctgcctgaagtttccacaaataagacctactccttcctaatttacacagaggtagatattggagaactactcatgttgaagctcaaatggaagagtgattcatactttagctggtcagactggtggagcagtcccggcttcgccattcagaagatcagagtaaaagcaggagagactcagaaaaaggtgatcttctgttctagggagaaagtgtctcatttgcagaaaggaaaggcacctgcggtatttgtgaaatgccatgacaagtctctgaataagaagtcaggctgaaactgggcgaatctacagaacaaagaacggcatgtgaattctgtgaagaatgaagtggaggaagtaacttttacaaaacatacccagtgtttggggtgtttcaaaagtggattttcctgaatattaatcccagccctacccttgttagttattttaggagacagtctcaagcactaaaaagtggctaattcaatttatggggtatagtggccaaatagcacatcctccaacgttaaaagacagtggatcatgaaaagtgctgttttgtcctttgagaaagaaataattgtttgagcgcagagtaaaataaggctccttcatgtggcgtattgggccatagcctataattggttagaacctcctattttaattggaattctggatctttcggactgaggccttctcaaactttactctaagtctccaagaatacagaaaatgcttttccgcggcacgaatcagactcatctacacagcagtatgaatgatgttttagaatgattccctcttgctattggaatgtggtccagacgtcaaccaggaacatgtaacttggagagggacgaagaaagggtctgataaacacagaggttttaaacagtccctaccattggcctgcatcatgacaaagttacaaattcaaggagatataaaatctagatcaattaattcttaataggctttatcgtttattgcttaatccctctctcccccttcttttttgtctcaagattatattataataatgttctctgggtaggtgttgaaaatgagcctgtaatcctcagctgacacataatttgaatggtgcagaaaaaaaaaaagaaaccgtaattttattattagattctccaaatgattttcatcaatttaaaatcattcaatatctgacagttactcttcagttttaggcttaccttggtcatgcttcagttgtacttccagtgcgtctcttttgttcctggctttgacatgaaaagataggtttgagttcaaattttgcattgtgtgagcttctacagattttagacaaggaccgtttttactaagtaaaagggtggagaggttcctggggtggattcctaagcagtgcttgtaaaccatcgcgtgcaatgagccagatggagtaccatgagggttgctatttgttgtttttaacaactaatcaagagtgagtgaacaactatttataaactagatctcctatttttcagaatgctcttctacgtataaatatgaaatgataaagatgtcaaatatctcagaggctatagctgggaacccgactgtgaaagtatgtgatatctgaacacatactagaaagctctgcatgtgtgttgtccttcagcataattcggaagggaaaacagtcgatcaagggatgtattggaacatgtcggagtagaaattgttcctgatgtgccagaacttcgaccctttctctgagagagatgatcgtgcctataaatagtaggaccaatgttgtgattaacatcatcaggcttggaatgaattctctctaaaaataaaatgatgtatgatttgttgttggcaaaaaaaaaaaaaaaaaaaaaaaaaaaaaaaaaaaaaaaaaaaaaaaaaaaaaaagagaaagaaaaaaaagaaaaaaaataaagaaaaaaagagaagagaaaaaaaaaaaagagaagaaagggaaaaaggagagagaggaggggagcggcaggacggagagcacgaaacaaaaacaaaagaaacgtcgccagcgcaagaaacgcaccgaaagaaaataccaaacacataccgcaagacatgggagtcggcgaaaaaacagacgacagaagcaagagaagcacgaggctgcgacaggacgcaaaaaagaggaacagaagcacacgaagaggaagatccacaagacagcagggagacaagacaaaagcaacgccgaccggagaaaagaaacaagcaagcgcagcgacaagacgccgacaaaagacgaagatcggaaagggagagcagagaaacaaaacaacaaagaagaatactgcgaacacgacagcgatgctcgaatatacaagatactaacaacagaagacgcagacgaaagagtaagcaaaacaagacaaaagtgacgagtggaggacgaggagcgagagagagcagacgaggaggaccgacagctggagacgaggacaggagagccagacgcaaagcaccaaacgaacagaagctcgtagcacgaagataactttgagatactgagagcgaactgacgagggacggagcaaacagagagcatagacagagaacaggcacacagcgacacacagggcaagaatagctgaggataagcaagcagacaacgagccgatccagcggagggagcacgacagacagaagggatagacagagagt

SEQ ID NO: 64146 - DNA, 4365 bp, Homo sapiens
aagcacaagctgggacgcaatgtgtgtccctctatccctacattgactttgcgggggtggggatggggtgcggggtgagtgagggaggactgcaagtgacaaacaggattcgtcaaaagagaggtgtattaaagtgccgatcaaatgtaatttaacagctaaactttccctccttggaaaacaggtgattgttgagtatttaacgtgaatcgatgtaaacctgtgtttggtgcttagacagggggcccccgggtagagtggaaccccttaagctaagcgaacaggagcctaacaaagcaaatttttccgtctgccctttccccctcttctcgttggcagggttgatcctcattactgtttgctcaaacgtttagaagtgaatttaggtccctccccccaacttatgattttatagccaataggtgatgaggtttatttgcatatttccagtcacataagcagccttggcgtgaaaacagtgtcagactcgattccccctcttcctcctcctcaagggaaagctgcccacttctagctgccctgccatcccctttaaagggcgacttgctcagcgccaaaccgcggctccagccctctccagcctccggctcagccggctcatcagtcggtccgcgccttgcagctcctccagagggacgcgccccgagatggagagcaaagccctgctcgtgctgactctggccgtgtggctccagagtctgaccgcctcccgcggaggggtggccgccgccgaccaaagaagagattttatcgacatcgaaagtaaatttgccctaaggacccctgaagacacagctgaggacacttgccacctcattcccggagtagcagagtccgtggctacctgtcatttcaatcacagcagcaaaaccttcatggtgatccatggctggacggtaacaggaatgtatgagagttgggtgccaaaacttgtggccgccctgtacaagagagaaccagactccaatgtcattgtggtggactggctgtcacgggctcaggagcattacccagtgtccgcgggctacaccaaactggtgggacaggatgtggcccggtttatcaactggatggaggaggagtttaactaccctctggacaatgtccatctcttgggatacagccttggagcccatgctgctggcattgcaggaagtctgaccaataagaaagtcaacagaattactggcctcgatccagctggacctaactttgagtatgcagaagccccgagtcgtctttctcctgatgatgcagattttgtagacgtcttacacacattcaccagagggtcccctggtcgaagcattggaatccagaaaccagttgggcatgttgacatttacccgaatggagagtgattcatactttagctggtcagactggtggagcagtcccggcttcgccattcagaagatcagagtaaaagcaggagagactcagaaaaaggtgatcttctgttctagggagaaagtgtctcatttgcagaaaggaaaggcacctgcggtatttgtgaaatgccatgacaagtctctgaataagaagtcaggctgaaactgggcgaatctacagaacaaagaacggcatgtgaattctgtgaagaatgaagtggaggaagtaacttttacaaaacatacccagtgtttggggtgtttcaaaagtggattttcctgaatattaatcccagccctacccttgttagttattttaggagacagtctcaagcactaaaaagtggctaattcaatttatggggtatagtggccaaatagcacatcctccaacgttaaaagacagtggatcatgaaaagtgctgttttgtcctttgagaaagaaataattgtttgagcgcagagtaaaataaggctccttcatgtggcgtattgggccatagcctataattggttagaacctcctattttaattggaattctggatctttcggactgaggccttctcaaactttactctaagtctccaagaatacagaaaatgcttttccgcggcacgaatcagactcatctacacagcagtatgaatgatgttttagaatgattccctcttgctattggaatgtggtccagacgtcaaccaggaacatgtaacttggagagggacgaagaaagggtctgataaacacagaggttttaaacagtccctaccattggcctgcatcatgacaaagttacaaattcaaggagatataaaatctagatcaattaattcttaataggctttatcgtttattgcttaatccctctctcccccttcttttttgtctcaagattatattataataatgttctctgggtaggtgttgaaaatgagcctgtaatcctcagctgacacataatttgaatggtgcagaaaaaaaaaaagaaaccgtaattttattattagattctccaaatgattttcatcaatttaaaatcattcaatatctgacagttactcttcagttttaggcttaccttggtcatgcttcagttgtacttccagtgcgtctcttttgttcctggctttgacatgaaaagataggtttgagttcaaattttgcattgtgtgagcttctacagattttagacaaggaccgtttttactaagtaaaagggtggagaggttcctggggtggattcctaagcagtgcttgtaaaccatcgcgtgcaatgagccagatggagtaccatgagggttgctatttgttgtttttaacaactaatcaagagtgagtgaacaactatttataaactagatctcctatttttcagaatgctcttctacgtataaatatgaaatgataaagatgtcaaatatctcagaggctatagctgggaacccgactgtgaaagtatgtgatatctgaacacatactagaaagctctgcatgtgtgttgtccttcagcataattcggaagggaaaacagtcgatcaagggatgtattggaacatgtcggagtagaaattgttcctgatgtgccagaacttcgaccctttctctgagagagatgatcgtgcctataaatagtaggaccaatgttgtgattaacatcatcaggcttggaatgaattctctctaaaaataaaatgatgtatgatttgttgttggcatcccctttattaattcattaaatttctggatttgggttgtgacccagggtgcattaacttaaaagattcactaaagcagcacatagcactgggaactctggctccgaaaaactttgttatatatatcaaggatgttctggctttacattttatttattagctgtaaatacatgtgtggatgtgtaaatggagcttgtacatattggaaaggtcattgtggctatctgcatttataaatgtgtggtgctaactgtatgtgtctttatcagtgatggtctcacagagccaactcactcttatgaaatgggctttaacaaaacaagaaagaaacgtacttaactgtgtgaagaaatggaatcagcttttaataaaattgacaacattttattaccacaaaaaaaaaaaaaaaaaaaaaaaaaaaaaaaaaaaaaaaaaaaaaaaaaaaaaaaagagaaagaaaaaaaagaaaaaaaataaagaaaaaaagagaagagaaaaaaaaaaaagagaagaaagggaaaaaggagagagaggaggggagcggcaggacggagagcacgaaacaaaaacaaaagaaacgtcgccagcgcaagaaacgcaccgaaagaaaataccaaacacataccgcaagacatgggagtcggcgaaaaaacagacgacagaagcaagagaagcacgaggctgcgacaggacgcaaaaaagaggaacagaagcacacgaagaggaagatccacaagacagcagggagacaagacaaaagcaacgccgaccggagaaaagaaacaagcaagcgcagcgacaagacgccgacaaaagacgaagatcggaaagggagagcagagaaacaaaacaacaaagaagaatactgcgaacacgacagcgatgctcgaatatacaagatactaacaacagaagacgcagacgaaagagtaagcaaaacaagacaaaagtgacgagtggaggacgaggagcgagagagagcagacgaggaggaccgacagctggagacgaggacaggagagccagacgcaaagcaccaaacgaacagaagctcgtagcacgaagataactttgagatactgagagcgaactgacgagggacggagcaaacagagagcatagacagagaacaggcacacagcgacacacagggcaagaatagctgaggataagcaagcagacaacgagccgatccagcggagggagcacgacagacagaagggatagacagagagt

SEQ ID NO: 64147 - DNA, 4886 bp, Homo sapiens
aagcacaagctgggacgcaatgtgtgtccctctatccctacattgactttgcgggggtggggatggggtgcggggtgagtgagggaggactgcaagtgacaaacaggattcgtcaaaagagaggtgtattaaagtgccgatcaaatgtaatttaacagctaaactttccctccttggaaaacaggtgattgttgagtatttaacgtgaatcgatgtaaacctgtgtttggtgcttagacagggggcccccgggtagagtggaaccccttaagctaagcgaacaggagcctaacaaagcaaatttttccgtctgccctttccccctcttctcgttggcagggttgatcctcattactgtttgctcaaacgtttagaagtgaatttaggtccctccccccaacttatgattttatagccaataggtgatgaggtttatttgcatatttccagtcacataagcagccttggcgtgaaaacagtgtcagactcgattccccctcttcctcctcctcaagggaaagctgcccacttctagctgccctgccatcccctttaaagggcgacttgctcagcgccaaaccgcggctccagccctctccagcctccggctcagccggctcatcagtcggtccgcgccttgcagctcctccagagggacgcgccccgagatggagagcaaagccctgctcgtgctgactctggccgtgtggctccagagtctgaccgcctcccgcggaggggtggccgccgccgaccaaagaagagattttatcgacatcgaaagtaaatttgccctaaggacccctgaagacacagctgaggacacttgccacctcattcccggagtagcagagtccgtggctacctgtcatttcaatcacagcagcaaaaccttcatggtgatccatggctggacggtaacaggaatgtatgagagttgggtgccaaaacttgtggccgccctgtacaagagagaaccagactccaatgtcattgtggtggactggctgtcacgggctcaggagcattacccagtgtccgcgggctacaccaaactggtgggacaggatgtggcccggtttatcaactggatggaggaggagtttaactaccctctggacaatgtccatctcttgggatacagccttggagcccatgctgctggcattgcaggaagtctgaccaataagaaagtcaacagaattactggcctcgatccagctggacctaactttgagtatgcagaagccccgagtcgtctttctcctgatgatgcagattttgtagacgtcttacacacattcaccagagggtcccctggtcgaagcattggaatccagaaaccagttgggcatgttgacatttacccgaatggaggtacttttcagccaggatgtaacattggagaagctatccgcgtgattgcagagagaggacttggagatgtggaccagctagtgaagtgctcccacgagcgctccattcatctcttcatcgactctctgttgaatgaagaaaatccaagtaaggcctacaggtgcagttccaaggaagcctttgagaaagggctctgcttgagttgtagaaagaaccgctgcaacaatctgggctatgagatcaataaagtcagagccaaaagaagcagcaaaatgtacctgaagactcgttctcagatgccctacaaagtcttccattaccaagtaaagattcatttttctgggactgagagtgaaacccataccaatcaggcctttgagatttctctgtatggcaccgtggccgagagtgagaacatcccattcactctgcctgaagtttccacaaataagacctactccttcctaatttacacagaggtagatattggagaactactcatgttgaagctcaaatggaagagtgattcatactttagctggtcagactggtggagcagtcccggcttcgccattcagaagatcagagtaaaagcaggagagactcagaaaaaggtgatcttctgttctagggagaaagtgtctcatttgcagaaaggaaaggcacctgcggtatttgtgaaatgccatgacaagtctctgaataagaagtcaggctgaaactgggcgaatctacagaacaaagaacggcatgtgaattctgtgaagaatgaagtggaggaagtaacttttacaaaacatacccagtgtttggggtgtttcaaaagtggattttcctgaatattaatcccagccctacccttgttagttattttaggagacagtctcaagcactaaaaagtggctaattcaatttatggggtatagtggccaaatagcacatcctccaacgttaaaagacagtggatcatgaaaagtgctgttttgtcctttgagaaagaaataattgtttgagcgcagagtaaaataaggctccttcatgtggcgtattgggccatagcctataattggttagaacctcctattttaattggaattctggatctttcggactgaggccttctcaaactttactctaagtctccaagaatacagaaaatgcttttccgcggcacgaatcagactcatctacacagcagtatgaatgatgttttagaatgattccctcttgctattggaatgtggtccagacgtcaaccaggaacatgtaacttggagagggacgaagaaagggtctgataaacacagaggttttaaacagtccctaccattggcctgcatcatgacaaagttacaaattcaaggagatataaaatctagatcaattaattcttaataggctttatcgtttattgcttaatccctctctcccccttcttttttgtctcaagattatattataataatgttctctgggtaggtgttgaaaatgagcctgtaatcctcagctgacacataatttgaatggtgcagaaaaaaaaaaagaaaccgtaattttattattagattctccaaatgattttcatcaatttaaaatcattcaatatctgacagttactcttcagttttaggcttaccttggtcatgcttcagttgtacttccagtgcgtctcttttgttcctggctttgacatgaaaagataggtttgagttcaaattttgcattgtgtgagcttctacagattttagacaaggaccgtttttactaagtaaaagggtggagaggttcctggggtggattcctaagcagtgcttgtaaaccatcgcgtgcaatgagccagatggagtaccatgagggttgctatttgttgtttttaacaactaatcaagagtgagtgaacaactatttataaactagatctcctatttttcagaatgctcttctacgtataaatatgaaatgataaagatgtcaaatatctcagaggctatagctgggaacccgactgtgaaagtatgtgatatctgaacacatactagaaagctctgcatgtgtgttgtccttcagcataattcggaagggaaaacagtcgatcaagggatgtattggaacatgtcggagtagaaattgttcctgatgtgccagaacttcgaccctttctctgagagagatgatcgtgcctataaatagtaggaccaatgttgtgattaacatcatcaggcttggaatgaattctctctaaaaataaaatgatgtatgatttgttgttggcatcccctttattaattcattaaatttctggatttgggttgtgacccagggtgcattaacttaaaagattcactaaagcagcacatagcactgggaactctggctccgaaaaactttgttatatatatcaaggatgttctggctttacattttatttattagctgtaaatacatgtgtggatgtgtaaatggagcttgtacatattggaaaggtcattgtggctatctgcatttataaatgtgtggtgctaactgtatgtgtctttatcagtgatggtctcacagagccaactcactcttatgaaatgggctttaacaaaacaagaaagaaacgtacttaactgtgtgaagaaatggaatcagcttttaataaaattgacaacattttattaccacaaaaaaaaaaaaaaaaaaaaaaaaaaaaaaaaaaaaaaaaaaaaaaaaaaaaaaaagagaaagaaaaaaaagaaaaaaaataaagaaaaaaagagaagagaaaaaaaaaaaagagaagaaagggaaaaaggagagagaggaggggagcggcaggacggagagcacgaaacaaaaacaaaagaaacgtcgccagcgcaagaaacgcaccgaaagaaaataccaaacacataccgcaagacatgggagtcggcgaaaaaacagacgacagaagcaagagaagcacgaggctgcgacaggacgcaaaaaagaggaacagaagcacacgaagaggaagatccacaagacagcagggagacaagacaaaagcaacgccgaccggagaaaagaaacaagcaagcgcagcgacaagacgccgacaaaagacgaagatcggaaagggagagcagagaaacaaaacaacaaagaagaatactgcgaacacgacagcgatgctcgaatatacaagatactaacaacagaagacgcagacgaaagagtaagcaaaacaagacaaaagtgacgagtggaggacgaggagcgagagagagcagacgaggaggaccgacagctggagacgaggacaggagagccagacgcaaagcaccaaacgaacagaagctcgtagcacgaagataactttgagatactgagagcgaactgacgagggacggagcaaacagagagcatagacagagaacaggcacacagcgacacacagggcaagaatagctgaggataagcaagcagacaacgagccgatccagcggagggagcacgacagacagaagggatagacagagagt

SEQ ID NO: 64148 - DNA, 4175 bp, Homo sapiens
agatctctgagggctggaagtgctaaggacaatttcataaagaagaaagaagagattttatcgacatcgaaagtaaatttgccctaaggacccctgaagacacagctgaggacacttgccacctcattcccggagtagcagagtccgtggctacctgtcatttcaatcacagcagcaaaaccttcatggtgatccatggctggacggtaacaggaatgtatgagagttgggtgccaaaacttgtggccgccctgtacaagagagaaccagactccaatgtcattgtggtggactggctgtcacgggctcaggagcattacccagtgtccgcgggctacaccaaactggtgggacaggatgtggcccggtttatcaactggatggaggaggagtttaactaccctctggacaatgtccatctcttgggatacagccttggagcccatgctgctggcattgcaggaagtctgaccaataagaaagtcaacagaattactggcctcgatccagctggacctaactttgagtatgcagaagccccgagtcgtctttctcctgatgatgcagattttgtagacgtcttacacacattcaccagagggtcccctggtcgaagcattggaatccagaaaccagttgggcatgttgacatttacccgaatggaggtacttttcagccaggatgtaacattggagaagctatccgcgtgattgcagagagaggacttggagatgtggaccagctagtgaagtgctcccacgagcgctccattcatctcttcatcgactctctgttgaatgaagaaaatccaagtaaggcctacaggtgcagttccaaggaagcctttgagaaagggctctgcttgagttgtagaaagaaccgctgcaacaatctgggctatgagatcaataaagtcagagccaaaagaagcagcaaaatgtacctgaagactcgttctcagatgccctacaaagtcttccattaccaagtaaagattcatttttctgggactgagagtgaaacccataccaatcaggcctttgagatttctctgtatggcaccgtggccgagagtgagaacatcccattcactctgcctgaagtttccacaaataagacctactccttcctaatttacacagaggtagatattggagaactactcatgttgaagctcaaatggaagagtgattcatactttagctggtcagactggtggagcagtcccggcttcgccattcagaagatcagagtaaaagcaggagagactcagaaaaaggtgatcttctgttctagggagaaagtgtctcatttgcagaaaggaaaggcacctgcggtatttgtgaaatgccatgacaagtctctgaataagaagtcaggctgaaactgggcgaatctacagaacaaagaacggcatgtgaattctgtgaagaatgaagtggaggaagtaacttttacaaaacatacccagtgtttggggtgtttcaaaagtggattttcctgaatattaatcccagccctacccttgttagttattttaggagacagtctcaagcactaaaaagtggctaattcaatttatggggtatagtggccaaatagcacatcctccaacgttaaaagacagtggatcatgaaaagtgctgttttgtcctttgagaaagaaataattgtttgagcgcagagtaaaataaggctccttcatgtggcgtattgggccatagcctataattggttagaacctcctattttaattggaattctggatctttcggactgaggccttctcaaactttactctaagtctccaagaatacagaaaatgcttttccgcggcacgaatcagactcatctacacagcagtatgaatgatgttttagaatgattccctcttgctattggaatgtggtccagacgtcaaccaggaacatgtaacttggagagggacgaagaaagggtctgataaacacagaggttttaaacagtccctaccattggcctgcatcatgacaaagttacaaattcaaggagatataaaatctagatcaattaattcttaataggctttatcgtttattgcttaatccctctctcccccttcttttttgtctcaagattatattataataatgttctctgggtaggtgttgaaaatgagcctgtaatcctcagctgacacataatttgaatggtgcagaaaaaaaaaaagaaaccgtaattttattattagattctccaaatgattttcatcaatttaaaatcattcaatatctgacagttactcttcagttttaggcttaccttggtcatgcttcagttgtacttccagtgcgtctcttttgttcctggctttgacatgaaaagataggtttgagttcaaattttgcattgtgtgagcttctacagattttagacaaggaccgtttttactaagtaaaagggtggagaggttcctggggtggattcctaagcagtgcttgtaaaccatcgcgtgcaatgagccagatggagtaccatgagggttgctatttgttgtttttaacaactaatcaagagtgagtgaacaactatttataaactagatctcctatttttcagaatgctcttctacgtataaatatgaaatgataaagatgtcaaatatctcagaggctatagctgggaacccgactgtgaaagtatgtgatatctgaacacatactagaaagctctgcatgtgtgttgtccttcagcataattcggaagggaaaacagtcgatcaagggatgtattggaacatgtcggagtagaaattgttcctgatgtgccagaacttcgaccctttctctgagagagatgatcgtgcctataaatagtaggaccaatgttgtgattaacatcatcaggcttggaatgaattctctctaaaaataaaatgatgtatgatttgttgttggcatcccctttattaattcattaaatttctggatttgggttgtgacccagggtgcattaacttaaaagattcactaaagcagcacatagcactgggaactctggctccgaaaaactttgttatatatatcaaggatgttctggctttacattttatttattagctgtaaatacatgtgtggatgtgtaaatggagcttgtacatattggaaaggtcattgtggctatctgcatttataaatgtgtggtgctaactgtatgtgtctttatcagtgatggtctcacagagccaactcactcttatgaaatgggctttaacaaaacaagaaagaaacgtacttaactgtgtgaagaaatggaatcagcttttaataaaattgacaacattttattaccacaaaaaaaaaaaaaaaaaaaaaaaaaaaaaaaaaaaaaaaaaaaaaaaaaaaaaaaagagaaagaaaaaaaagaaaaaaaataaagaaaaaaagagaagagaaaaaaaaaaaagagaagaaagggaaaaaggagagagaggaggggagcggcaggacggagagcacgaaacaaaaacaaaagaaacgtcgccagcgcaagaaacgcaccgaaagaaaataccaaacacataccgcaagacatgggagtcggcgaaaaaacagacgacagaagcaagagaagcacgaggctgcgacaggacgcaaaaaagaggaacagaagcacacgaagaggaagatccacaagacagcagggagacaagacaaaagcaacgccgaccggagaaaagaaacaagcaagcgcagcgacaagacgccgacaaaagacgaagatcggaaagggagagcagagaaacaaaacaacaaagaagaatactgcgaacacgacagcgatgctcgaatatacaagatactaacaacagaagacgcagacgaaagagtaagcaaaacaagacaaaagtgacgagtggaggacgaggagcgagagagagcagacgaggaggaccgacagctggagacgaggacaggagagccagacgcaaagcaccaaacgaacagaagctcgtagcacgaagataactttgagatactgagagcgaactgacgagggacggagcaaacagagagcatagacagagaacaggcacacagcgacacacagggcaagaatagctgaggataagcaagcagacaacgagccgatccagcggagggagcacgacagacagaagggatagacagagagt

SEQ ID NO: 64149 - DNA, 447 bp, Homo sapiens
actgataatctatgagtgcttctgcagtcatgaggggctttgggtctctgcaaaactcttttctcaggtttaatataattgtgggtaccgatttttcagtgctgtaagctcctgggtccactgaaggcaacctggtggctcaaagaaacttgatgattgaatcagtggtattgttcttctcaaatgataatataggtcttaaaaattccaatgtgacataggtaattttataaaatacattaaaaatgagtcactgaggttgagaaaatttcagcctgttcctgaagatcatggagcattgttggtagcactgataaatggcaaagttaggaccttagcccagattatttgctcctaagctcattgggtttacacttttgcttttctttagattcataactattgcatcaaagacagttatcgtacactcctctaatcttaggaaaa

SEQ ID NO: 64150 - DNA, 301 bp, Homo sapiens
aggtttctctcaagagctctactcatggaaggctctattctgataaactctccgtctcccctgccattacaacgttgaaatgaaaatcccctgagctaaaagtaaaacaaaacagtgtctaaggataacttagaaattactcatactgctaaaggtattttaacagatttaagaattaatatttcctgtttttatatagtttttgcattgggcataatgcagtacagtatgcaaagattagtatatttacaattgctttcactacttttcttagaggcaataaaaatgcacctgtgaattt

SEQ ID NO: 64151 - DNA, 409 bp, Homo sapiens
cgtctctactaaaaatacaaaaattagctgggcatggtggtgcatggtagcatggtggtcccagctattcaggatgctgaggcaggagaatcgcttgaacccaggaggtggaggttgtggtgagctgagatcacgccactgcactccagcctgggtcacagggtgagactccatctcaaaaaaaaaaaaaaaaaaatacaatatttgcaaactggtcattatttaaataagttctaagttgtattcaaattatttaatttcgtgagtcttagattcactaagtacctgactttcagtggtattatgtagtctaagaagtcgacgtagagcagctgcaatcctctgagcatcacacattgttaaaagtcagaaggtgactctttaaatattgtgaataccagcctaaatc

SEQ ID NO: 64152 - DNA, 155 bp, Homo sapiens
tcataacagggaagtgaaagttgtcaactatgcaaaagcaaaattaaataaaatatcagagttaaaaagattttaccatatagatttaaaatacagtcttagaatctattcaagaacttcacatcaatgagaaaatgtctctgtaaataaatcca

SEQ ID NO: 64153 - DNA, 377 bp, Homo sapiens
aactctcctaattcttttccttagctagctaccttgcaagctattatataaaagataacagctatttcctaagttaccctctaactaaaataccatgtaccccacaccaaccagaatggcaagaatcttaaggacaaaataccatgatgctttagcaagtggaatattcatacattgctggtgagaaggtaaactggtacaagcattctggaagactgttttgcagggatctactgaagctgaaatacacatggcctacaaatgagcaattccactcccaggcataaacataacagaaatacaaaaacatgtacaccacagaagcactattcataacagtcaaaaactgaaaaccacccaaacaagcaacaaaagta

SEQ ID NO: 64154 - DNA, 245 bp, Homo sapiens
aggaaactcattcaggcaagttcagccctttatgaggaattcccctgtggtcacattccaattcctggacctgctgccaccctcagaactgcatgctccttcttcagactttctaagaatgactcaggtcattggtggagtgaagtcaagatttccaactcagtcacctgaagagatggagataccattcatggagctggaggtccctggagatttgggaattcagataacaagctaagataagg

SEQ ID NO: 64155 - DNA, 1910 bp, Homo sapiens
attgtcatgctggtgggcgtcccacctgaaaggtctccccgccccgactggggtttgttgttgaagaaggagaatccccggaaaggctgagtctccagctcaaggtcaaaacgtccaaggccgaaagccctccagtttcccctggacgccttgctcctgcttctgctacgaccttctggggaaaacgaatttctcattttcttcttaaattgccattttcgctttaggagatgaatgttttcctttggctgttttggcaatgactctgaattaaagcgatgctaacgcctcttttccccctaattgttaaaagctatggactgcaggaagatggcccgcttctcttacagtgtgatttggatcatggccatttctaaagtctttgaactgggattagttgccgggctgggccatcaggaatttgctcgtccatctcggggatacctggccttcagagatgacagcatttggccccaggaggagcctgcaattcggcctcggtcttcccagcgtgtgccgcccatggggatacagcacagtaaggagctaaacagaacctgctgcctgaatgggggaacctgcatgctggggtccttttgtgcctgccctccctccttctacggacggaactgtgagcacgatgtgcgcaaagagaactgtgggtctgtgccccatgacacctggctgcccaagaagtgttccctgtgtaaatgctggcacggtcagctccgctgctttcctcaggcatttctacccggctgtgatggccttgtgatggatgagcacctcgtggcttccaggactccagaactaccaccgtctgcacgtactaccacttttatgctagttggcatctgcctttctatacaaagctactattaatcgacattgacctatttccagaaatacaattttagatatcatgcaaatttcatgaccagtaaaggctgctgctacaatgtcctaactgaaagatgatcatttgtagttgccttaaaataatgaatacaatttccaaaatggtctctaacatttccttacagaactacttcttacttctttgccctgccctctcccaagtaactgggattacaggcatgtgtcaccatgcccagctaatttttttgtatttttagtagagatgggggtttcaccatattggccagtctggtctcgaactctgaccttgtgatccatcgatcagcctctcgagtgctgagattacacacgtgagcaactgtgcaaggcctggtgtttcttgatacatgtaattctaccaaggtcttcttaatatgttcttttaaatgattgaattatatgttcagattattggagactaattctaatgtggaccttagaatacagttttgagtagagttgatcaaaatcaattaaaatagtctctttaaaaggaaagaaaccatctttaaggggaggaaccagagtgctgaaggaatggaagtccatctgcgtgtgtgcagggagactgggtaggaaagaggaagcaaatagaagagagaggttgaaaaacaaaatgggttacttgattggtgattaggtggtggtagagaagcaagtaaaaaggctaaatggaagggcaagtttccatcatctatagaaagctatataagacaagaactcccctttttttcccaaaggcattataaaaagaatgaagcctccttagaaaaaaaattatacctcaatgtccccaacaagattgcttaataaattgtgtttcctccaagctattcaattcttttaactgttgtagaagacaaaatgttcacaatatatttagttgtaaaccaagtgatcaaactacatattgtaaagcccatttttaaaatacattgtatatatgtgtatgcacagtaaaaatggaaactatattgacctaaaaaaaaact

SEQ ID NO: 64156 - DNA, 1994 bp, Homo sapiens
attgtcatgctggtgggcgtcccacctgaaaggtctccccgccccgactggggtttgttgttgaagaaggagaatccccggaaaggctgagtctccagctcaaggtcaaaacgtccaaggccgaaagccctccagtttcccctggacgccttgctcctgcttctgctacgaccttctggggaaaacgaatttctcattttcttcttaaattgccattttcgctttaggagatgaatgttttcctttggctgttttggcaatgactctgaattaaagcgatgctaacgcctcttttccccctaattgttaaaagctatggactgcaggaagatggcccgcttctcttacagtgtgatttggatcatggccatttctaaagtctttgaactgggattagttgccggtgagagaccttttgttcttttgatcactctcaatttttatgtggcctaaaatacagactccatgaattgattttgtcgttaagggctgggccatcaggaatttgctcgtccatctcggggatacctggccttcagagatgacagcatttggccccaggaggagcctgcaattcggcctcggtcttcccagcgtgtgccgcccatggggatacagcacagtaaggagctaaacagaacctgctgcctgaatgggggaacctgcatgctggggtccttttgtgcctgccctccctccttctacggacggaactgtgagcacgatgtgcgcaaagagaactgtgggtctgtgccccatgacacctggctgcccaagaagtgttccctgtgtaaatgctggcacggtcagctccgctgctttcctcaggcatttctacccggctgtgatggccttgtgatggatgagcacctcgtggcttccaggactccagaactaccaccgtctgcacgtactaccacttttatgctagttggcatctgcctttctatacaaagctactattaatcgacattgacctatttccagaaatacaattttagatatcatgcaaatttcatgaccagtaaaggctgctgctacaatgtcctaactgaaagatgatcatttgtagttgccttaaaataatgaatacaatttccaaaatggtctctaacatttccttacagaactacttcttacttctttgccctgccctctcccaagtaactgggattacaggcatgtgtcaccatgcccagctaatttttttgtatttttagtagagatgggggtttcaccatattggccagtctggtctcgaactctgaccttgtgatccatcgatcagcctctcgagtgctgagattacacacgtgagcaactgtgcaaggcctggtgtttcttgatacatgtaattctaccaaggtcttcttaatatgttcttttaaatgattgaattatatgttcagattattggagactaattctaatgtggaccttagaatacagttttgagtagagttgatcaaaatcaattaaaatagtctctttaaaaggaaagaaaccatctttaaggggaggaaccagagtgctgaaggaatggaagtccatctgcgtgtgtgcagggagactgggtaggaaagaggaagcaaatagaagagagaggttgaaaaacaaaatgggttacttgattggtgattaggtggtggtagagaagcaagtaaaaaggctaaatggaagggcaagtttccatcatctatagaaagctatataagacaagaactcccctttttttcccaaaggcattataaaaagaatgaagcctccttagaaaaaaaattatacctcaatgtccccaacaagattgcttaataaattgtgtttcctccaagctattcaattcttttaactgttgtagaagacaaaatgttcacaatatatttagttgtaaaccaagtgatcaaactacatattgtaaagcccatttttaaaatacattgtatatatgtgtatgcacagtaaaaatggaaactatattgacctaaaaaaaaact

SEQ ID NO: 64157 - DNA, 2100 bp, Homo sapiens
attgtcatgctggtgggcgtcccacctgaaaggtctccccgccccgactggggtttgttgttgaagaaggagaatccccggaaaggctgagtctccagctcaaggtcaaaacgtccaaggccgaaagccctccagtttcccctggacgccttgctcctgcttctgctacgaccttctggggaaaacgaatttctcattttcttcttaaattgccattttcgctttaggagatgaatgttttcctttggctgttttggcaatgactctgaattaaagcgatgctaacgcctcttttccccctaattgttaaaagctatggactgcaggaagatggcccgcttctcttacagtgtgatttggatcatggccatttctaaagtctttgaactgggattagttgccgggctgggccatcaggaatttgctcgtccatctcggggatacctggccttcagagatgacagcatttggccccaggaggagcctgcaattcggcctcggtcttcccagcgtgtgccgcccatggggatacagcacagtaaggagctaaacagaacctgctgcctgaatgggggaacctgcatgctggggtccttttgtgcctgccctccctccttctacggacggaactgtgagcacgatgtgcgcaaagagaactgtgggtctgtgccccatgacacctggctgcccaagaagtgttccctgtgtaaatgctggcacggtcagctccgctgctttcctcaggcatttctacccggctgtgatggccttgtgatggatgagcacctcgtggcttccaggactccagaactaccaccgtctgcacgtactaccacttttatgctagttggcatctgcctttctatacaaagctactattaatcgacattgacctatttccagaaatacaattttagatatcatgcaaatttcatgaccagtaaaggctgctgctacaatgtcctaactgaaagatgatcatttgtagttgccttaaaataatgaatacaatttccaaaatggtctctaacatttccttacagaactacttcttacttctttgccctgccctctcccaaaaaactacttcttttttcaaaagaaagtcagccatatctccattgtgcctaagtccagtgtttctttttttttttttttttgagacggagtctcactctgtcacccaggctggactgcaatgacgcgatcttggttcactgcaacctccgcatccggggttcaagccattctcctgcctaagcctcccaagtaactgggattacaggcatgtgtcaccatgcccagctaatttttttgtatttttagtagagatgggggtttcaccatattggccagtctggtctcgaactctgaccttgtgatccatcgatcagcctctcgagtgctgagattacacacgtgagcaactgtgcaaggcctggtgtttcttgatacatgtaattctaccaaggtcttcttaatatgttcttttaaatgattgaattatatgttcagattattggagactaattctaatgtggaccttagaatacagttttgagtagagttgatcaaaatcaattaaaatagtctctttaaaaggaaagaaaccatctttaaggggaggaaccagagtgctgaaggaatggaagtccatctgcgtgtgtgcagggagactgggtaggaaagaggaagcaaatagaagagagaggttgaaaaacaaaatgggttacttgattggtgattaggtggtggtagagaagcaagtaaaaaggctaaatggaagggcaagtttccatcatctatagaaagctatataagacaagaactcccctttttttcccaaaggcattataaaaagaatgaagcctccttagaaaaaaaattatacctcaatgtccccaacaagattgcttaataaattgtgtttcctccaagctattcaattcttttaactgttgtagaagacaaaatgttcacaatatatttagttgtaaaccaagtgatcaaactacatattgtaaagcccatttttaaaatacattgtatatatgtgtatgcacagtaaaaatggaaactatattgacctaaaaaaaaact

SEQ ID NO: 64158 - DNA, 1590 bp, Homo sapiens
cgtggatgttcagagggaacaatgacagagtgtgatttggatcatggccatttctaaagtctttgaactgggattagttgccgggctgggccatcaggaatttgctcgtccatctcggggatacctggccttcagagatgacagcatttggccccaggaggagcctgcaattcggcctcggtcttcccagcgtgtgccgcccatggggatacagcacagtaaggagctaaacagaacctgctgcctgaatgggggaacctgcatgctggggtccttttgtgcctgccctccctccttctacggacggaactgtgagcacgatgtgcgcaaagagaactgtgggtctgtgccccatgacacctggctgcccaagaagtgttccctgtgtaaatgctggcacggtcagctccgctgctttcctcaggcatttctacccggctgtgatggccttgtgatggatgagcacctcgtggcttccaggactccagaactaccaccgtctgcacgtactaccacttttatgctagttggcatctgcctttctatacaaagctactattaatcgacattgacctatttccagaaatacaattttagatatcatgcaaatttcatgaccagtaaaggctgctgctacaatgtcctaactgaaagatgatcatttgtagttgccttaaaataatgaatacaatttccaaaatggtctctaacatttccttacagaactacttcttacttctttgccctgccctctcccaagtaactgggattacaggcatgtgtcaccatgcccagctaatttttttgtatttttagtagagatgggggtttcaccatattggccagtctggtctcgaactctgaccttgtgatccatcgatcagcctctcgagtgctgagattacacacgtgagcaactgtgcaaggcctggtgtttcttgatacatgtaattctaccaaggtcttcttaatatgttcttttaaatgattgaattatatgttcagattattggagactaattctaatgtggaccttagaatacagttttgagtagagttgatcaaaatcaattaaaatagtctctttaaaaggaaagaaaccatctttaaggggaggaaccagagtgctgaaggaatggaagtccatctgcgtgtgtgcagggagactgggtaggaaagaggaagcaaatagaagagagaggttgaaaaacaaaatgggttacttgattggtgattaggtggtggtagagaagcaagtaaaaaggctaaatggaagggcaagtttccatcatctatagaaagctatataagacaagaactcccctttttttcccaaaggcattataaaaagaatgaagcctccttagaaaaaaaattatacctcaatgtccccaacaagattgcttaataaattgtgtttcctccaagctattcaattcttttaactgttgtagaagacaaaatgttcacaatatatttagttgtaaaccaagtgatcaaactacatattgtaaagcccatttttaaaatacattgtatatatgtgtatgcacagtaaaaatggaaactatattgacctaaaaaaaaact

SEQ ID NO: 64159 - DNA, 1804 bp, Homo sapiens
caagggccccggcgccgggggcggcggggaaccccaaacgcaaccgggtctggagggatccccgcgccgagccagccgccgtcaccgcctccgcgccgcccctgcgggcttggcaggcgcccggcgcgcccgcactgcgcccggccgccggctcccgcggtcccaccgtgagctcgccggcccgtcgcccgctcgccatgcaaccgccgccggcctcgcgcgcgtaggccccgccgcaggccatgctgcccctgctcgccgcgctcctggccgccgcctgcccgctgccgcccgtccgcggcggggccgcgacgcgcccggcctcctcggggtgccctccaatgcttcagtcaacgcgtcctccgcggacgagcccatcgccccgcggctgctggcctcggcggcccccgggccccccgagcgcccgggcccggaggagacggcggcggcagcggcgccgtgcaacatcagcgtgcagcggacagatgctgagctcgctgctcgtgcgctggggccgcccgcggggcttccagtgcgacctactgctcttctccaccaacgcgcacggccgcgctttcttcgccgccgccttccaccgcgtcgggccgccgctgctcatcgagcacctggggctggcggcgggcggcgcgcacagggacctgcgcctctgcgtgggctgcggctgggtgcgcggtcgccgcaccggccgcctccggcccgccgccgcccccagcgccgccgccgccaccgccggggcgcccaccgcgctgccagcctaccccgcggccgagccgcccgggccgctgtggctgcagggcgagccgctgcatttctgctgcctagacttcagcctggaggagctgcagggcgagccgggctggcggctgaaccgtaagcccattgagtccacgctggtggcctgcttcatgaccctggtcatcgtggtgtggagcgtggccgccctcatctggccggtgcccatcatcgccggcttcctgcccaacggcatggaacagcgccggaccaccgccagcaccaccgcagccacccccgccgcagtgcccgcagggaccaccgcagccgccgccgccgccgccgctgccgccgccgccgcggccgtcacttcgggggtggcgaccaagtgacccgctccgctcctccctgtgtccgtcctgtgtccgcgcgcgcgggtgcctttcccgccggggactcggccggtgtgcttcgtgctgtagttatcgttagttcctcttcccgagatggggccgccgagagaccccagcgcctttgaaaagcaaggtttgtgctgcgcttccagttccgaaaagcagatgtttaagcccttggactgagggtgggatcgcagctccgaagacggagaggagggaaatggggccctttcccctctattgcatccccctgcccgactccttccccgcacccacgtgccctagattcatggcagaaaatgaccaaatcctgtgtatttgttttatatatttaataactgttttaaatgaaagttttagtaaaaaaaatacaaaacaaaaagattaaattgctattgctgtagtaagagaagctctttgtatctgaacatagttgtatttgaaatttgtggttttttaatttatttaaaattggggggagggcatgggaaggatttaacaccgatatattgttaccgctgaaaatgaactttatgaaccttttccaagttgatctatccagtgacgtggcctggtgggcgtttcttcttgtacttatgtggttttttggcttttaatacagacattttcctcca

SEQ ID NO: 64160 - DNA, 209 bp, Homo sapiens
gcggccgcctactactactactactgctcgaattcaagcttgtaacgatgtacggggcatgggaaggatttaacaccgatatattgttaccgctgaaaatgaactttatgaaccttttccaagttgatctatccagtgacgtggcctggtgggcgtttcttcttgtacttatgtggttttttggcttttaatacagacattttcctcca

SEQ ID NO: 64161 - DNA, 2434 bp, Homo sapiens
caagggccccggcgccgggggcggcggggaaccccaaacgcaaccgggtctggagggatccccgcgccgagccagccgccgtcaccgcctccgcgccgcccctgcgggcttggcaggcgcccggcgcgcccgcactgcgcccggccgccggctcccgcggtcccaccgtgagctcgccggcccgtcgcccgctcgccatgcaaccgccgccggcctcgcgcgcgtaggccccgccgcaggccatgctgcccctgctcgccgcgctcctggccgccgcctgcccgctgccgcccgtccgcggcggggccgcgacgcgcccggcctcctcggggtgccctccaatgcttcagtcaacgcgtcctccgcggacgagcccatcgccccgcggctgctggcctcggcggcccccgggccccccgagcgcccgggcccggaggagacggcggcggcagcggcgccgtgcaacatcagcgtgcagcggacagatgctgagctcgctgctcgtgcgctggggccgcccgcggggcttccagtgcgacctactgctcttctccaccaacgcgcacggccgcgctttcttcgccgccgccttccaccgcgtcgggccgccgctgctcatcgagcacctggggctggcggcgggcggcgcgcacagggacctgcgcctctgcgtgggctgcggctgggtgcgcggtcgccgcaccggccgcctccggcccgccgccgcccccagcgccgccgccgccaccgccggggcgcccaccgcgctgccagcctaccccgcggccgagccgcccgggccgctgtggctgcagggcgagccgctgcatttctgctgcctagacttcagcctggaggagctgcagggcgagccgggctggcggctgaaccgtaagcccattgagtccacgctggtggcctgcttcatgaccctggtcatcgtggtgtggagcgtggccgccctcatctggccggtgcccatcatcgccggcttcctgcccaacggcatggaacagcgccggaccaccgccagcaccaccgcagccacccccgccgcagtgcccgcagggaccaccgcagccgccgccgccgccgccgctgccgccgccgccgcggccgtcacttcgggggtggcgaccaagtgacccgctccgctcctccctgtgtccgtcctgtgtccgcgcgcgcgggtgcctttcccgccggggactcggccggtgtgcttcgtgctgtagttatcgttagttcctcttcccgagatggggccgccgagagaccccagcgcctttgaaaagcaaggtttgtgctgcgcttccagttccgaaaagcagatgtttaagcccttggactgagggtgggatcgcagctccgaagacggagaggagggaaatggggccctttcccctctattgcatccccctgcccgactccttccccgcacccacgtgccctagattcatggcagaaaatgaccaaatcctgtgtatttgttttatatatttaataactgttttaaatgaaagttttagtaaaaaaaatacaaaacaaaaagattaaattgctattgctgtagtaagagaagctctttgtatctgaacatagttgtatttgaaatttgtggttttttaatttatttaaaattggggggagggcatgggaaggatttaacaccgatatattgttaccgctgaaaatgaactttatgaaccttttccaagttgatctatccagtgacgtggcctggtgggcgtttcttcttgtacttatgtggttttttggcttttaatacagacattttcctccaaaaaaaaaaaaaaaaaaaaaaaaaaaaaagaaaaaaaaagaaacaaaaaaaaaaaaaaaaaaaaaaggggggcggggacgaaaaaagaaatcacccacgggggggggcgccacaaacagtattagggcaaataacaacagcggtgtcgtgggaaaaaaggggggggcccaaaaaaagggggggagcagacaaaacacacagcaaagagaaaaggaggaggcggacgggaacaacaaaacggtccgatgtcccggggaacaacactcctatacacgagagccgagacccctttgtgagaagaagcacccccaccaagactggggacggagagaggacacaaattgtgggggggacaccacaaacctgcagtaagaaaggatttacagaagcgctcccttgagcggcaaactaagaataagacgttaccacaagggtgaattaacgatggtggggaaaacccaaagcgcgcgacatcaattagatgcgcagacgagtagacgaaaagactgctcgttccacacacactgaggatttactcattttcagaacagcaatattttattcaaccgagaggccgtagtgaataatacaagtagagaactaagtaagctagtacaaagcgacgaccgc

SEQ ID NO: 64162 - DNA, 377 bp, Homo sapiens
atgtgttaaaggatacaggtaaataggagaaataagttctagtgttctatgccactgtaggataactatagtttacaataatatatgatacagtttcaaatagctagaaggaagatattgaatgttcccaagacaaagaaacgataaatatttgagatgattgatatgctaattattctgatctgatacattatatgtataaaaataccactgtatcccctgaaaaagaacgattattgtcagtttaaaaacaaaaatataagggtttaaaaaaaatggcctaaatgaaaaagacagacaatactaagtgctgatgaggatacagagctactggatcttttataggaacataaattggtgcagccactctggaagag

SEQ ID NO: 64163 - DNA, 436 bp, Homo sapiens
acagtaaatttgctcacacaccaagcacattgctactgtaactagcatctgaggaagccatcacataaagagtctctataaccaaggagctcatacagaatcttcacccctgaaagcactcagagccaaattaggttatgataacttataaacattaaagtcacatcctcaaggggaaaaaaagaaacaaacaacaacaaaaaacacagtcaaataaaaagtgagccagaaataaattaaaaaataattagaagaaatagactacccaaaagagaagaaaacagaaaaataattctggcaatgtgacagaacagcattctacaacaacttcaaaagatcacagccactctccagaaatggatccaaaccaagatgaaatctttgaaataccaccagcctggccaacatggtgagactccatttctactaaaaatcc

SEQ ID NO: 64164 - DNA, 365 bp, Homo sapiens
attagaccactttaagtataatgtaagaaccttacaatatacttacattgagcttacttgcagtgagccaagatcatgccactgcactgcagcctgggtgacaaagtgagactctttctcaaaaataaattaaaaattaaaaaaataaaatagatagaaagatagagtgagactctgcatctaaaatagatagacagattgaccaaccaacctacctgtcactttgcatgactctttagtttcaaaaggatgatcatctaaacaggggtgtccaatcttttgcttcccttgccacactgcagaagaattgtcttggccacacataaaatacaccaacactaatgatggctgatgagctaaaaaca

SEQ ID NO: 64165 - DNA, 393 bp, Homo sapiens
atccaccattacagtattatacagagtagttttactgtccccgaaatcatctatgctccaccccttcacatccacccctcagcccctggcaaccactgatcttttcactgtttccataattttgtcttttccagaatgtcatctagttgaaatcacacagcatgtaaccttttcatattggctccgttcagatagtaatatgcatttaagtttcttccatgtcttttcatggcttagtaactcatttctttcttgtactgaatgatattctattgtctgcatgtaccacagattctttgtttgtttgttcttttacttatcagtttatatgctgaaggacacatcttggttacttccaagctttggcaattatgaataaagctaataaacatc

SEQ ID NO: 64166 - DNA, 3660 bp, Homo sapiens
tgcgcagtggggcggtgccgggggcggggcgcggcggctgtcagctgactgtggcggcggcggcctcgaggtgacaactgtctccgtcgcaggctccggcgggggcgcaggaggtcgcccggcgcgtcactgtcgggtcggcgagccacgggggccgccgcagcaccatggcgaccaccgtcagcactcagcgcgggccggtgtacatcggtgagctcccgcaggacttcctccgcatcacgcccacacagcagcagcggcaggtccagctggacgcccaggcggcccagcagctgcagtacggaggcgcagtgggcaccgtgggccgactgaacatcacggtggtacaggcaaagttggccaagaattacggcatgacccgcatggacccctactgccgactgcgcctgggctacgcggtgtacgagacgcccacggcacacaatggcgccaagaatccccgctggaataaggtcatccactgcacggtgcccccaggcgtggactctttctatctcgagatcttcgatgagagagccttctccatggacgaccgcattgcctggacccacatcaccatcccggagtccctgaggcagggcaaggtggaggacaagtggtacagcctgagcgggaggcagggggacgacaaggagggcatgatcaacctcgtcatgtcctacgcgctgcttccagctgccatggtgatgccaccccagcccgtggtcctgatgccaacagtgtaccagcagggcgttggctatgtgcccatcacagggatgcccgctgtctgtagccccggcatggtgcccgtggccctgcccccggccgccgtgaacgcccagccccgctgtagcgaggaggacctgaaagccatccaggacatgttccccaacatggaccaggaggtgatccgctccgtgctggaagcccagcgagggaacaaggatgccgccatcaactccctgctgcagatgggggaggagccatagagcctctgcctcgatgccgttttgcccccgctctttggacacgccgacccggcgctccccaaggaatgctgtcccaacaagattcccgtgaaagagcacccgtgtcgccccctcccgtggacttctgtgccgccccgtccacacctgttcttgggtgcatgtgggttttcggttcctggcggtccaggacggggcgggggctcccctcccatctcgtgctgggaggtctcagcgcgctctcctgtccctgggacgtgcgtctctccttctcatgccgttctggaaaatgctcttgctgtagagagcagctgcttctgccagggtgttggaggtggtggagcgccttccgattccattcatggcattttgtgatgtgatgtaattggaatagagctgttgatttaaggcacacacaatccctcacactgtgggttttttttagaacttcccagacgaaaactcacgcccttgccctaacgcgctttgctgtgagcctggcccctgcccagggcttgggtctggtgagctgagcagcttcctgtggatggtgtggggccggcctctggcctggctcacctggccactgtccagccagccttgtgacagactccggcctgaaggcagaatgaacccacacctggagtgaggaagggggcctggcacggttggccaggctctgcctgattgccagccagcgggcatctgaagccgggtccttcgcccgccggaggctgccgtccgtctctcctgctgcgctcgtgccagctccgtgggtgtcctcccagggagcttctcttctcaacaggccttgcgaggctggggtgagaggtgatagaggcagcactgtgcatgattccgagagggtgtggtggcactgccagccgactgctgacagcttgggagctgctgtgcccaggacgtgggttcagcgtgggcgaggaaagcctggcgagcgtggccctgtaaaagctttctgaggcgggaggcgctcacttacctctgactgcctgggcgctgcgtgtagcatcttggcctacaggacagattttaggtgacacctggttatgacagtcagaaatttgagaagcttctcacaagtgatgcactttaaataatctgcatgccattgagacacctgcatgtctggtgtttgtggttcaagtgtcttgccgccggccttcggatgtaaacccactgataacggacagaaagagaatgcccacaagtgggtcttctgtggaagatgcagaaggaggaagttagtgcttacattttagtctttttctccctcaaaaaaataggttaagtttcagtgccagctagaaaatactgctttctgccatcgattgggggtggtttttgtcaaatatactgttgataaatatttatttttgtaaacttgaagtgtgtggtggccgtgggggagggacatgctggcagcaggcgccttcttcagctgtgggtcctaaaggcctttgatcctttgaagaagaaagacatggtatttgttcagcagacgccgaccactcagacggaggggcccctgggattccctgtctcagatggcctggtcttacgcctgtgtagatttcttctccattgggaatgaaggtgtcaggcgggactggaacgttctagatggtatgttccgtgatattaacaactctaacccaggacagaccacaagccacactcagaggcctcactgtgctgggggcttcggtgtccaggcgcccaggtgtggccaccagcaccggtttctgccttcgcgttgctggggtgcagtgagactgccacacgcgtgcacatgtggctctgtgggtgtctcctagagaggacgtggcccctgctgccagcccttgagcagcccgtgtgggggcccgagggacccacacagtgggggccagcctcgctggagggagagcaaccctttgccgatgaccacgcttgccgccatctcttagttttctttttcacaagcgctttatttttttaatagacaaatcacattttgcaaggcctttaattaaataagattcttctttccttcattttatgctttatttcctgtttgaaggcttactgtagaagtggcttactgtagaagcagcttgctgagcccctccgagcggtccccagaattagctggttcacaacccccaccctcccccgcccccgcctgtgtcaggtgtggatgaggtcgtcacactcagaaggacaggcttgtctgccagctcacaaggggaggctgcagtgggtttgggagctgggtttaggcccctggtgtctgagggcccaggccttgccagcctctgctgctcctgctcctgggtttgaagatgcaggccgatcgccagctccgtggcagcggtcactaaggacagcctgactgtgccatcttggagcctcaggcggggctccggagatagaagacaggtcgccggaggctccccctcctctcctctcccctctgcagatgctccctgggcgctaccctgcagggtgccaggcaggagtggtctcagaacgtgcgcttctgattattttactggggtccattgtccagatttttctttgattgtaaaatatatttttactttttagtcttctaatttaataaatgatccatataaaaatagagaaataaagtcctttaagggaaggttta

SEQ ID NO: 64167 - DNA, 1406 bp, Homo sapiens
tgcgcagtggggcggtgccgggggcggggcgcggcggctgtcagctgactgtggcggcggcggcctcgaggtgacaactgtctccgtcgcaggctccggcgggggcgcaggaggtcgcccggcgcgtcactgtcgggtcggcgagccacgggggccgccgcagcaccatggcgaccaccgtcagcactcagcgcgggccggtgtacatcggtgagctcccgcaggacttcctccgcatcacgcccacacagcagcagcggcaggtccagctggacgcccaggcggcccagcagctgcagtacggaggcgcagtgggcaccgtgggccgactgaacatcacggtggtacaggcaaagttggccaagaattacggcatgacccgcatggacccctactgccgactgcgcctgggctacgcggtgtacgagacgcccacggcacacaatggcgccaagaatccccgctggaataaggtcatccactgcacggtgcccccaggcgtggactctttctatctcgagatcttcgatgagagagccttctccatggacgaccgcattgcctggacccacatcaccatcccggagtccctgaggcagggcaaggtggaggacaagtggtacagcctgagcgggaggcagggggacgacaaggagggcatgatcaacctcgtcatgtcctacgcgctgcttccagctgccatggtgatgccaccccagcccgtggtcctgatgccaacagtgtaccagcagggcgttggctatgtgcccatcacagggatgcccgctgtctgtagccccggcatggtgcccgtggccctgcccccggccgccgtgaacgcccagccccgctgtagcgaggaggacctgaaagccatccaggacatgttccccaacatggaccaggaggtgatccgctccgtgctggaagcccagcgagggaacaaggatgccgccatcaactccctgctgcagatgggggaggagccatagagcctctgcctcgatgccgttttgcccccgctctttggacacgccgacccggcgctccccaaggaatgctgtcccaacaagattcccgtgaaagagcacccgtgtcgccccctcccgtggacttctgtgccgccccgtccacacctgttcttgggtgcatgtgggttttcggttcctggcggtccaggacggggcgggggctcccctcccatctcgtgctgggaggtctcagcgcgctctcctgtccctgggacgtgcgtctctccttctcatgccgttctggaaaatgctcttgctgtagagagcagctgcttctgccagggtgttggaggtggtggagcgccttccgattccattcatggcattttgtgatgtgatgtaattggaatagagctgttgatttaaggcacacac

SEQ ID NO: 64168 - DNA, 2292 bp, Homo sapiens
tgcgcagtggggcggtgccgggggcggggcgcggcggctgtcagctgactgtggcggcggcggcctcgaggtgacaactgtctccgtcgcaggctccggcgggggcgcaggaggtcgcccggcgcgtcactgtcgggtcggcgagccacgggggccgccgcagcaccatggcgaccaccgtccagctggacgcccaggcggcccagcagctgcagtacggaggcgcagtgggcaccgtgggccgactgaacatcacggtggtacaggcaaagttggccaagaattacggcatgacccgcatggacccctactgccgactgcgcctgggctacgcggtgtacgagacgcccacggcacacaatggcgccaagaatccccgctggaataaggtcatccactgcacggtgcccccaggcgtggactctttctatctcgagatcttcgatgagagagccttctccatggacgaccgcattgcctggacccacatcaccatcccggagtccctgaggcagggcaaggtggaggacaagtggtacagcctgagcgggaggcagggggacgacaaggagggcatgatcaacctcgtcatgtcctacgcgctgcttccagctgccatggtgatgccaccccagcccgtggtcctgatgccaacagtgtaccagcagggcgttggctatgtgcccatcacagggatgcccgctgtctgtagccccggcatggtgcccgtggccctgcccccggccgccgtgaacgcccagccccgctgtagcgaggaggacctgaaagccatccaggacatgttccccaacatggaccaggaggtgatccgctccgtgctggaagcccagcgagggaacaaggatgccgccatcaactccctgctgcagatgggggaggagccatagagcctctgcctcgatgccgttttgcccccgctctttggacacgccgacccggcgctccccaaggaatgctgtcccaacaagattcccgtgaaagagcacccgtgtcgccccctcccgtggacttctgtgccgccccgtccacacctgttcttgggtgcatgtgggttttcggttcctggcggtccaggacggggcgggggctcccctcccatctcgtgctgggaggtctcagcgcgctctcctgtccctgggacgtgcgtctctccttctcatgccgttctggaaaatgctcttgctgtagagagcagctgcttctgccagggtgttggaggtggtggagcgccttccgattccattcatggcattttgtgatgtgatgtaattggaatagagctgttgatttaaggcacacacaatccctcacactgtgggttttttttagaacttcccagacgaaaactcacgcccttgccctaacgcgctttgctgtgagcctggcccctgcccagggcttgggtctggtgagctgagcagcttcctgtggatggtgtggggccggcctctggcctggctcacctggccactgtccagccagccttgtgacagactccggcctgaaggcagaatgaacccacacctggagtgaggaagggggcctggcacggttggccaggctctgcctgattgccagccagcgggcatctgaagccgggtccttcgcccgccggaggctgccgtccgtctctcctgctgcgctcgtgccagctccgtgggtgtcctcccagggagcttctcttctcaacaggccttgcgaggctggggtgagaggtgatagaggcagcactgtgcatgattccgagagggtgtggtggcactgccagccgactgctgacagcttgggagctgctgtgcccaggacgtgggttcagcgtgggcgaggaaagcctggcgagcgtggccctgtaaaagctttctgaggcgggaggcgctcacttacctctgactgcctgggcgctgcgtgtagcatcttggcctacaggacagattttaggtgacacctggttatgacagtcagaaatttgagaagcttctcacaagtgatgcactttaaataatctgcatgccattgagacacctgcatgtctggtgtttgtggttcaagtgtcttgccgccggccttcggatgtaaacccactgataacggacagaaagagaatgcccacaagtgggtcttctgtggaagatgcagaaggaggaagttagtgcttacattttagtctttttctccctcaaaaaaataggttaagtttcagtgccagctagaaaatactgctttctgccatcgattgggggtggtttttgtcaaatatactgttgataaata

SEQ ID NO: 64169 - DNA, 369 bp, Homo sapiens
  misc_feature (154)..(154): n is a, c, g, or t
atagaatttttgaaaacttgctaatcaccttttgatgaaatattagtagatggtttaaagcgggacatcaactacataatgaaagatgcttgaaatgcttttgttaattcaggcaaatcaaaataaatcggactatcaaactacaagaggcccnaacctctcctctcccctctgcagatgctccctgggcgctaccctgcagggtgccaggcaggagtggtctcagaacgtgcgcttctgattattttactggggtccattgtccagatttttctttgattgtaaaatatatttttactttttagtcttctaatttaataaatgatccatataaaaatagagaaataaagtcctttaagggaaggttta

SEQ ID NO: 64170 - DNA, 549 bp, Homo sapiens
agtgcggcgtgtgcacgcttgatgccgtgtggctgtctctagagtatcccgcggcccacggcacacaatggcgccaagaatccccgctggaataaggtcatccactgcacggtgcccccaggcgtggactctttctatctcgagatcttcgatgagagagccttctccatggacgaccgcattgcctggacccacatcaccatcccggagtccctgaggcagggcaaggtggaggacaagtggtacagcctgagcgggaggcagggggacgacaaggagggcatgatcaacctcgtcatgtcctacgcgctgcttccagctgccatggtgatgccaccccagcccgtggtcctgatgccaacagtgtaccagcagggcgttggctatgtgcccatcacagggatgcccgctgtctgtagccccggcatggtgccgtggagccgctctatttgaatctttctaattgaaacggctagggaagagaccacccagagagctccctccatggacagggctctgggctctgcccccgctctgccctgcagagct

SEQ ID NO: 64171 - DNA, 3122 bp, Homo sapiens
tgcgcagtggggcggtgccgggggcggggcgcggcggctgtcagctgactgtggcggcggcggcctcgaggtgacaactgtctccgtcgcaggctccggcgggggcgcaggaggtcgcccggcgcgtcactgtcgggtcggcgagccacgggggccgccgcagcaccatggcgaccaccgtcagcactcagcgcgggccggtgtacatcggtgagctcccgcaggacttcctccgcatcacgcccacacagcagcagcggcaggtccagctggacgcccaggcggcccagcagctgcagtacggaggcgcagtgggcaccgtgggccgactgaacatcacggtggtacaggcaaagttggccaagaattacggcatgacccgcatggacccctactgccgactgcgcctgggctacgcggtgtacgagacgcccacggcacacaatggcgccaagaatccccgctggaataaggtcatccactgcacggtgcccccaggcgtggactctttctatctcgagatcttcgatgagagagccttctccatggacgaccgcattgcctggacccacatcaccatcccggagtccctgaggcagggcaaggtggaggacaagtggtacagcctgagcgggaggcagggggacgacaaggagggcatgatcaacctcgtcatgtcctacgcgctgcttccagctgccatggtgatgccaccccagcccgtggtcctgatgccaacagtgtaccagcagggcgttggctatgtgcccatcacagggatgcccgctgtctgtagccccggcatggtgcccgtggccctgcccccggccgccgtgaacgcccagccccgctgtagcgaggaggacctgaaagccatccaggacatgttccccaacatggaccaggaggtgatccgctccgtgctggaagcccagcgagggaacaaggatgccgccatcaactccctgctgcagatgggggaggagccatagagcctctgcctcgatgccgttttgcccccgctctttggacacgccgacccggcgctccccaaggaatgctgtcccaacaagattcccgtgaaagagcacccgtgtcgccccctcccgtggacttctgtgccgccccgtccacacctgttcttgggtgcatgtgggttttcggttcctggcggtccaggacggggcgggggctcccctcccatctcgtgctgggaggtctcagcgcgctctcctgtccctgggacgtgcgtctctccttctcatgccgttctggaaaatgctcttgctgtagagagcagctgcttctgccagggtgttggaggtggtggagcgccttccgattccattcatggcattttgtgatgtgatgtaattggaatagagctgttgatttaaggcacacacaatccctcacactgtgggttttttttagaacttcccagacgaaaactcacgcccttgccctaacgcgctttgctgtgagcctggcccctgcccagggcttgggtctggtgagctgagcagcttcctgtggatggtgtggggccggcctctggcctggctcacctggccactgtccagccagccttgtgacagactccggcctgaaggcagaatgaacccacacctggagtgaggaagggggcctggcacggttggccaggctctgcctgattgccagccagcgggcatctgaagccgggtccttcgcccgccggaggctgccgtccgtctctcctgctgcgctcgtgccagctccgtgggtgtcctcccagggagcttctcttctcaacaggccttgcgaggctggggtgagaggtgatagaggcagcactgtgcatgattccgagagggtgtggtggcactgccagccgactgctgacagcttgggagctgctgtgcccaggacgtgggttcagcgtgggcgaggaaagcctggcgagcgtggccctgtaaaagctttctgaggcgggaggcgctcacttacctctgactgcctgggcgctgcgtgtagcatcttggcctacaggacagattttaggtgacacctggttatgacagtcagaaatttgagaagcttctcacaagtgatgcactttaaataatctgcatgccattgagacacctgcatgtctggtgtttgtggttcaagtgtcttgccgccggccttcggatgtaaacccactgataacggacagaaagagaatgcccacaagtgggtcttctgtggaagatgcagaaggaggaagttagtgcttacattttagtctttttctccctcaaaaaaataggttaagtttcagtgccacccttgagcagcccgtgtgggggcccgagggacccacacagtgggggccagcctcgctggagggagagcaaccctttgccgatgaccacgcttgccgccatctcttagttttctttttcacaagcgctttatttttttaatagacaaatcacattttgcaaggcctttaattaaataagattcttctttccttcattttatgctttatttcctgtttgaaggcttactgtagaagtggcttactgtagaagcagcttgctgagcccctccgagcggtccccagaattagctggttcacaacccccaccctcccccgcccccgcctgtgtcaggtgtggatgaggtcgtcacactcagaaggacaggcttgtctgccagctcacaaggggaggctgcagtgggtttgggagctgggtttaggcccctggtgtctgagggcccaggccttgccagcctctgctgctcctgctcctgggtttgaagatgcaggccgatcgccagctccgtggcagcggtcactaaggacagcctgactgtgccatcttggagcctcaggcggggctccggagatagaagacaggtcgccggaggctccccctcctctcctctcccctctgcagatgctccctgggcgctaccctgcagggtgccaggcaggagtggtctcagaacgtgcgcttctgattattttactggggtccattgtccagatttttctttgattgtaaaatatatttttactttttagtcttctaatttaataaatgatccatataaaaatagagaaataaagtcctttaagggaaggttta

SEQ ID NO: 64172 - DNA, 3402 bp, Homo sapiens
tgcgcagtggggcggtgccgggggcggggcgcggcggctgtcagctgactgtggcggcggcggcctcgaggtgacaactgtctccgtcgcaggctccggcgggggcgcaggaggtcgcccggcgcgtcactgtcgggtcggcgagccacgggggccgccgcagcaccatggcgaccaccgtcagcactcagcgcgggccggtgtacatcggtgagctcccgcaggacttcctccgcatcacgcccacacagcagcagcggcaggtccagctggacgcccaggcggcccagcagctgcagtacggaggcgcagtgggcaccgtgggccgactgaacatcacggtggtacaggcaaagttggccaagaattacggcatgacccgcatggacccctactgccgactgcgcctgggctacgcggtgtacgagacgcccacggcacacaatggcgccaagaatccccgctggaataaggtcatccactgcacggtgcccccaggcgtggactctttctatctcgagatcttcgatgagagagccttctccatggacgaccgcattgcctggacccacatcaccatcccggagtccctgaggcagggcaaggtggaggacaagtggtacagcctgagcgggaggcagggggacgacaaggagggcatgatcaacctcgtcatgtcctacgcgctgcttccagctgccatggtgatgccaccccagcccgtggtcctgatgccaacagtgtaccagcagggcgttggctatgtgcccatcacagggatgcccgctgtctgtagccccggcatggtgcccgtggccctgcccccggccgccgtgaacgcccagccccgctgtagcgaggaggacctgaaagccatccaggacatgttccccaacatggaccaggaggtgatccgctccgtgctggaagcccagcgagggaacaaggatgccgccatcaactccctgctgcagatgggggaggagccatagagcctctgcctcgatgccgttctggaaaatgctcttgctgtagagagcagctgcttctgccagggtgttggaggtggtggagcgccttccgattccattcatggcattttgtgatgtgatgtaattggaatagagctgttgatttaaggcacacacaatccctcacactgtgggttttttttagaacttcccagacgaaaactcacgcccttgccctaacgcgctttgctgtgagcctggcccctgcccagggcttgggtctggtgagctgagcagcttcctgtggatggtgtggggccggcctctggcctggctcacctggccactgtccagccagccttgtgacagactccggcctgaaggcagaatgaacccacacctggagtgaggaagggggcctggcacggttggccaggctctgcctgattgccagccagcgggcatctgaagccgggtccttcgcccgccggaggctgccgtccgtctctcctgctgcgctcgtgccagctccgtgggtgtcctcccagggagcttctcttctcaacaggccttgcgaggctggggtgagaggtgatagaggcagcactgtgcatgattccgagagggtgtggtggcactgccagccgactgctgacagcttgggagctgctgtgcccaggacgtgggttcagcgtgggcgaggaaagcctggcgagcgtggccctgtaaaagctttctgaggcgggaggcgctcacttacctctgactgcctgggcgctgcgtgtagcatcttggcctacaggacagattttaggtgacacctggttatgacagtcagaaatttgagaagcttctcacaagtgatgcactttaaataatctgcatgccattgagacacctgcatgtctggtgtttgtggttcaagtgtcttgccgccggccttcggatgtaaacccactgataacggacagaaagagaatgcccacaagtgggtcttctgtggaagatgcagaaggaggaagttagtgcttacattttagtctttttctccctcaaaaaaataggttaagtttcagtgccagctagaaaatactgctttctgccatcgattgggggtggtttttgtcaaatatactgttgataaatatttatttttgtaaacttgaagtgtgtggtggccgtgggggagggacatgctggcagcaggcgccttcttcagctgtgggtcctaaaggcctttgatcctttgaagaagaaagacatggtatttgttcagcagacgccgaccactcagacggaggggcccctgggattccctgtctcagatggcctggtcttacgcctgtgtagatttcttctccattgggaatgaaggtgtcaggcgggactggaacgttctagatggtatgttccgtgatattaacaactctaacccaggacagaccacaagccacactcagaggcctcactgtgctgggggcttcggtgtccaggcgcccaggtgtggccaccagcaccggtttctgccttcgcgttgctggggtgcagtgagactgccacacgcgtgcacatgtggctctgtgggtgtctcctagagaggacgtggcccctgctgccagcccttgagcagcccgtgtgggggcccgagggacccacacagtgggggccagcctcgctggagggagagcaaccctttgccgatgaccacgcttgccgccatctcttagttttctttttcacaagcgctttatttttttaatagacaaatcacattttgcaaggcctttaattaaataagattcttctttccttcattttatgctttatttcctgtttgaaggcttactgtagaagtggcttactgtagaagcagcttgctgagcccctccgagcggtccccagaattagctggttcacaacccccaccctcccccgcccccgcctgtgtcaggtgtggatgaggtcgtcacactcagaaggacaggcttgtctgccagctcacaaggggaggctgcagtgggtttgggagctgggtttaggcccctggtgtctgagggcccaggccttgccagcctctgctgctcctgctcctgggtttgaagatgcaggccgatcgccagctccgtggcagcggtcactaaggacagcctgactgtgccatcttggagcctcaggcggggctccggagatagaagacaggtcgccggaggctccccctcctctcctctcccctctgcagatgctccctgggcgctaccctgcagggtgccaggcaggagtggtctcagaacgtgcgcttctgattattttactggggtccattgtccagatttttctttgattgtaaaatatatttttactttttagtcttctaatttaataaatgatccatataaaaatagagaaataaagtcctttaagggaaggttta

SEQ ID NO: 64173 - DNA, 2376 bp, Homo sapiens
tgcgcagtggggcggtgccgggggcggggcgcggcggctgtcagctgactgtggcggcggcggcctcgaggtgacaactgtctccgtcgcaggctccggcgggggcgcaggaggtcgcccggcgcgtcactgtcgggtcggcgagccacgggggccgccgcagcaccatggcgaccaccgtcagcactcagcgcgggccggtgtacatcggtgagctcccgcaggacttcctccgcatcacgcccacacagcagcagcggcaggtccagctggacgcccaggcggcccagcagctgcagtacggaggcgcagtgggcaccgtgggccgactgaacatcacggtggtacaggcaaagttggccaagaattacggcatgacccgcatggacccctactgccgactgcgcctgggctacgcggtgtacgagacgcccacggcacacaatggcgccaagaatccccgctggaataaggtcatccactgcacggtgcccccaggcgtggactctttctatctcgagatcttcgatgagagagccttctccatggacgaccgcattgcctggacccacatcaccatcccggagtccctgaggcagggcaaggtggaggacaagtggtacagcctgagcgggaggcagggggacgacaaggagggcatgatcaacctcgtcatgtcctacgcgctgcttccagctgccatggtgatgccaccccagcccgtggtcctgatgccaacagtgtaccagcagggcgttggctatgtgcccatcacagggatgcccgctgtctgtagccccggcatggtgcccgtggccctgcccccggccgccgtgaacgcccagccccgctgtagcgaggaggacctgaaagccatccaggacatgttccccaacatggaccaggaggtgatccgctccgtgctggaagcccagcgagggaacaaggatgccgccatcaactccctgctgcagatgggggaggagccatagagcctctgcctcgatgccgttttgcccccgctctttggacacgccgacccggcgctccccaaggaatgctgtcccaacaagattcccgtgaaagagcacccgtgtcgccccctcccgtggacttctgtgccgccccgtccacacctgttcttgggtgcatgtgggttttcggttcctggcggtccaggacggggcgggggctcccctcccatctcgtgctgggaggtctcagcgcgctctcctgtccctgggacgtgcgtctctccttctcatgccgttctggaaaatgctcttgctgtagagagcagctgcttctgccagggtgttggaggtggtggagcgccttccgattccattcatggcattttgtgatgtgatgtaattggaatagagctgttgatttaaggcacacacaatccctcacactgtgggttttttttagaacttcccagacgaaaactcacgcccttgccctaacgcgctttgctgtgagcctggcccctgcccagggcttgggtctggtgagctgagcagcttcctgtggatggtgtggggccggcctctggcctggctcacctggccactgtccagccagccttgtgacagactccggcctgaaggcagaatgaacccacacctggagtgaggaagggggcctggcacggttggccaggctctgcctgattgccagccagcgggcatctgaagccgggtccttcgcccgccggaggctgccgtccgtctctcctgctgcgctcgtgccagctccgtgggtgtcctcccagggagcttctcttctcaacaggccttgcgaggctggggtgagaggtgatagaggcagcactgtgcatgattccgagagggtgtggtggcactgccagccgactgctgacagcttgggagctgctgtgcccaggacgtgggttcagcgtgggcgaggaaagcctggcgagcgtggccctgtaaaagctttctgaggcgggaggcgctcacttacctctgactgcctgggcgctgcgtgtagcatcttggcctacaggacagattttaggtgacacctggttatgacagtcagaaatttgagaagcttctcacaagtgatgcactttaaataatctgcatgccattgagacacctgcatgtctggtgtttgtggttcaagtgtcttgccgccggccttcggatgtaaacccactgataacggacagaaagagaatgcccacaagtgggtcttctgtggaagatgcagaaggaggaagttagtgcttacattttagtctttttctccctcaaaaaaataggttaagtttcagtgccagctagaaaatactgctttctgccatcgattgggggtggtttttgtcaaatatactgttgataaata

SEQ ID NO: 64174 - DNA, 3832 bp, Homo sapiens
ccctgaatagccactaagggatgcttcagccctgtgcagtgcttccctcacgtttcaaaaaggccagtattttggaaagataaccttttttcaatatagtctgcatattatcagaaagcatgggtgagtacctgcaaggagtaccatgtggacccctgcgaggggtaccgtgggggcccctgcgaggggtactgtgtggacccctgtgaggagtatcatgggggcccctgcgaggggtaccgtgcgggcccccgcgaggagtatcgaggagtaccgtgtggacccctgccttctgcagtgagatctcgggacgtttgcgggagactccgctgcagccaccgcggtgccgtcagagaggcctccttggtagaggtgtacatcggtgagctcccgcaggacttcctccgcatcacgcccacacagcagcagcggcaggtccagctggacgcccaggcggcccagcagctgcagtacggaggcgcagtgggcaccgtgggccgactgaacatcacggtggtacaggcaaagttggccaagaattacggcatgacccgcatggacccctactgccgactgcgcctgggctacgcggtgtacgagacgcccacggcacacaatggcgccaagaatccccgctggaataaggtcatccactgcacggtgcccccaggcgtggactctttctatctcgagatcttcgatgagagagccttctccatggacgaccgcattgcctggacccacatcaccatcccggagtccctgaggcagggcaaggtggaggacaagtggtacagcctgagcgggaggcagggggacgacaaggagggcatgatcaacctcgtcatgtcctacgcgctgcttccagctgccatggtgatgccaccccagcccgtggtcctgatgccaacagtgtaccagcagggcgttggctatgtgcccatcacagggatgcccgctgtctgtagccccggcatggtgcccgtggccctgcccccggccgccgtgaacgcccagccccgctgtagcgaggaggacctgaaagccatccaggacatgttccccaacatggaccaggaggtgatccgctccgtgctggaagcccagcgagggaacaaggatgccgccatcaactccctgctgcagatgggggaggagccatagagcctctgcctcgatgccgttttgcccccgctctttggacacgccgacccggcgctccccaaggaatgctgtcccaacaagattcccgtgaaagagcacccgtgtcgccccctcccgtggacttctgtgccgccccgtccacacctgttcttgggtgcatgtgggttttcggttcctggcggtccaggacggggcgggggctcccctcccatctcgtgctgggaggtctcagcgcgctctcctgtccctgggacgtgcgtctctccttctcatgccgttctggaaaatgctcttgctgtagagagcagctgcttctgccagggtgttggaggtggtggagcgccttccgattccattcatggcattttgtgatgtgatgtaattggaatagagctgttgatttaaggcacacacaatccctcacactgtgggttttttttagaacttcccagacgaaaactcacgcccttgccctaacgcgctttgctgtgagcctggcccctgcccagggcttgggtctggtgagctgagcagcttcctgtggatggtgtggggccggcctctggcctggctcacctggccactgtccagccagccttgtgacagactccggcctgaaggcagaatgaacccacacctggagtgaggaagggggcctggcacggttggccaggctctgcctgattgccagccagcgggcatctgaagccgggtccttcgcccgccggaggctgccgtccgtctctcctgctgcgctcgtgccagctccgtgggtgtcctcccagggagcttctcttctcaacaggccttgcgaggctggggtgagaggtgatagaggcagcactgtgcatgattccgagagggtgtggtggcactgccagccgactgctgacagcttgggagctgctgtgcccaggacgtgggttcagcgtgggcgaggaaagcctggcgagcgtggccctgtaaaagctttctgaggcgggaggcgctcacttacctctgactgcctgggcgctgcgtgtagcatcttggcctacaggacagattttaggtgacacctggttatgacagtcagaaatttgagaagcttctcacaagtgatgcactttaaataatctgcatgccattgagacacctgcatgtctggtgtttgtggttcaagtgtcttgccgccggccttcggatgtaaacccactgataacggacagaaagagaatgcccacaagtgggtcttctgtggaagatgcagaaggaggaagttagtgcttacattttagtctttttctccctcaaaaaaataggttaagtttcagtgccagctagaaaatactgctttctgccatcgattgggggtggtttttgtcaaatatactgttgataaatatttatttttgtaaacttgaagtgtgtggtggccgtgggggagggacatgctggcagcaggcgccttcttcagctgtgggtcctaaaggcctttgatcctttgaagaagaaagacatggtatttgttcagcagacgccgaccactcagacggaggggcccctgggattccctgtctcagatggcctggtcttacgcctgtgtagatttcttctccattgggaatgaaggtgtcaggcgggactggaacgttctagatggtatgttccgtgatattaacaactctaacccaggacagaccacaagccacactcagaggcctcactgtgctgggggcttcggtgtccaggcgcccaggtgtggccaccagcaccggtttctgccttcgcgttgctggggtgcagtgagactgccacacgcgtgcacatgtggctctgtgggtgtctcctagagaggacgtggcccctgctgccagcccttgagcagcccgtgtgggggcccgagggacccacacagtgggggccagcctcgctggagggagagcaaccctttgccgatgaccacgcttgccgccatctcttagttttctttttcacaagcgctttatttttttaatagacaaatcacattttgcaaggcctttaattaaataagattcttctttccttcattttatgctttatttcctgtttgaaggcttactgtagaagtggcttactgtagaagcagcttgctgagcccctccgagcggtccccagaattagctggttcacaacccccaccctcccccgcccccgcctgtgtcaggtgtggatgaggtcgtcacactcagaaggacaggcttgtctgccagctcacaaggggaggctgcagtgggtttgggagctgggtttaggcccctggtgtctgagggcccaggccttgccagcctctgctgctcctgctcctgggtttgaagatgcaggccgatcgccagctccgtggcagcggtcactaaggacagcctgactgtgccatcttggagcctcaggcggggctccggagatagaagacaggtcgccggaggctccccctcctctcctctcccctctgcagatgctccctgggcgctaccctgcagggtgccaggcaggagtggtctcagaacgtgcgcttctgattattttactggggtccattgtccagatttttctttgattgtaaaatatatttttactttttagtcttctaatttaataaatgatccatataaaaatagagaaataaagtcctttaagggaaggttta

SEQ ID NO: 64175 - DNA, 3510 bp, Homo sapiens
tgcgcagtggggcggtgccgggggcggggcgcggcggctgtcagctgactgtggcggcggcggcctcgaggtgacaactgtctccgtcgcaggctccggcgggggcgcaggaggtcgcccggcgcgtcactgtcgggtcggcgagccacgggggccgccgcagcaccatggcgaccaccgtcagcactcagcgcgggccggcaaagttggccaagaattacggcatgacccgcatggacccctactgccgactgcgcctgggctacgcggtgtacgagacgcccacggcacacaatggcgccaagaatccccgctggaataaggtcatccactgcacggtgcccccaggcgtggactctttctatctcgagatcttcgatgagagagccttctccatggacgaccgcattgcctggacccacatcaccatcccggagtccctgaggcagggcaaggtggaggacaagtggtacagcctgagcgggaggcagggggacgacaaggagggcatgatcaacctcgtcatgtcctacgcgctgcttccagctgccatggtgatgccaccccagcccgtggtcctgatgccaacagtgtaccagcagggcgttggctatgtgcccatcacagggatgcccgctgtctgtagccccggcatggtgcccgtggccctgcccccggccgccgtgaacgcccagccccgctgtagcgaggaggacctgaaagccatccaggacatgttccccaacatggaccaggaggtgatccgctccgtgctggaagcccagcgagggaacaaggatgccgccatcaactccctgctgcagatgggggaggagccatagagcctctgcctcgatgccgttttgcccccgctctttggacacgccgacccggcgctccccaaggaatgctgtcccaacaagattcccgtgaaagagcacccgtgtcgccccctcccgtggacttctgtgccgccccgtccacacctgttcttgggtgcatgtgggttttcggttcctggcggtccaggacggggcgggggctcccctcccatctcgtgctgggaggtctcagcgcgctctcctgtccctgggacgtgcgtctctccttctcatgccgttctggaaaatgctcttgctgtagagagcagctgcttctgccagggtgttggaggtggtggagcgccttccgattccattcatggcattttgtgatgtgatgtaattggaatagagctgttgatttaaggcacacacaatccctcacactgtgggttttttttagaacttcccagacgaaaactcacgcccttgccctaacgcgctttgctgtgagcctggcccctgcccagggcttgggtctggtgagctgagcagcttcctgtggatggtgtggggccggcctctggcctggctcacctggccactgtccagccagccttgtgacagactccggcctgaaggcagaatgaacccacacctggagtgaggaagggggcctggcacggttggccaggctctgcctgattgccagccagcgggcatctgaagccgggtccttcgcccgccggaggctgccgtccgtctctcctgctgcgctcgtgccagctccgtgggtgtcctcccagggagcttctcttctcaacaggccttgcgaggctggggtgagaggtgatagaggcagcactgtgcatgattccgagagggtgtggtggcactgccagccgactgctgacagcttgggagctgctgtgcccaggacgtgggttcagcgtgggcgaggaaagcctggcgagcgtggccctgtaaaagctttctgaggcgggaggcgctcacttacctctgactgcctgggcgctgcgtgtagcatcttggcctacaggacagattttaggtgacacctggttatgacagtcagaaatttgagaagcttctcacaagtgatgcactttaaataatctgcatgccattgagacacctgcatgtctggtgtttgtggttcaagtgtcttgccgccggccttcggatgtaaacccactgataacggacagaaagagaatgcccacaagtgggtcttctgtggaagatgcagaaggaggaagttagtgcttacattttagtctttttctccctcaaaaaaataggttaagtttcagtgccagctagaaaatactgctttctgccatcgattgggggtggtttttgtcaaatatactgttgataaatatttatttttgtaaacttgaagtgtgtggtggccgtgggggagggacatgctggcagcaggcgccttcttcagctgtgggtcctaaaggcctttgatcctttgaagaagaaagacatggtatttgttcagcagacgccgaccactcagacggaggggcccctgggattccctgtctcagatggcctggtcttacgcctgtgtagatttcttctccattgggaatgaaggtgtcaggcgggactggaacgttctagatggtatgttccgtgatattaacaactctaacccaggacagaccacaagccacactcagaggcctcactgtgctgggggcttcggtgtccaggcgcccaggtgtggccaccagcaccggtttctgccttcgcgttgctggggtgcagtgagactgccacacgcgtgcacatgtggctctgtgggtgtctcctagagaggacgtggcccctgctgccagcccttgagcagcccgtgtgggggcccgagggacccacacagtgggggccagcctcgctggagggagagcaaccctttgccgatgaccacgcttgccgccatctcttagttttctttttcacaagcgctttatttttttaatagacaaatcacattttgcaaggcctttaattaaataagattcttctttccttcattttatgctttatttcctgtttgaaggcttactgtagaagtggcttactgtagaagcagcttgctgagcccctccgagcggtccccagaattagctggttcacaacccccaccctcccccgcccccgcctgtgtcaggtgtggatgaggtcgtcacactcagaaggacaggcttgtctgccagctcacaaggggaggctgcagtgggtttgggagctgggtttaggcccctggtgtctgagggcccaggccttgccagcctctgctgctcctgctcctgggtttgaagatgcaggccgatcgccagctccgtggcagcggtcactaaggacagcctgactgtgccatcttggagcctcaggcggggctccggagatagaagacaggtcgccggaggctccccctcctctcctctcccctctgcagatgctccctgggcgctaccctgcagggtgccaggcaggagtggtctcagaacgtgcgcttctgattattttactggggtccattgtccagatttttctttgattgtaaaatatatttttactttttagtcttctaatttaataaatgatccatataaaaatagagaaataaagtcctttaagggaaggttta

SEQ ID NO: 64176 - DNA, 3111 bp, Homo sapiens
ttctagaggataccgccgagatcacatacatcccggagtccctgaggcagggcaaggtggaggacaagtggtacagcctgagcgggaggcagggggacgacaaggagggcatgatcaacctcgtcatgtcctacgcgctgcttccagctgccatggtgatgccaccccagcccgtggtcctgatgccaacagtgtaccagcagggcgttggctatgtgcccatcacagggatgcccgctgtctgtagccccggcatggtgcccgtggccctgcccccggccgccgtgaacgcccagccccgctgtagcgaggaggacctgaaagccatccaggacatgttccccaacatggaccaggaggtgatccgctccgtgctggaagcccagcgagggaacaaggatgccgccatcaactccctgctgcagatgggggaggagccatagagcctctgcctcgatgccgttttgcccccgctctttggacacgccgacccggcgctccccaaggaatgctgtcccaacaagattcccgtgaaagagcacccgtgtcgccccctcccgtggacttctgtgccgccccgtccacacctgttcttgggtgcatgtgggttttcggttcctggcggtccaggacggggcgggggctcccctcccatctcgtgctgggaggtctcagcgcgctctcctgtccctgggacgtgcgtctctccttctcatgccgttctggaaaatgctcttgctgtagagagcagctgcttctgccagggtgttggaggtggtggagcgccttccgattccattcatggcattttgtgatgtgatgtaattggaatagagctgttgatttaaggcacacacaatccctcacactgtgggttttttttagaacttcccagacgaaaactcacgcccttgccctaacgcgctttgctgtgagcctggcccctgcccagggcttgggtctggtgagctgagcagcttcctgtggatggtgtggggccggcctctggcctggctcacctggccactgtccagccagccttgtgacagactccggcctgaaggcagaatgaacccacacctggagtgaggaagggggcctggcacggttggccaggctctgcctgattgccagccagcgggcatctgaagccgggtccttcgcccgccggaggctgccgtccgtctctcctgctgcgctcgtgccagctccgtgggtgtcctcccagggagcttctcttctcaacaggccttgcgaggctggggtgagaggtgatagaggcagcactgtgcatgattccgagagggtgtggtggcactgccagccgactgctgacagcttgggagctgctgtgcccaggacgtgggttcagcgtgggcgaggaaagcctggcgagcgtggccctgtaaaagctttctgaggcgggaggcgctcacttacctctgactgcctgggcgctgcgtgtagcatcttggcctacaggacagattttaggtgacacctggttatgacagtcagaaatttgagaagcttctcacaagtgatgcactttaaataatctgcatgccattgagacacctgcatgtctggtgtttgtggttcaagtgtcttgccgccggccttcggatgtaaacccactgataacggacagaaagagaatgcccacaagtgggtcttctgtggaagatgcagaaggaggaagttagtgcttacattttagtctttttctccctcaaaaaaataggttaagtttcagtgccagctagaaaatactgctttctgccatcgattgggggtggtttttgtcaaatatactgttgataaatatttatttttgtaaacttgaagtgtgtggtggccgtgggggagggacatgctggcagcaggcgccttcttcagctgtgggtcctaaaggcctttgatcctttgaagaagaaagacatggtatttgttcagcagacgccgaccactcagacggaggggcccctgggattccctgtctcagatggcctggtcttacgcctgtgtagatttcttctccattgggaatgaaggtgtcaggcgggactggaacgttctagatggtatgttccgtgatattaacaactctaacccaggacagaccacaagccacactcagaggcctcactgtgctgggggcttcggtgtccaggcgcccaggtgtggccaccagcaccggtttctgccttcgcgttgctggggtgcagtgagactgccacacgcgtgcacatgtggctctgtgggtgtctcctagagaggacgtggcccctgctgccagcccttgagcagcccgtgtgggggcccgagggacccacacagtgggggccagcctcgctggagggagagcaaccctttgccgatgaccacgcttgccgccatctcttagttttctttttcacaagcgctttatttttttaatagacaaatcacattttgcaaggcctttaattaaataagattcttctttccttcattttatgctttatttcctgtttgaaggcttactgtagaagtggcttactgtagaagcagcttgctgagcccctccgagcggtccccagaattagctggttcacaacccccaccctcccccgcccccgcctgtgtcaggtgtggatgaggtcgtcacactcagaaggacaggcttgtctgccagctcacaaggggaggctgcagtgggtttgggagctgggtttaggcccctggtgtctgagggcccaggccttgccagcctctgctgctcctgctcctgggtttgaagatgcaggccgatcgccagctccgtggcagcggtcactaaggacagcctgactgtgccatcttggagcctcaggcggggctccggagatagaagacaggtcgccggaggctccccctcctctcctctcccctctgcagatgctccctgggcgctaccctgcagggtgccaggcaggagtggtctcagaacgtgcgcttctgattattttactggggtccattgtccagatttttctttgattgtaaaatatatttttactttttagtcttctaatttaataaatgatccatataaaaatagagaaataaagtcctttaagggaaggttta

SEQ ID NO: 64177 - DNA, 1863 bp, Homo sapiens
tacggtccggaagtcctttggatgtgatagaggcagcactgtgcatgattccgagagggtgtggtggcactgccagccgactgctgacagcttgggagctgctgtgcccaggacgtgggttcagcgtgggcgaggaaagcctggcgagcgtggccctgtaaaagctttctgaggcgggaggcgctcacttacctctgactgcctgggcgctgcgtgtagcatcttggcctacaggacagattttaggtgacacctggttatgacagtcagaaatttgagaagcttctcacaagtgatgcactttaaataatctgcatgccattgagacacctgcatgtctggtgtttgtggttcaagtgtcttgccgccggccttcggatgtaaacccactgataacggacagaaagagaatgcccacaagtgggtcttctgtggaagatgcagaaggaggaagttagtgcttacattttagtctttttctccctcaaaaaaataggttaagtttcagtgccagctagaaaatactgctttctgccatcgattgggggtggtttttgtcaaatatactgttgataaatatttatttttgtaaacttgaagtgtgtggtggccgtgggggagggacatgctggcagcaggcgccttcttcagctgtgggtcctaaaggcctttgatcctttgaagaagaaagacatggtatttgttcagcagacgccgaccactcagacggaggggcccctgggattccctgtctcagatggcctggtcttacgcctgtgtagatttcttctccattgggaatgaaggtgtcaggcgggactggaacgttctagatggtatgttccgtgatattaacaactctaacccaggacagaccacaagccacactcagaggcctcactgtgctgggggcttcggtgtccaggcgcccaggtgtggccaccagcaccggtttctgccttcgcgttgctggggtgcagtgagactgccacacgcgtgcacatgtggctctgtgggtgtctcctagagaggacgtggcccctgctgccagcccttgagcagcccgtgtgggggcccgagggacccacacagtgggggccagcctcgctggagggagagcaaccctttgccgatgaccacgcttgccgccatctcttagttttctttttcacaagcgctttatttttttaatagacaaatcacattttgcaaggcctttaattaaataagattcttctttccttcattttatgctttatttcctgtttgaaggcttactgtagaagtggcttactgtagaagcagcttgctgagcccctccgagcggtccccagaattagctggttcacaacccccaccctcccccgcccccgcctgtgtcaggtgtggatgaggtcgtcacactcagaaggacaggcttgtctgccagctcacaaggggaggctgcagtgggtttgggagctgggtttaggcccctggtgtctgagggcccaggccttgccagcctctgctgctcctgctcctgggtttgaagatgcaggccgatcgccagctccgtggcagcggtcactaaggacagcctgactgtgccatcttggagcctcaggcggggctccggagatagaagacaggtcgccggaggctccccctcctctcctctcccctctgcagatgctccctgggcgctaccctgcagggtgccaggcaggagtggtctcagaacgtgcgcttctgattattttactggggtccattgtccagatttttctttgattgtaaaatatatttttactttttagtcttctaatttaataaatgatccatataaaaatagagaaataaagtcctttaagggaaggttta

SEQ ID NO: 64178 - DNA, 1253 bp, Homo sapiens
tgcgcagtggggcggtgccgggggcggggcgcggcggctgtcagctgactgtggcggcggcggcctcgaggtgacaactgtctccgtcgcaggctccggcgggggcgcaggaggtcgcccggcgcgtcactgtcgggtcggcgagccacgggggccgccgcagcaccatggcgaccaccgtcagcactcagcgcgggccggtgtacatcggtgagctcccgcaggacttcctccgcatcacgcccacacagcagcagcggcaggtccagctggacgcccaggcggcccagcagctgcagtacggaggcgcagtgggcaccgtgggccgactgaacatcacggtggtacaggcaaagttggccaagaattacggcatgacccgcatggacccctactgccgactgcgcctgggctacgcggtgtacgagacgcccacggcacacaatggcgccaagaatccccgctggaataaggtcatccactgcacggtgcccccaggcgtggactctttctatctcgagatcttcgatgagagagccttctccatggacgaccgcattgcctggacccacatcaccatcccggagtccctgaggcagggcaaggtggaggacaagtggtacagcctgagcgggaggcagggggacgacaaggagggcatgatcaacctcgtcatgtcctacgcgctgcttccagctgccatggtgatgccaccccagcccgtggtcctgatgccaacagtgtaccagcagggcgttggctatgtgcccatcacagggatgcccgctgtctgtagccccggcatggtgcccgtggccctgcccccggccgccgtgaacgcccagccccgctgtagcgaggaggacctgaaagccatccaggacatgttccccaacatggaccaggaggtgatccgctccgtgctggaagcccagcgagggaacaaggatgccgccatcaactccctgctgcagatgggggaggagccatagagcctctgcctcgatgccgttttgcccccgctctttggacacgccgacccggcgctccccaaggaatgctgtcccaacaagattcccgtgaaagagcacccgtgcgtctctccttctcatgccgttctggaaaatgctcttgctgtagagagcagctgcttctgccagggtgttggaggtggtggagcgccttccgattccattcatggcattttgtgatgtgatgtaattggaatagagctgttgatttaaggcacacac

SEQ ID NO: 64179 - DNA, 977 bp, Homo sapiens
tgcgcagtggggcggtgccgggggcggggcgcggcggctgtcagctgactgtggcggcggcggcctcgaggtgacaactgtctccgtcgcaggctccggcgggggcgcaggaggtcgcccggcgcgtcactgtcgggtcggcgagccacgggggccgccgcagcaccatggcgaccaccgtcagcactcagcgcgggccggtgtacatcggtgagctcccgcaggacttcctccgcatcacgcccacacagcagcagcggcaggtccagctggacgcccaggcggcccagcagctgcagtacggaggcgcagtgggcaccgtgggccgactgaacatcacggtggtacagggtacagaggcaaagtaagagccaagaatatacgggcatagacccgcatagaggaccccgaacaagccagacgaacacctagagactacacaaggaaaacaagacagcccacgggcacacgaatgggcggccgaagaaataccccgctaggaaaaagagtacaaccacaatcaacaggagccccccagggcgtggactactatttctattctgcgagaatactaacgaaagagagaggccttgctccaagggaccaaccacagaaacccgagaaacgccacaaacaccaacgccaaaagacccaagaaagccggaatcaaatagatgagagacaataaggaatcgaggcagaaccgggagttcagtatggagtgacgatatggatattggaaaggcgatgctgcggctaaaagcgcgaaccgcgacctaaggacccggtcggaaccgggaaggaaagaagccgaggccgcaagccgcatggagggccggaaaaagaccgaagcgggagaaaaccggggcgtaaggtgggagagtaagagaacgccgagaaccggtgataaacgcgccattggggcggagaatcctcccaatcgtgaagtgggccggggagacccgaatgcgcgccga

SEQ ID NO: 64180 - DNA, 3629 bp, Homo sapiens
tgcgcagtggggcggtgccgggggcggggcgcggcggctgtcagctgactgtggcggcggcggcctcgaggtgacaactgtctccgtcgcaggctccggcgggggcgcaggaggtcgcccggcgcgtcactgtcgggtcggcgagccacgggggccgccgcagcaccatggcgaccaccgtcagcactcagcgcgggccggtgtacatcggtgagctcccgcaggacttcctccgcatcacgcccacacagcagcagcggcaggtccagctggacgcccaggcggcccagcagctgcagtacggaggcgcagtgggcaccgtgggccgactgaacatcacggtggtacaggcaaagttggccaagaattacggcatgacccgcatggacccctactgccgactgcgcctgggctacgcggtgtacgagacgcccacggcacacaatggcgccaagaatccccgctggaataaggtcatccactgcacggtgcccccaggcgtggactctttctatctcgagatcttcgatgagagagccttctccatggacgaccgcattgcctggacccacatcaccatcccggagtccctgaggcagggcaaggtggaggacaagtggtacagcctgagcgggaggcagggggacgacaaggagggcatgatcaacctcgtcatgtcctacgcgctgcttccagctgccatggtgatgccaccccagcccgtggtcctgatgccaacagtgtaccagcagggcgttggctatgtgcccatcacagggatgcccgctgtctgtagccccggcatggtgcccgtggccctgcccccggccgccgtgaacgcccagccccgctgtagcgaggaggacctgaaagccatccaggacatgttccccaacatggaccaggaggtgatccgctccgtgctggaagcccagcgagggaacaaggatgccgccatcaactccctgctgcagatgggggaggagccatagagcctctgcctcgatgccgttttgcccccgctctttggacacgccgacccggcgctccccaaggaatgctgtcccaacaagattcccgtgaaagagcacccgtgtcgccccctcccgtggacttctgtgccgccccgtccacacctgttcttgggtgcatgtgggttttcggttcctggcggtccaggacggggcgggggctcccctcccatctcgtgctgggaggtctcagcgcgctctcctgtccctgggacgtgcgtctctccttctcatgccgttctggaaaatgctcttgctgtagagagcagctgcttctgccagggtgttggaggtggtggagcgccttccgattccattcatggcattttgtgatgtgatgtaattggaatagagctgttgatttaaggcacacacaatccctcacactgtgggttttttttagaacttcccagacgaaaactcacgcccttgccctaacgcgctttgctgtgagcctggcccctgcccagggcttgggtctggtgagctgagcagcttcctgtggatggtgtggggccggcctctggcctggctcacctggccactgtccagccagccttgtgacagactccggcctgaaggcagaatgaacccacacctggagtgaggaagggggcctggcacggttggccaggctctgcctgattgccagccagcgggcatctgaagccgggtccttcgcccgccggaggctgccgtccgtctctcctgctgcgctcgtgccagctccgtgggtgtcctcccagggagcttctcttctcaacaggccttgcgaggctggggtgagaggtgatagaggcagcactgtgcatgattccgagagggtgtggtggcactgccagccgactgctgacagcttgggagctgctgtgcccaggacgtgggttcagcgtgggcgaggaaagcctggcgagcgtggccctgtaaaagctttctgaggcgggaggcgctcacttacctctgactgcctgggcgctgcgtgtagcatcttggcctacaggacagattttaggtgacacctggttatgacagtcagaaatttgagaagcttctcacaagtgatgcactttaaataatctgcatgccattgagacacctgcatgtctggtgtttgtggttcaagtgtcttgccgccggccttcggatgtaaacccactgataacggacagaaagagaatgcccacaagtgggtcttctgtggaagatgcagaaggaggaagttagtgcttacattttagtctttttctccctcaaaaaaataggttaagtttcagtgccagctagaaaatactgctttctgccatcgattgggggtggtttttgtcaaatatactgttgataaatatttatttttgtaaacttgaagtgtgtggtggccgtgggggagggacatgctggcagcaggcgccttcttcagctgtgggtcctaaaggcctttgatcctttgaagaagaaagacatggtatttgttcagcagacgccgaccactcagacggaggggcccctgggattccctgtctcagatggcctggtcttacgcctgtgtagatttcttctccattgggaatgaaggtgtcaggcgggactggaacgttctagatggtatgttccgtgatattaacaactctaacccaggacagaccacaagccacactcagaggcctcactgtgctgggggcttcggtgtccaggcgcccaggtgtggccaccagcaccggtttctgccttcgcgttgctggggtgcagtgagactgccacacgcgtgcacatgtggctctgtgggtgtctcctagagaggacgtggcccctgctgccagcccttgagcagcccgtgtgggggcccgagggacccacacagtgggggccagcctcgctggagggagagcaaccctttgccgatgaccacgcttgccgccatctcttagttttctttttcacaagcgctttatttttttaatagacaaatcacattttgcaaggcctttaattaaataagattcttctttccttcattttatgctttatttcctgtttgaaggcttactgtagaagtggcttactgtagaagcagcttgctgagcccctccgagcggtccccagaattagctggttcacaacccccaccctcccccgcccccgcctgtgtcaggtgtggatgaggtcgtcacactcagaaggacaggcttgtctgccagctcacaaggggaggctgcagtgggtttgggagctgggtttaggcccctggtgtctgagggcccaggccttgccagcctctgctgctcctgctcctgggtttgaagatgcaggccgatcgccagctccgtggcagcggtcactaaggacagcctgactgtgccatcttggagcctcaggcggggctccggagatagaagacaggtcgccggaggctccccctcctctcctctcccctggtgccaggcaggagtggtctcagaacgtgcgcttctgattattttactggggtccattgtccagatttttctttgattgtaaaatatatttttactttttagtcttctaatttaataaatgatccatataaaaatagagaaataaagtcctttaagggaaggttta

SEQ ID NO: 64181 - DNA, 2397 bp, Homo sapiens
tgcgcagtggggcggtgccgggggcggggcgcggcggctgtcagctgactgtggcggcggcggcctcgaggtgacaactgtctccgtcgcaggctccggcgggggcgcaggaggtcgcccggcgcgtcactgtcgggtcggcgagccacgggggccgccgcagcaccatggcgaccaccgtcagcactcagcgcgggccggtgtacatcggtgagctcccgcaggacttcctccgcatcacgcccacacagcagcagcggcaggtccagctggacgcccaggcggcccagcagctgcagtacggaggcgcagtgggcaccgtgggccgactgaacatcacggtggtacaggcaaagttggccaagaattacggcatgacccgcatggacccctactgccgactgcgcctgggctacgcggtgtacgagacgcccacggcacacaatggcgccaagaatccccgctggaataaggtcatccactgcacggtgcccccaggcgtggactctttctatctcgagatcttcgatgagagagccttctccatggacgaccgcattgcctggacccacatcaccatcccggagtccctgaggcagggcaaggtggaggacaagtggtacagcctgagcgggaggcagggggacgacaaggagggcatgatcaacctcgtcatgtcctacgcgctgcttccagctgccatggtgatgccaccccagcccgtggtcctgatgccaacagtgtaccagcagggcgttggctatgtgcccatcacagggatgcccgctgtctgtagccccggcatggtgcccgtggccctgcccccggccgccgtgaacgcccagccccgctgtagcgaggaggacctgaaagccatccaggacatgttccccaacatggaccaggaggtgatccgctccgtgctggaagcccagcgagggaacaaggatgccgccatcaactccctgctgcagatgggggaggagccatagagcctctgcctcgatgccgttttgcccccgctctttggacacgccgacccggcgctccccaaggaatgctgtcccaacaagattcccgtgaaagagcacccgtgtcgccccctcccgtggacttctgtgccgccccgtccacacctgttcttgggtgcatgtgggttttcggttcctggcggtccaggacggggcgggggctcccctcccatctcgtgctgggaggtctcagcgcgctctcctgtccctgggacgtgcgtctctccttctcatgccgttctggaaaatgctcttgctgtagagagcagctgcttctgccagggtgttggaggtggtggagcgccttccgattccattcatggcattttgtgatgtgatgtaattggaatagagctgttgatttaaggcacacacaatccctcacactgtgggttttttttagaacttcccagacgaaaactcacgcccttgccctaacgcgctttgctgtgagcctggcccctgcccagggcttgggtctggtgagctgagcagcttcctgtggatggtgtggggccggcctctggcctggctcacctggccactgtccagccagccttgtgacagactccggcctgaaggcagaatgaacccacacctggagtgaggaagggggcctggcacggttggccaggctctgcctgattgccagccagcgggcatctgaagccgggtccttcgcccgccggaggctgccgtccgtctctcctgctgcgctcgtgccagctccgtgggtgtcctcccagggagcttctcttctcaacaggccttgcgaggctggggtgagaggtgatagaggcagcactgtgcatgattccgagagggtgtggtggcactgccagccgactgctgacagcttgggagctgctgtgcccaggacgtgggttcagcgtgggcgaggaaagcctggcgagcgtggccctgtaaaagctttctgaggcgggaggcgctcacttacctctgactgcctgggcgctgcgtgtagcatcttggcctacaggacagattttaggtgacacctggttatgacagtcagaaatttgagaagcttctcacaagtgatgcactttaaataatctgcatgccattgagacacctgcatgtctggtgtttgtggttcaagtgtcttgccgccggccttcggatgtaaacccactgataacggacagaaagagaatgcccacaagtgggtcttctgtggaagatgcagaaggaggaagttagtgcttacattttagtctttttctccctcaaaaaaataggttaagtttcagtgccagctagaaaatactgctttctgccatcgattgggggtggtctctgtttcttctgactaccttaactctttttcttactttacctctct

SEQ ID NO: 64182 - DNA, 3576 bp, Homo sapiens
tgcgcagtggggcggtgccgggggcggggcgcggcggctgtcagctgactgtggcggcggcggcctcgaggtgacaactgtctccgtcgcaggctccggcgggggcgcaggaggtcgcccggcgcgtcactgtcgggtcggcgagccacgggggccgccgcagcaccatggcgaccaccgtccagctggacgcccaggcggcccagcagctgcagtacggaggcgcagtgggcaccgtgggccgactgaacatcacggtggtacaggcaaagttggccaagaattacggcatgacccgcatggacccctactgccgactgcgcctgggctacgcggtgtacgagacgcccacggcacacaatggcgccaagaatccccgctggaataaggtcatccactgcacggtgcccccaggcgtggactctttctatctcgagatcttcgatgagagagccttctccatggacgaccgcattgcctggacccacatcaccatcccggagtccctgaggcagggcaaggtggaggacaagtggtacagcctgagcgggaggcagggggacgacaaggagggcatgatcaacctcgtcatgtcctacgcgctgcttccagctgccatggtgatgccaccccagcccgtggtcctgatgccaacagtgtaccagcagggcgttggctatgtgcccatcacagggatgcccgctgtctgtagccccggcatggtgcccgtggccctgcccccggccgccgtgaacgcccagccccgctgtagcgaggaggacctgaaagccatccaggacatgttccccaacatggaccaggaggtgatccgctccgtgctggaagcccagcgagggaacaaggatgccgccatcaactccctgctgcagatgggggaggagccatagagcctctgcctcgatgccgttttgcccccgctctttggacacgccgacccggcgctccccaaggaatgctgtcccaacaagattcccgtgaaagagcacccgtgtcgccccctcccgtggacttctgtgccgccccgtccacacctgttcttgggtgcatgtgggttttcggttcctggcggtccaggacggggcgggggctcccctcccatctcgtgctgggaggtctcagcgcgctctcctgtccctgggacgtgcgtctctccttctcatgccgttctggaaaatgctcttgctgtagagagcagctgcttctgccagggtgttggaggtggtggagcgccttccgattccattcatggcattttgtgatgtgatgtaattggaatagagctgttgatttaaggcacacacaatccctcacactgtgggttttttttagaacttcccagacgaaaactcacgcccttgccctaacgcgctttgctgtgagcctggcccctgcccagggcttgggtctggtgagctgagcagcttcctgtggatggtgtggggccggcctctggcctggctcacctggccactgtccagccagccttgtgacagactccggcctgaaggcagaatgaacccacacctggagtgaggaagggggcctggcacggttggccaggctctgcctgattgccagccagcgggcatctgaagccgggtccttcgcccgccggaggctgccgtccgtctctcctgctgcgctcgtgccagctccgtgggtgtcctcccagggagcttctcttctcaacaggccttgcgaggctggggtgagaggtgatagaggcagcactgtgcatgattccgagagggtgtggtggcactgccagccgactgctgacagcttgggagctgctgtgcccaggacgtgggttcagcgtgggcgaggaaagcctggcgagcgtggccctgtaaaagctttctgaggcgggaggcgctcacttacctctgactgcctgggcgctgcgtgtagcatcttggcctacaggacagattttaggtgacacctggttatgacagtcagaaatttgagaagcttctcacaagtgatgcactttaaataatctgcatgccattgagacacctgcatgtctggtgtttgtggttcaagtgtcttgccgccggccttcggatgtaaacccactgataacggacagaaagagaatgcccacaagtgggtcttctgtggaagatgcagaaggaggaagttagtgcttacattttagtctttttctccctcaaaaaaataggttaagtttcagtgccagctagaaaatactgctttctgccatcgattgggggtggtttttgtcaaatatactgttgataaatatttatttttgtaaacttgaagtgtgtggtggccgtgggggagggacatgctggcagcaggcgccttcttcagctgtgggtcctaaaggcctttgatcctttgaagaagaaagacatggtatttgttcagcagacgccgaccactcagacggaggggcccctgggattccctgtctcagatggcctggtcttacgcctgtgtagatttcttctccattgggaatgaaggtgtcaggcgggactggaacgttctagatggtatgttccgtgatattaacaactctaacccaggacagaccacaagccacactcagaggcctcactgtgctgggggcttcggtgtccaggcgcccaggtgtggccaccagcaccggtttctgccttcgcgttgctggggtgcagtgagactgccacacgcgtgcacatgtggctctgtgggtgtctcctagagaggacgtggcccctgctgccagcccttgagcagcccgtgtgggggcccgagggacccacacagtgggggccagcctcgctggagggagagcaaccctttgccgatgaccacgcttgccgccatctcttagttttctttttcacaagcgctttatttttttaatagacaaatcacattttgcaaggcctttaattaaataagattcttctttccttcattttatgctttatttcctgtttgaaggcttactgtagaagtggcttactgtagaagcagcttgctgagcccctccgagcggtccccagaattagctggttcacaacccccaccctcccccgcccccgcctgtgtcaggtgtggatgaggtcgtcacactcagaaggacaggcttgtctgccagctcacaaggggaggctgcagtgggtttgggagctgggtttaggcccctggtgtctgagggcccaggccttgccagcctctgctgctcctgctcctgggtttgaagatgcaggccgatcgccagctccgtggcagcggtcactaaggacagcctgactgtgccatcttggagcctcaggcggggctccggagatagaagacaggtcgccggaggctccccctcctctcctctcccctctgcagatgctccctgggcgctaccctgcagggtgccaggcaggagtggtctcagaacgtgcgcttctgattattttactggggtccattgtccagatttttctttgattgtaaaatatatttttactttttagtcttctaatttaataaatgatccatataaaaatagagaaataaagtcctttaagggaaggttta

SEQ ID NO: 64183 - DNA, 3236 bp, Homo sapiens
taaggctagtagaggctcgggttaatctggccgaggcccgtggaataaggtcatccactgcacggtgcccccaggcgtggactctttctatctcgagatcttcgatgagagagccttctccatggacgaccgcattgcctggacccacatcaccatcccggagtccctgaggcagggcaaggtggaggacaagtggtacagcctgagcgggaggcagggggacgacaaggagggcatgatcaacctcgtcatgtcctacgcgctgcttccagctgccatggtgatgccaccccagcccgtggtcctgatgccaacagtgtaccagcagggcgttggctatgtgcccatcacagggatgcccgctgtctgtagccccggcatggtgcccgtggccctgcccccggccgccgtgaacgcccagccccgctgtagcgaggaggacctgaaagccatccaggacatgttccccaacatggaccaggaggtgatccgctccgtgctggaagcccagcgagggaacaaggatgccgccatcaactccctgctgcagatgggggaggagccatagagcctctgcctcgatgccgttttgcccccgctctttggacacgccgacccggcgctccccaaggaatgctgtcccaacaagattcccgtgaaagagcacccgtgtcgccccctcccgtggacttctgtgccgccccgtccacacctgttcttgggtgcatgtgggttttcggttcctggcggtccaggacggggcgggggctcccctcccatctcgtgctgggaggtctcagcgcgctctcctgtccctgggacgtgcgtctctccttctcatgccgttctggaaaatgctcttgctgtagagagcagctgcttctgccagggtgttggaggtggtggagcgccttccgattccattcatggcattttgtgatgtgatgtaattggaatagagctgttgatttaaggcacacacaatccctcacactgtgggttttttttagaacttcccagacgaaaactcacgcccttgccctaacgcgctttgctgtgagcctggcccctgcccagggcttgggtctggtgagctgagcagcttcctgtggatggtgtggggccggcctctggcctggctcacctggccactgtccagccagccttgtgacagactccggcctgaaggcagaatgaacccacacctggagtgaggaagggggcctggcacggttggccaggctctgcctgattgccagccagcgggcatctgaagccgggtccttcgcccgccggaggctgccgtccgtctctcctgctgcgctcgtgccagctccgtgggtgtcctcccagggagcttctcttctcaacaggccttgcgaggctggggtgagaggtgatagaggcagcactgtgcatgattccgagagggtgtggtggcactgccagccgactgctgacagcttgggagctgctgtgcccaggacgtgggttcagcgtgggcgaggaaagcctggcgagcgtggccctgtaaaagctttctgaggcgggaggcgctcacttacctctgactgcctgggcgctgcgtgtagcatcttggcctacaggacagattttaggtgacacctggttatgacagtcagaaatttgagaagcttctcacaagtgatgcactttaaataatctgcatgccattgagacacctgcatgtctggtgtttgtggttcaagtgtcttgccgccggccttcggatgtaaacccactgataacggacagaaagagaatgcccacaagtgggtcttctgtggaagatgcagaaggaggaagttagtgcttacattttagtctttttctccctcaaaaaaataggttaagtttcagtgccagctagaaaatactgctttctgccatcgattgggggtggtttttgtcaaatatactgttgataaatatttatttttgtaaacttgaagtgtgtggtggccgtgggggagggacatgctggcagcaggcgccttcttcagctgtgggtcctaaaggcctttgatcctttgaagaagaaagacatggtatttgttcagcagacgccgaccactcagacggaggggcccctgggattccctgtctcagatggcctggtcttacgcctgtgtagatttcttctccattgggaatgaaggtgtcaggcgggactggaacgttctagatggtatgttccgtgatattaacaactctaacccaggacagaccacaagccacactcagaggcctcactgtgctgggggcttcggtgtccaggcgcccaggtgtggccaccagcaccggtttctgccttcgcgttgctggggtgcagtgagactgccacacgcgtgcacatgtggctctgtgggtgtctcctagagaggacgtggcccctgctgccagcccttgagcagcccgtgtgggggcccgagggacccacacagtgggggccagcctcgctggagggagagcaaccctttgccgatgaccacgcttgccgccatctcttagttttctttttcacaagcgctttatttttttaatagacaaatcacattttgcaaggcctttaattaaataagattcttctttccttcattttatgctttatttcctgtttgaaggcttactgtagaagtggcttactgtagaagcagcttgctgagcccctccgagcggtccccagaattagctggttcacaacccccaccctcccccgcccccgcctgtgtcaggtgtggatgaggtcgtcacactcagaaggacaggcttgtctgccagctcacaaggggaggctgcagtgggtttgggagctgggtttaggcccctggtgtctgagggcccaggccttgccagcctctgctgctcctgctcctgggtttgaagatgcaggccgatcgccagctccgtggcagcggtcactaaggacagcctgactgtgccatcttggagcctcaggcggggctccggagatagaagacaggtcgccggaggctccccctcctctcctctcccctctgcagatgctccctgggcgctaccctgcagggtgccaggcaggagtggtctcagaacgtgcgcttctgattattttactggggtccattgtccagatttttctttgattgtaaaatatatttttactttttagtcttctaatttaataaatgatccatataaaaatagagaaataaagtcctttaagggaaggttta

SEQ ID NO: 64184 - DNA, 1148 bp, Homo sapiens
tgcgcagtggggcggtgccgggggcggggcgcggcggctgtcagctgactgtggcggcggcggcctcgaggtgacaactgtctccgtcgcaggctccggcgggggcgcaggaggtcgcccggcgcgtcactgtcgggtcggcgagccacgggggccgccgcagcaccatggcgaccaccgtcagcactcagcgcgggccggtgtacatcggtgagctcccgcaggacttcctccgcatcacgcccacacagcagcagcggcaggtccagctggacgcccaggcggcccagcagctgcagtacggaggcgcagtgggcaccgtgggccgactgaacatcacggtggtacaggcaaagttggccaagaattacggcatgacccgcatggacccctactgccgactgcgcctgggctacgcggtgtacgagacgcccacggcacacaatggcgccaagaatccccgctggaataaggtcatccactgcacggtgcccccaggcgtggactctttctatctcgagatcttcgatgagagagccttctccatggacgaccgcattgcctggacccacatcaccatcccggagtccctgaggcagggcaaggtggaggacaagtggtacagcctgagcgggaggcagggggacgacaaggagggcatgatcaacctcgtcatgtcctacgcgctgcttccagctgccatggtgatgccaccccagcccgtggtcctgatgccaacagtgtaccagcagggcgttggctatgtgcccatcacagggatgcccgctgtctgtagccccggcatggtgcccgtggccctgcccccggccgccgtgaacgcccagccccgctgtagcgaggaggacctgaaagccatccaggacatgttccccaacatggaccaggaggtgatccgctccgtgctggaagcccagcgagggaacaaggatgccgccatcaactccctgctgcagatgggggaggagccatagagcctctgcctcgatgccgttctggaaaatgctcttgctgtagagagcagctgcttctgccagggtgttggaggtggtggagcgccttccgattccattcatggcattttgtgatgtgatgtaattggaatagagctgttgatttaaggcacacac

SEQ ID NO: 64185 - DNA, 481 bp, Homo sapiens
ttctctttttgtcttttcagaacaaactatcctcaccactgtatagctagagacctagctgttctaaattaaaaggtgtcatttaaagaagcagtttttattttcttaatgccctaataatagttgaataataaaaggagtctagatcaaaatgttttataaaaaaattgaagttttacattttttactcaactgttttaccaccagcagttgataatttaattattattttgacacatgtggtttttggcaagtggttaccataaataactttccagttttctaaatttgaatttaaacattatgtataaaaatatatatgtttacatttttattgtttgtatgtctgtgaattgttatctaagagtatggaaaagaagagcatgactagagtgaataatttaaccatttctgtagcttctaatttgcgtatgaattaaaatgtcttatttcttcaagtaaaaaaatgttaagaaaatga

SEQ ID NO: 64186 - DNA, 4183 bp, Homo sapiens
  misc_feature (753)..(753): n is a, c, g, or t
  misc_feature (1720)..(1720): n is a, c, g, or t
  misc_feature (2738)..(2738): n is a, c, g, or t
  misc_feature (2992)..(2992): n is a, c, g, or t
  misc_feature (3624)..(3624): n is a, c, g, or t
tccctgatatgatgtctgcaggtattcatgctcctgtatagttccctcccacactgaatagggttgccctgttgaaacgttggaatattctggaaatgaccatgtgtgacttccaaggcaaggtcataataaaaaacattgcagctcctaccttgtctctcagatcactagttcaggggaagccagctgccatgtcataaggatgctcaagcagtcctacagaaagttccatgtgaccaggagcagaggcctcctgccggcaaccagcactagtggcaggcatgtgagtgcgccatcttgcaagcagctcttccagccccagttgagccttcagatgactgcagccccagctgacatcttaactacaacctcatgacagaccttgagcagaccctctggctaagcttctcccaaatttatgactcccagaaacagtgcaagatgatacatatttattgttgttttaagctgctaagttttgaggaaatttgttacacagtgagaggtactcaatacactgagtcactcccctaacccatagcacaggctgagtccccaaacctgcactagaggcaacaaagagggagaagccctttccatggagctaactgtgcatctggggagaaagagtcatcctaagtccatctggggaccatgagggttggtgtgggatctggtgggggtggtctagggcctagagcaagtagccctggtataggacaccaggaaaacaactcagggcaggatacaggnagtccttgggcagggtcctagagctcctggggggcttggaaacactagggtgattaaaagagaaagcactgcaggtcaaggaagcaacacaatagtctgtgagccctctcagtaatataaccacgacacaactctattactgatactactaaccataatgacaatcagaagagctacctgccctctgaagcatgatgaacaagtacttctgcattgtctcttgcactcttatgtaaaacccagtgtacacgtgcttttattatatccattttacagatgagaaaactgagactctgggatgttaagaaagtggcttgccaaaacccacccagctaataagtgcagggccaggatttgaatctgaatagtctgactccacaggctctatacaagtggcctagaaagcagtgtgggtcctccatggggcctcctgttgcgcaccacagaagccctggctctgaggcccaccttatcccaaccccggagttagttgagtggctggagccatggctgcccagaggcctaaggctgcctcagcacccttctggcctgctcccttcctccttggctccctggctcctgcacctgctggatattctccttttcctaactctgggggcctctcaggctcactgtaggtgctgcaaggcaaggccctttctgtatgcccctgggcctgtccttctgcctgtgacccttaacctgaagcacaaaaggtctgcgtgggaatggaagcagggcatcagctgagggagctgtgtatatggtcagcccaacctggccttgtagtgaggagtttcaaagcttgaagcctccttctttgggagattctgcaaaggtgccaaccccttgcaaaggagccctggcatcagaaccctccccaggggtgtcccagggagtgggggtgccctgggccctgcagcccatactccttgagggcagcaggctatggggcaccctgggcatngctttgggaggcctgcaaaggatttctgtgctgggggcaggagataccccatggcgcggcagagcatccacaaagtccccacccatgacagggtctcctaggttgagagtgggctggggagtgggttgggcagccagggtgccaatgcaaagaggccccaccgaggtatgagacacaagcatcccgggcatgtcctgctgtactccctgtgagacctggggaacagcgccatgcctccctgtgcataaggtggcaggaagaagaatcgaccgtctgaccctagtgattggggaggagggcagggccagcacctcaccccacacaagcacaggaagaggggcggccccaccagccccggctgagctgaccccccgccctgtcagagggaggcactggtcttaaagccacctgcttcctccaccccaccttccatttcccagagaggccagaggcagaggggtgcagaagagagagcagagcccctttgcctgggcacatctgggctcactacatgggaaagggccccaggacaagggaagacgagaagagacaggccaggcccaaggagggagaggacctgagatcgaagataggagagaggaagacaagaaggagaagcagaaatgagaaggttggagaaatccgaagaggcagctagggagagtgggaggtaggcagagggcaggcaggagaaaagaaatgattctttttgaacaggcccgcggctcctccagcacactgactcaaagatgtgggcagctgagcctgcctgctctgtgccgtggctttctcagttagtccaggaccactgggaggggagtggtggacacccagctagcgcctcccccatcaggagcacctacagtctgtgatgactgcccccagcaccctaagtcaatgtttaaccgtggcctgagcccaggaatgttctatctgggacatgcaattacagggggttgggttacagtcccaccactggcaagggcttggtggcaggagataagaaggtggcaccagnaagggttgtgtgtgtgctcaaccgtgggctcccagcacacccccggggccggctcacaaggctccattgttggggtctggctcccagcccatcgccagccagataggagctgctgttttgacaaggcgagaaaagcacaccccaagttcgtacagatcccgtaccccattcttatcaggtggaaggtagggagctagcaaagctaatgttgatttagagaaaaaaaaaaggaagaaatattagcaatcatgggnaaagtcagttccggcagctgaaggcagggttgggagtgtcaagggctggggaagaggccccacggttctggtgctatgctgggtactatggtgcgggagtggaaaccaggcatagccattctgcttcctaggacttgaagtctagttaggacaagaatagttcatttattcacctaaatatgcaggctctgtcgtaggtgctggggggattcaagttgctgaacttctagtggaatgtgcttaaaaatagagagctgtgaacatctgcacttagctggggggacagggcgagtgagacagagggaaggcggggatcactcttgggtagacaggcaaggccctgaaggctgaaggagaaatgcagattattaccaggaggctgggtgtgaatcccagctccttctccaccagcggattctgagagaggaattttgtctgactgagccgcaatctataaaatgaggaagacaggagaaactacttaaggtggttaaatagaggattggaggagagaagtcatgcaggtactgagcacaggtggcccctctggaaatcagtatcacaaatgggtaaatcacaggcagctggtcatccaagctgggagctaaagtgtggtaaacgtgggctagacnccaagctggtgctgtaggctaggattgggctagttagcacagagcagggacggcagctctgggagagaaaggaggccagcctgctgtgagggtagggtcacgtcccctctttccccagcatgaggggccggcacaccacagacatagagggcagctgccatcaccactcaaaaactctgcggcaccagtttaaagtgtgctgtaaaatacagatttggaagaaatgagctgagtagatcactttaaggatgaaaaatccctataaaatgtcagtttgggccggacaaggtggctcacacctataatcccagcactttgggaggccgaggtgagtggatcacctgaggtcaggaattcaagaccagcctggccaacatggcgaaaccctatctctcctaaaaatacaaaaattagccgggcatggtggcaggtgcctgtaatcccaactactcaggaggctgcgacaggaaaattgcttgaactcaggaggcggaagtttctgtaaaccaagattgcactactgcactccagcctgggtgacagagtgagactcagtctc

SEQ ID NO: 64187 - DNA, 3030 bp, Homo sapiens
  misc_feature (753)..(753): n is a, c, g, or t
  misc_feature (1720)..(1720): n is a, c, g, or t
tccctgatatgatgtctgcaggtattcatgctcctgtatagttccctcccacactgaatagggttgccctgttgaaacgttggaatattctggaaatgaccatgtgtgacttccaaggcaaggtcataataaaaaacattgcagctcctaccttgtctctcagatcactagttcaggggaagccagctgccatgtcataaggatgctcaagcagtcctacagaaagttccatgtgaccaggagcagaggcctcctgccggcaaccagcactagtggcaggcatgtgagtgcgccatcttgcaagcagctcttccagccccagttgagccttcagatgactgcagccccagctgacatcttaactacaacctcatgacagaccttgagcagaccctctggctaagcttctcccaaatttatgactcccagaaacagtgcaagatgatacatatttattgttgttttaagctgctaagttttgaggaaatttgttacacagtgagaggtactcaatacactgagtcactcccctaacccatagcacaggctgagtccccaaacctgcactagaggcaacaaagagggagaagccctttccatggagctaactgtgcatctggggagaaagagtcatcctaagtccatctggggaccatgagggttggtgtgggatctggtgggggtggtctagggcctagagcaagtagccctggtataggacaccaggaaaacaactcagggcaggatacaggnagtccttgggcagggtcctagagctcctggggggcttggaaacactagggtgattaaaagagaaagcactgcaggtcaaggaagcaacacaatagtctgtgagccctctcagtaatataaccacgacacaactctattactgatactactaaccataatgacaatcagaagagctacctgccctctgaagcatgatgaacaagtacttctgcattgtctcttgcactcttatgtaaaacccagtgtacacgtgcttttattatatccattttacagatgagaaaactgagactctgggatgttaagaaagtggcttgccaaaacccacccagctaataagtgcagggccaggatttgaatctgaatagtctgactccacaggctctatacaagtggcctagaaagcagtgtgggtcctccatggggcctcctgttgcgcaccacagaagccctggctctgaggcccaccttatcccaaccccggagttagttgagtggctggagccatggctgcccagaggcctaaggctgcctcagcacccttctggcctgctcccttcctccttggctccctggctcctgcacctgctggatattctccttttcctaactctgggggcctctcaggctcactgtaggtgctgcaaggcaaggccctttctgtatgcccctgggcctgtccttctgcctgtgacccttaacctgaagcacaaaaggtctgcgtgggaatggaagcagggcatcagctgagggagctgtgtatatggtcagcccaacctggccttgtagtgaggagtttcaaagcttgaagcctccttctttgggagattctgcaaaggtgccaaccccttgcaaaggagccctggcatcagaaccctccccaggggtgtcccagggagtgggggtgccctgggccctgcagcccatactccttgagggcagcaggctatggggcaccctgggcatngctttgggaggcctgcaaaggatttctgtgctgggggcaggagataccccatggcgcggcagagcatccacaaagtccccacccatgacagggtctcctaggttgagagtgggctggggagtgggttgggcagccagggtgccaatgcaaagaggccccaccgaggtatgagacacaagcatcccgggcatgtcctgctgtactccctgtgagacctggggaacagcgccatgcctccctgtgcataaggtggcaggaagaagaatcgaccgtctgaccctagtgattggggaggagggcagggccagcacctcaccccacacaagcacaggaagaggggcggccccaccagccccggctgagctgaccccccgccctgtcagagggaggcactggtcttaaagccacctgcttcctccaccccaccttccatttcccagagaggccagaggcagaggggtgcagaagagagagcagagcccctttgcctgggcacatctgggctcactacatgggaaagggccccaggacaagggaagacgagaagagacaggccaggcccaaggagggagaggacctgagatcgaagataggagagaggaagacaagaaggagaagcagaaatgagaagttctgggggctgagaagtccaagatcaaggtgctgccaatttggttcctggtgaatgagcaaacagcacagaaaaagaaacagcagtatatgtggaagaaagcaagaaaaatcaactggcctggaacctaagacttgtccaaagatgtcacagagagtaaaatgagaaaaatccagtagcccgtgcccagagcagttcctcgtacccagtgagagatgaatgatgctcttcccaaggaaggcagaggaggcgacagtccatttgcgttctctcctctgcaagtacaggatctcgtttgattctcaaaaccaccctagaggagacaggaggcacctgaggcccagagacgtgaagccacctgtccaaggccatacagcagatgacttattctggaggaagacacctgccatgccgtgaggacattcaagcagttctgtggagagatccatgtggtgagaaacaggggcctcctgtcaacaggaagaacaacctggcaggcctgtcttggattcagagcctccagccccagtcgagccttcagataactgcacccttggctgtcatctcaactgcaatctcacgacagaccctgagctggaactactctgtttaccaatgcctggcccacagaaagactatgagataaaacaagtatattgtttttagaagatatgttttg

SEQ ID NO: 64188 - DNA, 551 bp, Homo sapiens
ggaggcccagtgggagtcccctgggcccctcaggtttccctcttgacgcaagatgggagattgagaggtgctaggcatgttccccaagagctgttgtaatttattttgtcattcattagtaagcccccttgccatagcaaagattcctaggagctgggctcatggcttatgcctgtaatgctaatactttgggagtctgaggcaagaggatcgtttgagcctaggagttcaagaccagcctgggcaacatgatgacttattctggaggaagacacctgccatgccgtgaggacattcaagcagttctgtggagagatccatgtggtgagaaacaggggcctcctgtcaacaggaagaacaacctggcaggcctgtcttggattcagagcctccagccccagtcgagccttcagataactgcacccttggctgtcatctcaactgcaatctcacgacagaccctgagctggaactactctgtttaccaatgcctggcccacagaaagactatgagataaaacaagtatattgtttttagaagatatgttttg

SEQ ID NO: 64189 - DNA, 399 bp, Homo sapiens
acccttgacccatcactgtgtttctgtaggcagaaggctaacaagccctgcacctgaggcccagagacgtgaagccacctgtccaaggccatacagcagatgacttattctggaggaagacacctgccatgccgtgaggacattcaagcagttctgtggagagatccatgtggtgagaaacaggggcctcctgtcaacaggaagaacaacctggcaggcctgtcttggattcagagcctccagccccagtcgagccttcagataactgcacccttggctgtcatctcaactgcaatctcacgacagaccctgagctggaactactctgtttaccaatgcctggcccacagaaagactatgagataaaacaagtatattgtttttagaagatatgttttg

SEQ ID NO: 64190 - DNA, 778 bp, Homo sapiens
cgcggccgcgcgactacggctgcgagaagtccgacaagaaggagaagcagaaatgagaaggttggagaaatccgaagaggcagctagggagagtgggagttctgggggctgagaagtccaagatcaaggtgctgccaatttggttcctggtgaatgagcaaacagcacagaaaaagaaacagcagtatatgtggaagaaagcaagaaaaatcaactggcctggaacctaagacttgtccaaagatgtcacagagagtaaaatgagaaaaatccagtagcccgtgcccagagcagttcctcgtacccagtgagagatgaatgatgctcttcccaaggaaggcagaggaggcgacagtccatttgcgttctctcctctgcaagtacaggatctcgtttgattctcaaaaccaccctagaggagacaggaggcacctgaggcccagagacgtgaagccacctgtccaaggccatacagcagatgacttattctggaggaagacacctgccatgccgtgaggacattcaagcagttctgtggagagatccatgtggtgagaaacaggggcctcctgtcaacaggaagaacaacctggcaggcctgtcttggattcagagcctccagccccagtcgagccttcagataactgcacccttggctgtcatctcaactgcaatctcacgacagaccctgagctggaactactctgtttaccaatgcctggcccacagaaagactatgagataaaacaagtatattgtttttagaagatatgttttg

SEQ ID NO: 64191 - DNA, 224 bp, Homo sapiens
agtagtcgggtgcaggccccaccaacgggggacgtcacggcactgggacggctgggacgcttccgcgttagtctcccatggaggccctgggcggctcgagccagtcttcaggccgaatctcccgcctccaggattgcatccgaggcctggcagccggtgacacttccgaagggcttgaattactcgggcgccagccctgtcgtattaaacgcagtgcttccgct

SEQ ID NO: 64192 - DNA, 365 bp, Homo sapiens
cttcagaatgcagcaaagcatgagagagtattagaaggccgctgagaaagacaaacaagttttagtattacagaagtattcaacaaccaaccattgaaggtgcaagaactgggccatcccatgggtccaccagggctttgacaaggcaggtgctggggcagagcactctggccaggaagcaaaagatgaaggttcccatcttggccccagcctggatctgtgcccagtgatagtcatcagcctggatctgtgcccattgcattgtgtggacataccacgccatgtttctccatcaccttttgaggaaacttctgttgtttccaccttctaaccgtcatcagtaaagctgctgtgaaccttcgcat

SEQ ID NO: 64193 - DNA, 533 bp, Homo sapiens
cactggactgtgtcactgcatggaggctgttgccggaggaggaagtgcaggccccaaggcctatgtgcctggaaaccagctggggctgctgcaggaggagggctgcaggatgctccagctcagacctgactcagggttttagagggcacagggcataaagctgtggacatagacagccctactgcgcaggaagagcataaaccagccagagggcatgcatgggggctgctgttgcattctggtctcctttgaggtagggaaagatgtgtttctttctattttatgggtgagcaaactgaggcagagtggtggagtgatttcccccagcatcgatggcagatttagctccagggcttagattttaggatcctccctctcaaataccatgatgtatcatgggctttttctccacagaaaattagaaactcagaaatggaaaggaacaatgaaacttacccattctcccactgctcacatttccttctggtctttttgtgtgtgcatataaaatatatctcagaaaattgagtttg

SEQ ID NO: 64194 - DNA, 536 bp, Homo sapiens
aggtttattgaaaatgttacaacatttcagaaagattcaaacagctccatgtggtggatagtccaatctgcaggtcactcagcctacagttgggatgaatttcccaaagtccaaaccttcagcatttctccagtatcaagatctacttcagtgatctcctgatccaagcctgagacctcaggagcataattatctctcctttctctcttcttctcctgcaacctgatggaaatacctcttactgggcccctgtgaatctgcttcttcagatgcgtgactcagcctgctatcttgttgcagagcttcttgctggggataatgacagtcttcacccacttgcttgttcatgtggaaatcattaccggggtgcatgtaatacttttctatgatgacccaggctaccttcttcactgttttggtgtgaaggctgcccatcttggcaggtccttggtaaaagaggccaaactctttatacttaaaaatttactttgctcatcttacagccttttacatctaaatatagtttcatcaagtaa

SEQ ID NO: 64195 - DNA, 1491 bp, Homo sapiens
gtgctcagagagagagagactaagacggataacgcgtcatctcgccttcccaaattttcccccctcgctagaccgggtccaaaacctccatccggagccggcaggagaggagaacgatgtttaactcggtcaacctgggcaacttctgctcgccgtcgcgcaaggagaggggcgcagatttcggcgagcgagggagctgcgcctccaacctctatctgcccagttgcacttactacatgcccgagttctccacggtctcctccttcctgccccaggccccctctcgtcagatctcctatccctactcggcccaagtgcccccggtccgggaggtctcctacggcctggagccatccggcaagtggcaccatcggaacagctactcctcctgctatgcggcggccgacgagcttatgcaccgggagtgcctgcctccttccaccgtcaccgagatcctcatgaaaaacgaaggctcctacggcggccaccaccaccccagcgccccgcacgcaacccccgccggcttctactcctcagtcaacaagaacagcgtcctgcctcaagccttcgaccgtttcttcgacaacgcctactgcggtggcggcgacccgcccgccgagcccccctgctccggcaagggcgaggccaagggggagcccgaggcacccccggcctcgggactggcgtcccgggctgaggcgggtgccgaggcggaggctgaggaggagaacacaaatcccagctcgtccggttcagcccactccgtggccaaggagccggccaaaggagccgcccccagtagacgccccccgcacccgcaagaagcgctgcccttattcgaaattccagatccgggaactggagcgagagtttttcttcaacgtgtatatcaacaaagagaagcggctgcagctgtcccggatgctgaacctgacggaccgacaagtgaaaatttggtttcagaacagaaggatgaaagaaaagaaactgagcagagaccggctgcagtatttctcgggaaatcctctgctgtaacctgcagaccgggcccttttgggggcggggggaggggaaaattattttattttatttttattttttattttctaactcgtcttctttccgccggtggaaaactggactgtggccagggctggcccccaccgctgtggccggcactccattccggaacctcctggaccctctatctgactctcgctgtgggacagggaccgggcctggaaagggggtgaagggaagtgtctgatgcacggcgagtgaacaccgttggcgccgaggccaagactttgatttaaaagaaaacacacctcggcgacaatgtcttgctgctcggattaggtgggggaggggcgacagtagtgagcgcctgagccgaacaatcctcgaactaaaagccttcccttgcccatgtgaaaagatccgctaagacagcatgtctgccagcggaaacttctcgagctcccccctcta

SEQ ID NO: 64196 - DNA, 428 bp, Homo sapiens
gatttgatatatttgaatataacagagtatgaaaaagtttattgatatagtttcagattacacactgcaactaatctttaagaaactattacttgtccactttttggtaaaatttcagagaacaatgtccaccattatctgaacaggctattaaaatactcttctcttttccaactacgtgcctgtgcaaagtcagatttttttcatatacttcagccaaaacagcatatcaaaatggattgaatgcagaagtagatctgagaatacagccacttttgttaagccagacaatgagatttgcaaaatgtaaacaatgctgctgttctcagtttttaaaaatatgttttttaaaagtatttatgttaatgtgtacttggtttactactgctatttttaaataaaacaagaaacatttttaaaagtctgtt

SEQ ID NO: 64197 - DNA, 697 bp, Homo sapiens
tataaacttgatgaaatcagaacaggatatgtgtatttaaatgtgtaaggggagatactagaagtactaaaataacacggtaagattggaggggagaaagtggaagtacatatgaaagttatcacaagaaagctcctatgccagtgatttgcctggttgcttttatatctgctttttatgcttgtcctgccctgctctctatcacagaaattgaccccttcaaacattgttttcctctggctacttccattaccaaatatcctctggctacttccattaccaagagctcaacttgccaataccagattccaaaactgagcccacaatatgtctttgttcaaagagaggggaaaggcaaccagctaccctgtggaagattggttactttgtacttctttctcctttgaggtgagggattttccctcatgggttgaatatacacctgttctctgcaggtattttacaggtctttccatcctgcaatgctgccatcactactctactggacttacagaatgcattagaagctgtcagtatcccatatcctcctgttatgtaaatcattggtgttattacaggtctcacatctagaagtatctgtcttatcaaaattcagactatcttactgaaaccagagttacagtgtgggctaggacaacatcctgtgcagttgggtggtgccctgcaagaattatat

SEQ ID NO: 64198 - DNA, 302 bp, Homo sapiens
gaaaataaacgtcaaaagtattaatcaataagcatcgtatttaagctgaaaagtctctatgtatcagtgactaaaacattttgtccttgctgacaaaaacttcctttatggtagactgtattaaggtcactttgatcctcaccgaaactgttaatatacaagaaaaatcacagatacgtgtattcttttgagcaacaacaaaaaacattaaatggagaaatgattaaagttagacagcatcccctttaaaatatgtaggttttaaaaataacattataaagaagttctcagtattgtacact

SEQ ID NO: 64199 - DNA, 1008 bp, Homo sapiens
caagaactctgaggcggatggcatgttcgcgtacgtcttccatgatgagttcgtggcctcgatgattaagatcccttcggacaccttcaccatcatccctgactttgatatctactatgtctatggttttagcagtggcaactttgtctactttttgaccctccaacctgagatggtgtctccaccaggctccaccaccaaggagcaggtgtatacatccaagctcgtgaggctttgcaaggaggacacagccttcaactcctatgtagaggtgcccattggctgtgagcgcagtggggtggagtaccgcctgctgcaggctgcctacctgtccaaagcgggggccgtgcttggcaggacccttggagtccatccagatgatgacctgctcttcaccgtcttctccaagggccagaagcggaaaatgaaatccctggatgagtcggccctgtgcatcttcatcttgaagcagataaatgaccgcattaaggagcggctgcagtcttgttaccggggcgagggcacgctggacctggcctggcttaaggtgaaggacatcccctgcagcagtgcgctcttaaccattgacgataacttctgtggcctggacatgaatgctcccctgggagtgtccgacatggtgcgtggaattcccgtcttcacggaggacagggaccgcatgacgtctgtcatcgcatatgtctacaagaaccactctctggcctttgtgggcaccaaaagtggcaagctgaagaagtccttcggcacaggtccacaagggggaatcacccaggagtggattggagtggagggagacccacctggggcgaacattgcttctcaggaacagatgctgtgtgtgtatcttcagtgctcaagtcacaaagcaatatcagatcagagagtccagcctctgctttgttgcttcctaaatgtacctgggaattcttcctaaaattactctggaaatttgaatccactttaactaaaaataaatattcatagcac

SEQ ID NO: 64200 - DNA, 669 bp, Homo sapiens
agacagggtctcactgtgttgcccaggcttgtctcaaactcctggcctcaagcaatcttcctgtctcaactcctaaagagttaggattacaagcatgagccactgcacccaaccttcttttattttttatgtagggcaagattatggattttcaatagaatttaaatgcagtcttctcccagagtgaaaccttattgtagctttgctttatctgagatgaaaagggacaacaaattcctcccctgtttagttgagggggcccgaataattgtcaagaataatctaaatgaaggaatcttaagtggaagcggtgcacataggatattcattctccctatgggcagatactcaggtatctccagcaagatccatagttatacagctcactttgttttagaacagtggtcataatctactagtacctctgttcctatttgaggcccaattgaggatttccccaaagattcctgataaggataaggtgtatccttttcagagactgtctccctatctctccacctctgaagacttgcagaaagatttctgtttttgagtactcccaaacacaccttcacgcaattacttgtgcgtgtgaattacttgtaaccaaaaatgcatctgttcctacccagccacaaacaaaccatagtcaaagggagggcagcgtga

SEQ ID NO: 64201 - DNA, 336 bp, Homo sapiens
aatacagattttaaaaatcacacctcagtctgaaccaatatagttattttttattttaattaaattctcagctttaatttctgatatagtaatgtcaataaatgtaatccatataaattagaggaattctgagaccaaacagtttaagaattattgccttaaaaaatttctcagtctaaggccagatgtggtggctcacgcctgtaatttgggaagccaaggtgggaggattgcttggatgcaggagttcaagaccagcctgggtacatagtgagactgcctctacaaaatgattttttaaaagttagctgagtgtggtggcatatgcctgtggtc

SEQ ID NO: 64202 - DNA, 2887 bp, Homo sapiens
ctcctctatttgcagttatactttaaagtgtactcccttctctatcctatcatgaggactggacagcctccacagagatggctggacaaagcaagggaatttacttaggtaagacaccatttctctttactctgaaatccctgcaaatgtagttattccagaggagactgtgcaatgactgatgggtttagcatcctacatgaggggaaattgccattcccagctgtaaaatgaacaaatatccagttattttttttagccatcttacagcttagctaatataacaggatttacagccaattatacatgaaagtttaattctgtgtcagataaagcatatctttgatgcagaaatagaggcagcattaggccttacctggttaaaagctttttgctttctattcattcattcgttcattcattcattcaaacctatacttactgaatgctcactaaatgccgggggtttattaagagagatttaaataagatgggatctttgactattacaggtttcagcctaggggtaaattaggggaagacaaccatgtattcaaataaatgtaattaagagtaatggttgtgtgtgtattttacatgcttgtcctgtgtaaataacacgtccacggttgcacctctggggtggaacatctataaaatttagataatgatacccactttgcatggctattgtaatgaatgctcttatacatttgctatttattaaataactataatttctcatctttctgttcccactgcccttaagagtgatttgcatatttaactcaataagcatctactgaaatgagttgatctgttgatgtaagtctgctcaatatggtcttgctctcagaatatgtttcttgcctttttgatgctttagaaggctttcaaggtaagtcaagcagggaacctggtgggtagatgagggaattttcaaacacacaactgtctgatttaggatcctacatggacttggtatatagtgtcacttacttgtaaatcagatttttaaaattggaagcaactctgtgatcatctagtccatctagtctacacccttccttttacaaatgaagaatccaagagccagaagctcccagacatcctgactcaatgtcctatatttgttgtatagcctcctttgtggaagttatgtatgcatttgacttcacttaatctaagacatctattttccttgaactcttgataggtctgctggtttcctcaagggaatccaatctagctggattttaatctctttgaattgtgtcctcagctataaaagttttagctgaggttttaatggctgcacttaagtaaatctaacagatataccagggggtgttccaattacatacaccattaaagggctttatgtgaggatttttaaaaattaccattaaaaaaaaaaaagcatagtccatttgcagtataatttaccagcaggaaagatttcaatgtcctggaaaaattccctataaaaaggaagataggaaaacagaaaagtcacagtactcaacctacttcaagggaagattgggatctttttggctctctgcctctaaacaggtaaaaggctttgtattatttctagcacgagtttttcttctttagattgcatgctattgtatgtctacagggcatttgacagcccaagggctaaatccaggtgtgacggtatctaatgatgtcctgtccttcactgtccttgccatcaccagccacagagatccaggctttggggactcccacagcttatcgaccagtgtttgatttagtttttagcctctttcccatcaaatgaaaattaacttggagacacatttcattagaaaattagaggcccccttggctaggaaggcatctggtctgggactaactactttgaacagtgttgagtcctctctcccacagatggttcagccagcagtaatgctaggaagactgaaggataaatagaaaaatgtcattagtaccatggggtagccatgtaatgtcaagcaattttatattagccagagattcctagtaggagctacttttcttaacagatgactcagttctctttatctcaggaatgaaagagttgaagaccaatccacaacaggggaaatgttaaggcaaaatgatgaacttgataagggatgaattatggggtttggataaccaaacaataaaaataaaagtatagactattttagtactaaaaaggtcctgaacatgtgagcttaagtactcattttgtccccagtggctaagaaactaaaggcaagccagcaagtgtctctgagtttcagtgtctgtatgtaaaaactgactctgacttccatcttctgcagggttagtgatacagatgctagctttttcactaaagaggtcttttagtttatactcaaccttgtctggatctaatttgattgtgcattcatgtgccttagaatgaagccaattcaaaaactcctagctggccttattctactgacttggtgcgtggaaggctgctccagccagcactggtcctatggactgcgccctggaggaaagagagatgccgaaaatttgattgattctttccaagagatagtcaaagaggttggtcaactggcagaaacccaacgcttcgaatgcaccacgcaccagccacgttctcccctccgagacctgaaaggagctctggaaagtctgattgaagaggaaactgggcagaagaagatttaaatccattgggccagaaggaatgaccattactaacatgacttaagtataattctgacattgaaaatttataacccattaaatacctgtaaatggtatgaatttcagaaatccttacaccaagttgcacatattccataataaagtgctgtgttgtgaatgaagt

SEQ ID NO: 64203 - DNA, 2018 bp, Homo sapiens
ctcctctatttgcagttatactttaaagtgtactcccttctctatcctatcatgaggactggacagcctccacagagatggctggacaaagcaagggaatttacttaggtaagacaccatttctctttactctgaaatccctgcaaatgtagttattccagaggagactgtgcaatgactgatgggtttagcatcctacatgaggggaaattgccattcccagctgtaaaatgaacaaatatccagttattttttttagccatcttacagcttagctaatataacaggatttacagccaattatacatgaaagtttaattctgtgtcagataaagcatatctttgatgcagaaatagaggcagcattaggccttacctggttaaaagctttttgctttctattcattcattcgttcattcattcattcaaacctatacttactgaatgctcactaaatgccgggggtttattaagagagatttaaataagatgggatctttgactattacaggtttcagcctaggggtaaattaggggaagacaaccatgtattcaaataaatgtaattaagagtaatggttgtgtgtgtattttacatgcttgtcctgtgtaaataacacgtccacggttgcacctctggggtggaacatctataaaatttagataatgatacccactttgcatggctattgtaatgaatgctcttatacatttgctatttattaaataactataatttctcatctttctgttcccactgcccttaagagtgatttgcatatttaactcaataagcatctactgaaatgagttgatctgttgatgtaagtctgctcaatatggtcttgctctcagaatatgtttcttgcctttttgatgctttagaaggctttcaaggtaagtcaagcagggaacctggtgggtagatgagggaattttcaaacacacaactgtctgatttaggatcctacatggacttggtatatagtgtcacttacttgtaaatcagatttttaaaattggaagcaactctgtgatcatctagtccatctagtctacacccttccttttacaaatgaagaatccaagagccagaagctcccagacatcctgactcaatgtcctatatttgttgtatagcctcctttgtggaagttatgtatgcatttgacttcacttaatctaagacatctattttccttgaactcttgataggtctgctggtttcctcaagggaatccaatctagctggattttaatctctttgaattgtgtcctcagctataaaagttttagctgaggttttaatggctgcacttaagtaaatctaacagatataccagggggtgttccaattacatacaccattaaagggctttatgtgaggatttttaaaaattaccattaaaaaaaaaaaagcatagtccatttgcagtataatttaccagcaggaaagatttcaatgtcctggaaaaattccctataaaaaggaagataggaaaacagaaaagtcacagtactcaacctacttcaagggaagattgggatctttttggctctctgcctctaaacagaatgaagccaattcaaaaactcctagctggccttattctactgacttggtgcgtggaaggctgctccagccagcactggtcctatggactgcgccctggaggaaagagagatgccgaaaatttgattgattctttccaagagatagtcaaagaggttggtcaactggcagaaacccaacgcttcgaatgcaccacgcaccagccacgttctcccctccgagacctgaaaggagctctggaaagtctgattgaagaggaaactgggcagaagaagatttaaatccattgggccagaaggaatgaccattactaacatgacttaagtataattctgacattgaaaatttataacccattaaatacctgtaaatggtatgaatttcagaaatccttacaccaagttgcacatattccataataaagtgctgtgttgtgaatgaagt

SEQ ID NO: 64204 - DNA, 2335 bp, Homo sapiens
gatctgttgatgtaagtctgctcaactcatttcagtagatgcttattgagttaaatatgcaaatcactcttaagggcagtgggaacagaaagatgagaaattatagttatttaataaatagcaaatgtataagagcactcattacaatagccatgcaaagtgggtatcattatctaaattttatagatgttccaccccagaggtgcaaccgtggacgtgtgatttgcatatttaactcaataagcatctactgaaatgagttgatctgttgatgtaagtctgctcaatatggtcttgctctcagaatatgtttcttgcctttttgatgctttagaaggctttcaaggtaagtcaagcagggaacctggtgggtagatgagggaattttcaaacacacaactgtctgatttaggatcctacatggacttggtatatagtgtcacttacttgtaaatcagatttttaaaattggaagcaactctgtgatcatctagtccatctagtctacacccttccttttacaaatgaagaatccaagagccagaagctcccagacatcctgactcaatgtcctatatttgttgtatagcctcctttgtggaagttatgtatgcatttgacttcacttaatctaagacatctattttccttgaactcttgataggtctgctggtttcctcaagggaatccaatctagctggattttaatctctttgaattgtgtcctcagctataaaagttttagctgaggttttaatggctgcacttaagtaaatctaacagatataccagggggtgttccaattacatacaccattaaagggctttatgtgaggatttttaaaaattaccattaaaaaaaaaaaagcatagtccatttgcagtataatttaccagcaggaaagatttcaatgtcctggaaaaattccctataaaaaggaagataggaaaacagaaaagtcacagtactcaacctacttcaagggaagattgggatctttttggctctctgcctctaaacaggtaaaaggctttgtattatttctagcacgagtttttcttctttagattgcatgctattgtatgtctacagggcatttgacagcccaagggctaaatccaggtgtgacggtatctaatgatgtcctgtccttcactgtccttgccatcaccagccacagagatccaggctttggggactcccacagcttatcgaccagtgtttgatttagtttttagcctctttcccatcaaatgaaaattaacttggagacacatttcattagaaaattagaggcccccttggctaggaaggcatctggtctgggactaactactttgaacagtgttgagtcctctctcccacagatggttcagccagcagtaatgctaggaagactgaaggataaatagaaaaatgtcattagtaccatggggtagccatgtaatgtcaagcaattttatattagccagagattcctagtaggagctacttttcttaacagatgactcagttctctttatctcaggaatgaaagagttgaagaccaatccacaacaggggaaatgttaaggcaaaatgatgaacttgataagggatgaattatggggtttggataaccaaacaataaaaataaaagtatagactattttagtactaaaaaggtcctgaacatgtgagcttaagtactcattttgtccccagtggctaagaaactaaaggcaagccagcaagtgtctctgagtttcagtgtctgtatgtaaaaactgactctgacttccatcttctgcagggttagtgatacagatgctagctttttcactaaagaggtcttttagtttatactcaaccttgtctggatctaatttgattgtgcattcatgtgccttagaatgaagccaattcaaaaactcctagctggccttattctactgacttggtgcgtggaaggctgctccagccagcactggtcctatggactgcgccctggaggaaagagagatgccgaaaatttgattgattctttccaagagatagtcaaagaggttggtcaactggcagaaacccaacgcttcgaatgcaccacgcaccagccacgttctcccctccgagacctgaaaggagctctggaaagtctgattgaagaggaaactgggcagaagaagatttaaatccattgggccagaaggaatgaccattactaacatgacttaagtataattctgacattgaaaatttataacccattaaatacctgtaaatggtatgaatttcagaaatccttacaccaagttgcacatattccataataaagtgctgtgttgtgaatgaagt

SEQ ID NO: 64205 - DNA, 678 bp, Homo sapiens
ggcatgagccaccgcacctagcccagatgcactgtgtaaaagtaagatctggggaagatccaggtgataggaaggtttttcagggacatgtcagaatagtaagaggaaactgctgattgagaagaggtgtgtgatgtgatcttgtctgctcgaagatggagagttgacaataaggatatgtcatcagctttcatccagcactgttgtcatttgtgacattttaaagtgtctggaagactcctccgtgtctgagatgggtgctgagaaaacacgtgcgtggtttctgcatctggggagtttacggtcagtaccggttagtgagcttttgtctgcacctggtttagacaataaagaaacatgactaagcccggccattgtcttggctccaggcacctgatggtccttgactcgtcctccaggttccagtcctttcccggctttgccattcctgtaggtcctgtcttcaggcaggtagccagatggctcagcaggtccaagttcacatccaggcagtatccagggaaggaagggagacagccttcccctggagctccttcttgggagtgagcagagtgtggaagcttggaggcctcttcgcagactctccctcacctctgcttagctagagttgtgttggatgctgtatgggaaataggatccctatgattgactgagaca

SEQ ID NO: 64206 - DNA, 2272 bp, Homo sapiens
tcccttaaattcagacaggtgcaggtaactggaggttctgaaccaaaggttaaaatgcaaattctcatacagggttgggaagttgtagccagggataagcttatgtgactgttatatggactgaggagcagatgtgaatttcgaaccatgacatggctgagggtaggggtcgggtggatggatgattcagggttgtaacccatagagcccaaagggaagtgatctgtgacctggggtgagggtgatctggaagatttttggatggctggaaagaaatggggaagtcgagctgcctgagagagccaagttatttcccaaaagattccttaggagtctttctgttcaagacctccgtgtgtgtgtgtgtgtgtttagggttccccagcaatggcccaggcatgtgaaggaaacaagcttcttcagggaatatttgttgaatgagttttcctgactcccaggctagaactgtttttgcaatttccaccctcttttctttcccccagagaactcctattcgtccttcaaaacccatcacggaaacccctcttggagaaaaccctccttccttcccctcaggactttcccagccaccgtctctcctccagtccagcctgatgccatgggactgggggtttctctgtccagctctgtttctcccagactggggtctgaggactctcaggacccccaactttacctagcacaggctgggcacaagtgggtgacagggagtctacgcctagtggaattatgtattggggcagggtcagtgtgagaatacacatccgcatgcatgtctgtccatgtctgtccgtaccaaccttccccttccacacggacctgggcacataggaggtgtctgagcctgacacatgggacagagagtggacatggctgagacacggacagagaaaagacaaggagtccagggggctgaaagccttttgaaatcaggaagttcctgtattggcagaacaaagcccagagaggagcagggctttcctcaacgccacccagcaagtggacacagagcccggccttggatgacacctccagggttctgaaccctggacctcgctttatgcaaggagctggccccacatttccatgaatcggggaaacagcacaagaaggttggcctgtggcagggcaagggttaaaggggtgacattgagggatgcctcagagtcaaagtcccctgaccaagaggaatagagtagaaaacacagagacagagggtgagatcacgccccgatgaggacggagagagacagagatggagagagacatagaggtggaaatatacagagaaagataaatgcagagaccaaggcagggagtgtcgggggaagtaaagagggtgtcctgaagaaagaaggatctgttcactcttaccagtctgtcctcgaatgatttgcataaaatgaggaggtgcctgtccacacccccaattcctctctcaggccccagagcctgagacctcaccatgcccccatcagagatgcaaaaaactaaacacccaactagaaatccttgggacctctctcggctgggatctcagagcctttctgtcccctacccctaccccatgtgctgtcgattttgcagatggggacaacctggggcctcccggaactctgccaccctggggaagttgggggagggccttagtcccggatcacaaccccgtctgctccccagaatcctttcctaagaatcgttgaggaccaaagttgtctttgctgacacgtgttgcttttctctttgccttttattgtttcagagaaaaatcaagttgactgtgtcaagtaacaccccaccccttacccccgtccagccatagtggctctctggagacacaggtcacaggcggagggtcccctgatcatccccaaccacacagccagggggacttgacccctgtccacccctgtctcgtgctccctcagacccccacaaaccggccaagcagtccggggaggcttcccctccacacaactcttagcatgtgattgcagatgtgaaatcaaaacgttgtttgttttttgttttgttttgattctaccccgtcggtccagtgtctgcacagacgccttcatttctctgtaaatatgtgacttggaacaaatgtttaacacaaacgagaagtggtcatgaatgcatggtgttgagatgttttgcactattctgactttttggtctctgtaaaaatattttattaacagcagacattaaaaaaagaaaaaccacacacagccttggacacgtggtt

SEQ ID NO: 64207 - DNA, 1969 bp, Homo sapiens
tcccttaaattcagacaggtgcaggtaactggaggttctgaaccaaaggttaaaatgcaaattctcatacagggttgggaagttgtagccagggataagcttatgtgactgttatatggactgaggagcagatgtgaatttcgaaccatgacatggctgagggtaggggtcgggtggatggatgattcagggttgtaacccatagagcccaaagggaagtgatctgtgacctggggtgagggtgatctggaagatttttggatggctggaaagaaatggggaagtcgagctgcctgagagagccaagttatttcccaaaagattccttaggagtctttctgttcaagacctccgtgtgtgtgtgtgtgtgtttagggttccccagcaatggcccaggcatgtgaaggaaacaagcttcttcagggaatatttgttgaatgagttttcctgactcccaggctagaactgtttttgcaatttccaccctcttttctttcccccagagaactcctattcgtccttcaaaacccatcacggaaacccctcttggagaaaaccctccttccttcccctcaggactttcccagccaccgtctctcctccagtccagcctgatgccatgggactgggggtttctctgtccagctctgtttctcccagactggggtctgaggactctcaggacccccaactttacctagcacaggctgggcacaagtgggtgacagggagtctacgcctagtggaattatgtattggggcagggtcagtgtgagaatacacatccgcatgcatgtctgtccatgtctgtccgtaccaaccttccccttccacacggacctgggcacataggaggtgtctgagcctgacacatgggacagagagtggacatggctgagacacggacagagaaaagacaaggagtccagggggctgaaagccttttgaaatcaggaagttcctgtattggcagaacaaagcccagagaggagcagggctttcctcaacgccacccagcaagtggacacagagcccggccttggatgacacctccagggttctgaaccctggacctcgctttatgcaaggagctggccccacatttccatgaatcggggaaacagcacaagaaggttggcctgtggcagggcaagggttaaaggggtgacattgagggatgcctcagagtcaaagtcccctgaccaagaggaatagagtagaaaacacagagacagagggtgagatcacgccccgatgaggacggagagagacagagatggagagagacatagaggtggaaatatacagagaaagataaatgcagagaccaaggcagggagtgtcgggggaagtaaagaggggccttagtcccggatcacaaccccgtctgctccccagaatcctttcctaagaatcgttgaggaccaaagttgtctttgctgacacgtgttgcttttctctttgccttttattgtttcagagaaaaatcaagttgactgtgtcaagtaacaccccaccccttacccccgtccagccatagtggctctctggagacacaggtcacaggcggagggtcccctgatcatccccaaccacacagccagggggacttgacccctgtccacccctgtctcgtgctccctcagacccccacaaaccggccaagcagtccggggaggcttcccctccacacaactcttagcatgtgattgcagatgtgaaatcaaaacgttgtttgttttttgttttgttttgattctaccccgtcggtccagtgtctgcacagacgccttcatttctctgtaaatatgtgacttggaacaaatgtttaacacaaacgagaagtggtcatgaatgcatggtgttgagatgttttgcactattctgactttttggtctctgtaaaaatattttattaacagcagacattaaaaaaagaaaaaccacacacagccttggacacgtggtt

SEQ ID NO: 64208 - DNA, 1062 bp, Homo sapiens
gagcaatgtctgcagctgcctttacagccttccaaatggattcattgcagtgtcagcagaaggatttgggaagagggaattaatcttgcctgaatggggacccagcattacagtattaataatggagatagaatagcaaacagatgtggggagtaaagagactatgctggaccttaatttatatttttaataagaacctgcagagagtatttagtgcagctagcctgtacctttttgttgacagatttattctggttaaaagaatatcatttcctatgtggcttaaggattcttccagtctacctgctaggtataggcccaaggcccaaaataacatgaagaatgtgattgagcaagcctcatatttcagaaggggcaacctcttaatttgaaataggacctttcttattgtttttttctggtttaatactatcctcttacatgtgtttcatggctacatagtacagcactttgtattcatatgtcatttatgacaagagtgaaacctctatttgggttttcatgtcaccaatcaagcctagtattttccagtattacatcctggcactagaagaatgtggaaggaatgttctcagatatttacccagttctggtctatgttgcagaagtcaaaagtacttctataggctgcgcatggtgcctcatgcctatagtcctagcactttggaggtcaaggcaggaggatcgcttgagcccaggagtttgacaccagcctggggaacatagtgagaccctcccccatctctacagaaaatacagaaattagccagacatggtggtgtgcatcgtagccctagctgcttggggggctgaggtgggaggatcactggagcctgggagtttgaagctgcagtaagccataattgcactactgcgctccagtttgggtaacagagcgagaccctatctcaaaaaataaataaagaaagaaaaataataaaacacgaataggtacctttataattggctttgtactgggatgactggtttctttttgatcctgttaagtttcttgaagaaaaatgtgattttccacacatt

SEQ ID NO: 64209 - DNA, 702 bp, Homo sapiens
cttcccgggtaggggtgacaatgtcatagtgctgtgagcatggtacttctccgtggaacctctgcatttctgccctctgactatatctactcatgccaaggtggtcctcattaacacctgattcctgcttatctagtgcaggaaagtcttgatgagcaggattcccaaatcaggtttttctaagcttgccctggagtttgggctcataggacaggaaggtagcatggttatgactcagaacttgggctgatgcctctgtgtctacttccttttattcccctagcttattatgaaaccttttaaacataaagcaaagttggaaggattttatagtgaacactcatatacccacaacccaggagtttgacaccagcctggggaacatagtgagaccctcccccatctctacagaaaatacagaaattagccagacatggtggtgtgcatcgtagccctagctgcttggggggctgaggtgggaggatcactggagcctgggagtttgaagctgcagtaagccataattgcactactgcgctccagtttgggtaacagagcgagaccctatctcaaaaaataaataaagaaagaaaaataataaaacacgaataggtacctttataattggctttgtactgggatgactggtttctttttgatcctgttaagtttcttgaagaaaaatgtgattttccacacatt

SEQ ID NO: 64210 - DNA, 241 bp, Homo sapiens
ggacataaggctctaatctctatttgtgtgaggttgaggaggatttgagaaggaagtgaaagctcctagcatgtccccattaccagtcccctgcctgtctctcctatctcaactctcatagcaatagagatcagattttaaattttgaccatgcccaattagtttagtttcccaaggtcatcgtgtaatttctaccatagattatctagtcacatctctcctgagatcactttcccatttc

SEQ ID NO: 64211 - DNA, 359 bp, Homo sapiens
tttattgtgaatttaagattccgatgtatacagccctacaacgtataagcaccaattacattccccaaagtgtgtgagactgcgtcttttccccagaatttggaaccaatgctagaaattatcagtcttttagagataattttaagcttatttatcatcaaaggatttcttcatagtcaatttccccttagactataaatccgcaagagatggcaaagctggaagaactgcctagaatttcagcaaacttgaattcaatagtctctctgttctttcctgttttggcacctacccttttcttccagttaagattggacacaatagaaaaataattaataaatgtaataaaaatgtaagcc

SEQ ID NO: 64212 - DNA, 263 bp, Homo sapiens
gtgttcgttatttagaatccatgtcaatgtttccctcctggaaccttggatttaagccagagagcgcttccatctgtggcttccccgccaccgtggactggctttgatggttatttctccagcgcattcccagcgcattcttgtgaggggtgtagtcttcacagtcacatgtggcttgagatcctctcttcgtgtggggcacacaaacgctacaagccatacggcggccagccaagaaaagggagctgttcatggtgaggact

SEQ ID NO: 64213 - DNA, 277 bp, Homo sapiens
gatctaatcaaggtcattttcagcttcatgcagtgcttttctattttttactaacttctgcccatcactttcaacctagaactttaataatttatcctactgtatttttcaggtcatatatacagtggtcattccaacaacatactcttctgtaagacatttcagacatcactgtcagtttttccaacagcttgactttctttgctagtaatgctttccctttttcttatttgttttacccacagggatatctgcaggactttctgacaattccaac

SEQ ID NO: 64214 - DNA, 799 bp, Homo sapiens
aagaccctgtctctgaaaagattaaaaataaacataacaaaaataaaatatgaaggggaacagaactcagtctgaagtttggaccattgctaaattcagagaaaacagcagaatgtcagtgcctatagtaatagaggaatagcaaggtcaagcctttatcctggctcagaggagaagagaacctcctcttgcacccattcattcaacagctatacttaagagcaaggttttctggaaatggcctatgcacagtcactgaaaatcccagccaaggtcacttcatgacttgcaaatcttggcagagtcatcaggaatatgcccaggcatattcatagctccctgcagcctcgacctcctgggttcaagcgatcctcctgccccagcctctcaagtatctgggattacaggtatgagccaccatgcctggcccccaattttttagatgaggaaattattattattatccccagtttacaaagaggaaacaggcatcgaggacttaataatttgttgcaagtcacatatccctggaggtgcagcccaggtgatttcagagtgtgtgatcttaaaacgctaggctaggctgtctccccatttacagaggtatgaacctggactactgtccatgtgttcttcccacagcaacatgccaaggtagaaagaggactggactaggttcaattgatctgggttctaatcctaatgttttctctgtgcatttttgagcaaattaatcactctaggactcaccttccttatttgtaaactaaattcatcactctagaactcactttcctta

SEQ ID NO: 64215 - DNA, 390 bp, Homo sapiens
aataatttttttgaatgtcattaaccaacccggaaactgtgaaaatatcgaaaatcaaaattcaaagtttcagccgccgagaccaagatggtggcgagacttggcactttcctcaagaatgcctgggccagggagccagtgctggttgtgtccttcatcattggtagcctagctgtaattctgcccccactcagcccctacaccaagtacttcatcatgatctacgagaccatgccctacaactacccattgcccgtccgcaatgatgggaacatgaccaatgtgcccggccacccccaggatccccagagctccagcttggagtggctgaagaaactgagcacctccactgacagaggaggcccctcccatcgctcccaatacgaatgt

SEQ ID NO: 64216 - DNA, 384 bp, Homo sapiens
aggaacagccggaaaggcaggagaccccaggttgctgggtgcccaggatggcaagaatgggctccagggaagagcacatagccctgggccactgtgccgagcctgagccaaggactgagatgagaactgtggttgactcagcaacgtggagccattcctacaaaacttgctccagttttgctggtacagggacactgcgagtggcaggggcagcagccacctgggcaggttctgtggagacacacagtgggaagctctgagctcagctcaccacctgcaagctccgacaaccctgccgcagcctcatgatattggtgctgcccttagttgataggaaacagctcagagaagggacactgcttgcttagagtcacacagcaaaaa

SEQ ID NO: 64217 - DNA, 429 bp, Homo sapiens
aatgtttaaaattaaatataaaattaaaaatatggaaatgatctttatataatcagaacactcacaattttgtaccctaaatgaaatttaatgaaaaatttagaattaaaagggatataatttttacatcttgtaaagtgagttcaaaattagttaagcaacctcagcttgaaatgacagcttgaaatgacactatagtagcaaaacttgctgattctactttttatgaatcagtaatgggcgagaagtgttcttgtatgtaagggattactgataattattatcaacagaataaaggcttactctaacaagatctggggaggattatagtttggcttaatacagttatgttcatttcctctgtgcatatgtatttaatggaacttctttagcgtggtcgttagagcattgtctcttctatgatgtggc

SEQ ID NO: 64218 - DNA, 5349 bp, Homo sapiens
  misc_feature (4509)..(4509): n is a, c, g, or t
gagggacctgttggtctcaaaggaggaattcacagggcttctctatcacctgcctgggaatgggtaggagctggaggaggactgccgttgccagagaccacatgagcactgacctctggccctggcagcagcagtagctgctgttgcaatgggtctctgccatgccccagtcctcggggaacatctgcagatcagtggttgtcttggaataggccatgggaaagtcaagagaagccacggctcttgaaaaccatcccagaatcccactggaacgctgtgccagaatacactgagccctaaaggtcttgggttttatgctattttactcatttttattttttggctgcagttttagttggaaattcagaacactaaagttatcccagggcattggttccaagcaagtcacatagctctcctgcagctgataactacgggacctgtgttcaggatccacagcaaatgatgcaaatcagcctagccaccaagaacaaccagtctctaaaagagacccaagtccaaggaagcaaagactgagaccaaaacccaaatcttgtctccactccttaaatcttcctgccatggccaggggaacgtaagttacttgagggcaggcacttgcctcattcatttctgaattcccagtacctggagcagcccctaacacacagtaggtcctcagtaagcatttgactaaagaaatggataggccgggcacggtggctcacgcctgtaatcccagcagtttgggaggccgagggaggtggatcacctgaggtcaggggttcaagaccagcctggccaacatggtgaaaccctgtctctacaaaaacacaaaacaacaacaaaaaaaaagtagctgggcatgatgctgggtgcctgtaatcccagccactagggaggctaaggtgggagaatcacttgaacctgggaagaagaggctgcactgaaccaagatcacaccactcatggcactccagcctggatgacagagcaagaccccatctcaaaaaaaaaaagtagataaactactaggccatacaaaagaatctctaggcagagtgacctcatcccacagcaccgctcatcttagaatgtgataggagaggtgataggaaggcaaaggttagcaaactggcccatagaattctgtttttgtacagtccgtgagctaagaatccttttcacatttttaatggctggaaaaaatgcaaagaaaaataatattttatgacacatgaaatacatgaaattctaattttggtatctataaataaaggtttattggaacacaaccactcccattcacttattggtattttctgtggctgcttttgaagaacagcaacagagctgactagttgcaatagagactgcatcacccacaaagctgaatgtatttgttatctagccatttacagtaagagttttccaacccctggcctaaagaatctccccagttaggtacatgtggtctagatccccagcgttaactgtttggagttaagcattgttctctcagctcttccttttttcatttttatttatttttattttattgcaaattgacaatttgtaattgtatctatttatgggcacaaagtagtgttatgatttattaatacaatgtggagtcattaaatcaagctaattaacatatccatcacctcatggctctttcttttaaatagaagcctttctagggtggtttaaattactcttagtagtataaattttttgacaatttctctccctgaaaaaagggacgtgatcaaggataaggagaaacaagggaagacatatttttaaaagggtaaaggacacaaaaaggggaacttccaccaagaaaaactgggtgcactttataatgttcctaatggccggcactataccagggctttgggaaaggacacaaaacaggaaacttctctgagttcacagaaggaccccttaccttgccctgaaacagccacagccctgcccaggctggctcctccaatctggcctccttcagtacctcatccgtcctgagcagtgtgagcgatgctgtctttggacgtctcacctgcaccatccacagggcaccacacacaactctcctgagcagtggaaatcatggtattgtttatttagatccagacataccaaatgacatccatcccttcctccccgcagaaaacactcatcacagcaatccagtcagcaaacaaaatgactaccacttgccatttctgattccatgcttgcctcgagacagagaactccttgcaagtacaaattctgccttagtgatttttatttccctgcacctaacacaacatctaacttgtggtacgtataatattcaactaaaactagtcctctcctctttttccttttctttccctgtcatgcagctaggagatgcatggaatccaatgctctttccactgaagtggaaagtaggctgctaacaacctccccagaatccttgtaagtaactcctccccaggggagaacacacatctacaacttgagcctggaattcaggtcagcttggtatcaacactcatccagggtctccccatggccagtatggcttttgtcccccttagatatgctggaggaggagtcatctaagtttgtttttcctctctagtcttctgatcagctaggaggatccaaggttccaactgagttctcttgcttcaccttgggcaagaggagaaaaaacagtcacttgtacacctaaccacaaacccctgaccctcttcaaggcagaggaaagtaactttccaaactcttcttgaataagaagaaaagaacctctcctctttcaacaggtatttctggctgctggggagggtgttattaatacaagaatctaaacacaatagcctgtctcctggcagctgccattcccatggcaacctctgactttcacggactcctttggatactaagggcctcagagacagacttctaaaacaaccaaatttttcaaaagtgaattctcagggaacttattcctctgtcagaacagacccctcctaaacttccatttaaagagaaaacctaaaatctgctgttttaaaaaaaaaataacagaaacccccattaagtgctgttatcacaccaaccctcaaagctatggaaatggacaatatagaatttaaatttcacaggtgaaaaaaaaagtgtactaagtgtgagttgaggatgggagatggagatctggtggactaccagcaaatggagatagccatgaagaggcatatttgggaaggtagttcacaaacctgaaccagaagagactcacctggagaacatgttcaaataccgattcccaggccctgtccccagggattctgattctgtaggtctggaatgaaacctggatcacttttgaaagctcttccagtgtccagatgaacattcaaattgggaaaccagcaatctgaagcctattccttgccccttccccaccatggtccaagggtctcctggctcttagctccctcaattcctgccagccctcaattctagaaccagagtaaaagaaactcattttctttaaaataaaaggaagaagtcgcagccctgaagtgcacgtgtgctctgttaggcgctgtacccagggaaccttggagctggaagccgactccagccctgagctgtgggaaggttatgtcatgctcttggcttgctgcctggtttccactggggttgctgcctggtatattttaggtgctgggtttgcaggctagtactctgaccttccttggctctcccccagggagcagccaccaggctcctgctgtatcaagagctacaaggtacaatttccatggcatccaggtaacaggaaccaactggcagcaatagctgggacctgcattagacctggggaggcagcctgctggagaagaaaggttcccggatgtgagcctttgcacgtggtattagcacggctattcacagctgtgggattcggggctagccactgtccttccatgggcctcagtttctcagctatgaaactaggggctcaacaaggggttcagcatagaatagtggaaggaatgtggattctggggccagaagactgaggctcaaatcctagcttcatcactgacttgcttggtgatgttgggcaagtgcctgaacctcgtcgtgcatcagttctgtcatctacaaaatgagtgtaatggtacctctcccacaaggctgatgtgtcaagtaaagatgatgtgtgccaagtgcttggcttacacaccactggagatccaagacacccacacacacacactcacttcttaaccgggaacctgatgaagtgggtgccaaatctggatagagatggtctggagggggtttagaagacggagaagtttctctgtgcatagcacataggaagaaagggaaacatgaatttctgaaggaaacgaagtttgagttaggattttgacaaattgagaaaatatgaataagcaactacaggacaaaaaactgaagaatagaagaaaaaanaatctggaatccggattgggaaatttggattctaatcccagccctttcactgtccagctttgtggtctgctgatatgttgcctctgttgcaggaaaaaaaaacaggttcttttcacactactcggaaaatttaggctcacggacacattgtagggtgagatgcgaggaagggtttattgggtgaaaaaggaaaaaggaaagaggaactctcagcaaagcgagagagtcctgctagcaggcccgcaccttgcagactgaatcccaggccactacataggaactgaagaggccagactcctcctccctgctccacctgcttcctttggtgcgcattattcagacagaaccaatcaggaaagggtggacttcatccaggaccagcagtccggtttttcagccttcaggattgttttaggttttaggtgggttttcgccagggacccttgtctgtctcctgtctctatcacctctttatctatggaatggggctgtggcaaaaattaacaagatgacttaggagaaagcaccttgtatagtgcctggaacacagtagatgtttactggatggatggacggatctatggacagacagaggatggattccagatggagaaagtggggtgggcaaaggaatagaaagaggaatgcccaaggcatctttataggtcagtgggtatatctgcacagttcagcaatttctgaagagtgttcttggaactctagcccctaagatactcctaaggggaaaaaaaaacatattccctggtcaattaaacttaggaatgacagtttgatacaccactctcctgatgatttgcaataaatgtcaacgtataaatg

SEQ ID NO: 64219 - DNA, 2684 bp, Homo sapiens
cagctgctgtctgtcagggccctgggcacagattcagagctgcagaggcacagcctgcctgttgtcggttgtaagtgcccatgtacagagtgagtttaatatttgagcaggccaggaagcacctgtcttaaatttggcaattaggaaagggaatatttctcctcatgtgttccctctctgaacacaataaactgcacaaagactaagcagatcgcttgcctccaaataggaattgtcttcaaagagagtcattttaggatgggggtgaggtcccatcctatgggttctaacacctcctgcaaaagcctctgagcttctcaaggtaagtataagggatatgatagccattcaacaattagtatgtattggcagatcaactgactgactgaatgaatgaacaaatgattgcattaagagctagcgaccctggaaatgattcctgtagaaaaggagaatatgagggtccagcttggaaactgggagggcgttcctggggataaggccatgtctgtgccaaatccttggaattctagcaaactcagcagtgccgtctgtccaagaaaaagagttgagaagtccctggcagacacagagggttttggttagaagatgagggccccatggggagaaggaaggagggtacaagtcatcagatatgagtgagtccccataagactctagctagggaggggccaatgcatgttgcacaggtctcctcaccagtctgtggcttccatgcacattctggggatagcagcacctatttggatttccactgaaaggtagtggctttgaagtgagttggctcaggggaaatttcagctctatccacttacttgggattggaacttggggcaagtttcttaaacttgctgagtgtagtttcttcatctataagatgggtagaaaatctatcttgcaggaagaatcgattatttattaaataggtatttattggtatgaggtcacacattatgttaggtgctgaatatagaaagtaaaaatagacatagctctttcccttaggtgacagacagaaaattaaacactcacgtaaataaatgtaacattatgtctataagacatcctatgagtagaggtacaaggtgtcatacaagcccataatagaggaattttacctagttttggagatcagaaagtgatggtgaaggaaaggacgaggatgaatgtcacagcattcaaggcagacagaacaagcaaaggcagcaccctgtggcacagaagcgaggggtgggtttgtgatataggggtagagggcaggtgccttctcctacccctgctcctgtcagcacaccggtgggtctacctcaccccaaaccatggggatgcccattccaaccttggaggaaggctatacatagcacagttccatgttgaggctgtggaacccgacccctcaggttcaaattctgatttgatcacgtcctgactgcgtgatctcaggagagttagttacatttcctgtctgtgcctcaaacagaaatgataacactagtaactaccttgaggggttgtgatgattgagttaatacatgtaaaacgcttagaacactggcttacctcataagtgctaaaaggagtaggtgttactcctgacattccttccttaactcatggccctcagttataatacttacatggttctcggcatgagccctcttccctccctctgcccagtccaggaagaggctcaacccccgatgttcctcatcaccccatctggaccagtgtgactgcaccagcctgtagcattctctgtccatcccggtccctcacatattcaagacacacatgtaattttacattttccagtagccatattagaaaagtaaaaagaaacaggtgaatttaatactgtactttagtccaatatagccatttatcatttcaacatgtaattaatattaaaaattattacattttacattctgtttttgtactctttccaatccatcatgattttaccctagcagcacacttcaatttggactagccacatttcaagtgcttgacagtcacaggtgactaatggctctcctatgggttatagcccagctcttgactctttgatccacaaggataagaaccacatccacttccacatctccaggtatgaggcagataaatagcagagagtgattacacaaaactcttctcaccacggattccggcatttgtgggcagctgcagaagagtaggtgggaggatctcccagattatgaggccagtttttctgtggctcagagactgccagtgactcgctcaagataaaacagcttgttagtggcagggatggagcccagaaatcctgtttcctgtcctcaggagtgtgtgttcgaaagaagttcttggcaaaggtgagaataaatcataggctctttgaagaggactccagtgtattaaacaaataggttgctgagatgcagttaactactcagtaatgtagttgaagaaaattaatttttcattctgccactcagaatatcgaggctggccatctgtaaacacagcctgtctctaggagaacagaggtggaatcctccttgcaagtttaaaaaaataacagagtaatctcagtggatgtcttaagagaaacataattataatttagttgacatatctcatatctcagtgatggtaaataaaccttccctaaataattc

SEQ ID NO: 64220 - DNA, 633 bp, Homo sapiens
gtgggctggaattagcatcaggatctgacgtgtgagaccagtctttgtgaagcccttgtctgggagctgaagaatagaacatgatgttagactaggtgtgctaggatgagtgtgtgacctctgttagatctcgctacgactaattggaagggtgaggcgggaggatcgcttgaacctgggaggcggaggttccagagagccaagatcgcaccactgcactccagcctgggcgacagaacgagaccctgtctccaaaggaaaaacaaaaaagaagaataaaataatttggatgaaaatcatgtttatttaaatagtaatgtcatgagactattaaagatgtgccagagtttcaatgaaaatcattaaagtaggacagctaagaaattaatattaatatcaaaattattgataatcttaaattattgattattccttaacgcactccattctccttttacattttatcatgtttcttttgaatatatgaattggcaaaggacttgatgaaactgagtactaagatttggtacagagtatgtcaggaagacaactcagattgccattttaaataaagttgtacatgaacaataaaaaaagaagagcaaaggaaaaaagagaaaacaaagaaagagg

SEQ ID NO: 64221 - DNA, 1498 bp, Homo sapiens
gactgtacatacctctctagtatgttctgtgactctgctcattacaatcctgtgctctacattgatccttgtagcagttttcaaatatggccatttttccctataagttttatgtagttaaatgcttcctagaaacctaaataagatctattaatttctgacgagaggtgttcttctagaattaattacttttatcttttgtcttcatttgtggccaaaattatgtttactagaggaaatttgggatcattctcagctaattccaaaatgtagtgctctattgcatggatccttggtaatcctcaagcatcagatgccataaggggaaacttaattctgctaaattaatgtttattttgtgagaagtgactttatcttcatttggggtagaaaaattatttctttatgtagtagagacaaattattctcattttgcaagtactttcaatttaagctacaaattgagaaaaccgttataaataagaataaaataggccaggcacagtggctcacacctgtaatcccagcactttgggaggccgaggtgggcggatcaccagaggtcaagagtttgagaccagcttggtgaaaccctgtctctactaaaaatacaaaagttagctggggctggtggtgggcatctgtagtcccagctaattggaagggtgaggcgggaggatcgcttgaacctgggaggcggaggttccagagagccaagatcgcaccactgcactccagcctgggcgacagaacgagaccctgtctccaaaggaaaaacaaaaaagaagaataaaataatttggatgaaaatcatgtttatttaaatagtaatgtcatgagactattaaagatgtgccagagtttcaatgaaaatcattaaagtaggacagctaagaaattaatattaatatcaaaattattgataatcttaaattattgattattccttaacgcactccattctccttttacattttatcatgtttcttttgaatatatgaattggcaaaggacttgatgaaactgagtactaagatttggtacagagtatgtcaggaagacaactcagattgccattttaaataaagttgtacatgaacaataattggaatcatcaggtaatttttttaaacaaaggttcttcatttactgttatgattggaaaaaaattagaaaataaagtaagtgccataggctaattaaaaaataaaaccttggccgggcgcggtggcttacgcctataatcccagcactttgggaggccgagacgggcagatcacgaggtcaggagattgagaccatcctggctaacacggtgaaaccccatctctactaaaaatacaaaaaaatgagccgggtatggtggtgcatacctgtagtcccagctactcgggaggctgaggcaggagaatggcatgaacccggaaggcagagcttgcagtgagccgagatcacgccactgcactccagcctgggcgacagagtgagactctgtctc

SEQ ID NO: 64222 - DNA, 504 bp, Homo sapiens
cagtgtcagcaggcggtgggttagggccgcagcccagaccaggccgccgacaccaataagctacaaggaggagctttaccgctgcctgtactactactgcctgcgctacttcccagcctgcggcgtagggcgcagcaagggcctgacgcttagcgagcaggcgctgcgcaccaagcggctgtcgcctggagggcacgttcaggcagaagctcctcagtggccacaagtccgctagctccggctacagcccttgccgcacactcgcgtcacctgagcctgtgatgccgaaggacctgttcaaagtattttctgtaactccaactgtaacttggttctaggaggagagaatccatgtttggtcaacagaacttttcgccgccacttaagtttactgcttcaatatcttttccttactaattgattgttaattaagtagtgtccaagtgagttagcctttttagggttgattaattaaaagagcagcaagaatggcattttaactct

SEQ ID NO: 64223 - DNA, 415 bp, Homo sapiens
cgttgcaacaacatcaaagcctttggaactttgtagggggtacgaggggctaggaaaccaagaaaacatctttttaaaaatataagcgatcgggccgggcgcggtggctcacgcctgtaatcccagcactttgggaggccgagacaggtggatcacgaggtcgggaattcaagaccatcctggccagcatggatgccgaaggacctgttcaaagtattttctgtaactccaactgtaacttggttctaggaggagagaatccatgtttggtcaacagaacttttcgccgccacttaagtttactgcttcaatatcttttccttactaattgattgttaattaagtagtgtccaagtgagttagcctttttagggttgattaattaaaagagcagcaagaatggcattttaactct

SEQ ID NO: 64224 - DNA, 918 bp, Homo sapiens
tttttatattcatttttcttttgctctcataaggccataaagtatattttttcatatgaccagagaattgtccaacttgctttcactgtaattttgctgcatccaatttataaattcttttggaaagaagattatttctttatctatttacaagggattgaaaaccacagaacactaaattttctgtgcagagacatagggaaatgaaaaaccccacacagaggtctcctgccatttccttctgagtgtaaactaagatgtgattttgctttttctatttcagttatctcagggatctccagaaccgattgagcccaactttttcacagcagattaccatttattacatcgttcatccggtggaaacagcctgtccccaaatgaccctacaggtttaccaaccagcattgaattggaggaaggaataacatatgaacagatgcagactgtgattgaagaagtccttgaggaaagtggctattacaattttacatctaacaggtatcattcctatccatgggggaccaagaatcacccaaccaaaagatgaaaatgctgcattttgagtggacttgattttctcagtgaagttcaagttctggacttcagccgctattgcaagatgcccaaggattgggtgctgctagagggtgtggaaaagaccaagatgccatggggcctgcaggacttctttctgggggtcctgtgctggagtatatgacagctgcggtacttgagggcttcattgccagaacacattatatacaggatgtcagagctaccagtgtgctgctgggagaaaatgctgcaaaattcatcttttggagggtggggggaaaacccaaaaacaacaacaaaaaaactctcttacagaattttccttaacattaaaaaaaacttgtcatatttttcaaaggc

SEQ ID NO: 64225 - DNA, 150 bp, Homo sapiens
gttagtgggtgcagcacaccagcatggcacatgtatacatatgtaactaacctgcacattgtgcacatgtaccctaaaacttaaaagtatataaaaaaaaaaggggggggtatacacacaatcaggtgtcaagcagtggcacctcgtgca

SEQ ID NO: 64226 - DNA, 258 bp, Homo sapiens
ggtcttgaactcctgacctcgtgatccacccgcctcggcctcccaaagtgctgggattacaggcgtgagccaccatgcctggcctcttaagatactctggagaggaaaaaaaaacaaaacagaaaatgactcttaactaaaagctaccatcatcaaatccttgaaattcacagaaaaaagctagaaaatcacaatttaaaaaatgcagttgaggcaagtaatattcacagagaaaattatacttgtgctctgaggcta

SEQ ID NO: 64227 - DNA, 328 bp, Homo sapiens
caagggtatatgagtagctgcgctctctactagaacctccaagcaagcgctcaggaattggcaacacggagaagcttcttgagctcagtgtgattatggcagaaactctgaagctaaagaaacttcccatgttgctgtggtcacagctcaaggggacatgaagaaacctttaaggatggaggtgtgtctactgtcttcatcctggtgatgctttcataggtatggacacaatatcaaaatgtattcaattgtacaccctagaaatgtgcactttattgtgtatatattatacctaaataaagctgttttttaaaaaacaaaaacctaa

SEQ ID NO: 64228 - DNA, 416 bp, Homo sapiens
tgattatttattggcatcaagaacttgtgagataaatagttgtgtttcctgttagtagaaaattaatgcacaccctctgtggaaaacagcaaggtggctccttaaaaagttaagtacagaattccatatgacttggcaattctactcctaggtatctacccaagagagaaatgaaaacatatgtccaccccaaaacttgaacacatatgttcatagtagcatgattcacaacatccaaaaggtgaatgggtaaacaaaaaaaaatccatacagtgaaatgaattcagccctaatgaccaacctggacaacatagcaagaccccatctctacaaaaataaaaataaaaattagctgggcatggtggtgcgtgcctgcagttccagctactcgggaggctgaggcaggaggagaatca

SEQ ID NO: 64229 - DNA, 391 bp, Homo sapiens
tctgagtcatgctgcactgcagtcctcacattcacatgtgctcctgagcctgggctcccatgcttgatggccaagcctctttgagcatcagcgcttgcacctgcctgggatgctcttcgccctgctgccatctgtaccatcccctttgcccagttgccccctacatatcattcaggttctagcctaaagggctcatctctggctgatgtttctagacagggctgggcagcctggctccctgctttctattttttagcattcttttattattattattattttttgagatggagtctcactcttcacccaggctgggttgcaatgagccgagattgcgccactatactccagcctgggcgacagagcgagatttcgtctcaaaaaaaaaaac

SEQ ID NO: 64230 - DNA, 433 bp, Homo sapiens
catcctgttgcaccagagaagagcatggaggagtcaataaaatctgagaagagtctctcacccctcctcaatgcctcccctctggccagatgagattgctggggttcagagacgtcaagcagcttgcctgagagaagccacgcagctaatgagcagcagagcccgattcacacccagacatctggccccagggcatgtgtttcttgccactcactgcctcatgccttctctttgtactgccatcgtttgtcacccaactgcctctgcacctcggccacgccacccttgaggatgggggctggtacctcctttatcttgtatccacaggaccccacagagtgccttccccagagcggtttctgctaaattctgtttaacagagtgtattcattctgtttgctgaatgaataaacaaccacatgaatgcataagt

SEQ ID NO: 64231 - DNA, 311 bp, Homo sapiens
ttagtcatcgcaattccaaaacggccctgttttgattctacagttgcttccccattccattatcgtgtcggccaatgcctgtctattctcagaccttttaagttttggggtgatggtggcattctccttagctttttttccccccaagtgtgctctataggaaataaaatgttcaaagactacaggtgattaaacaggggaaccaataatgagtatgtgatggattttttattagtcataataattatttactacatatggagaaaggggaccaggcacttggacttggaagcatttagaacagtgcctgg

SEQ ID NO: 64232 - DNA, 326 bp, Homo sapiens
cagaaagtgaaaaaacaacccacagaatggatggaagcaaatatttgcaaatcatatatctgataagggtttagtatccagactatataaagaactcttacaactaaacaataaaagacaaataacaatttgttattaaaactattaaaaatgggtaaaggatttgaatacatatttctccaaagaagatacacaaatggtaagtaatcacatgaaagacattaaacaggcctggcatggtggctcacgcctgtaatcccaagaggcaggtggatcaccaggagatagagaccatcgtggctaacatggcaaaaccccgtgtctac

SEQ ID NO: 64233 - DNA, 466 bp, Homo sapiens
  misc_feature (459)..(459): n is a, c, g, or t
tgcatgcctgtaatcccagctacttgggaggctgaagcaggagaattgcttgaacccgggaggcagaggttgcagtgagccaagatcacgccattgcactccagcctgggcaacaagagcaaaactctgtctcaaaaaaaaaaaaaaatgatggagctccgaatgtgcttaagtggaaagatatctatgaaatatggtggttttttaaaacacaaaaattatagaatatgggatcccgtgtgtgtgtgtgtgtgtgtgtgtgtgtgtgtgtgtgtgtgtgtgtgtgtgtgtgtgtgtttgaatgaaaaatgcttatgtattgacagaacacttctagaatgatacccaaactcctggagtgggagtggggaatgccttctacgtacacactgttctactgtttgaattttttaatatgagcccaaattgtataatctttttttaataaaggggagaaanatcactt

SEQ ID NO: 64234 - DNA, 541 bp, Homo sapiens
atccatgctcaaggccacttgaagctgctccagaaattcaggcttggacagcacaaccttagagcacccgttccctggattggagccaaacagtctggacatctcacaagagacctgcagagatgtaaggacacactcacctcctgtgttggggaaggagtgactcagctggctggaacacagtggccaagagggtcagataatcttgctttatttcctaacccggaccggcctttgttccaggacagggatcctggtcatagatccaaaaacaataatcacaaatccatcccacatccaggaaagggaccagatgcatattctgctgatagtggccaagaacgtggctggtctgtgtgtctaacgggcagtgcatggtgactgcactgcatcaaccttaatgggatcttctggaagaaatgtcggtgtggggaattgtagaagattggtctttgtttccttctctgatcaatagtctcctccaaccccactcccagcacatacacatgaaagaaaataaagaaaaagaaaaaacatgcta

SEQ ID NO: 64235 - DNA, 956 bp, Homo sapiens
cattttacttctctaaactgtaaatctaggataaccatacctgtattgaagcatttttatgagaatgaaaaaataaaatgtaaaaataaaggcagtgggtgtgaaagtgttatataaatttcaaaatgcaatgtaacttacttttcagaaagttaagtaggattttagcatatccaaccatctttccagggtgattaaaacttgaagactgaattcatgggccagatacagttggggacagagattagcctatttgcaatggaacttttgaggtccttagaatggtcgtacatttttaaaatctttatattctccccagtgaggctcagtgacagaaaacaccaacatttacccaaacaactgccccgttcccctggtccttagtgagtcccttgagaaactgcattattgggataagatggaattaagataaaaactgagcagtaccaataaaaaatatgactttaaaagggcatgaaagcaaccgttatttagtatctgttattgctgagtacaatgtaatatagaacttgaacttgaattcaaacttacactcctccaaaacctgtattattttctccaggccctgccactagccagtgagggaaatagatgaaatagatctgactctaccttgaaggtctgcagcaggggtcagcaaacttctagccctcaggtcaatagcctgccgcctgtttttgtatggcccatgagctaagaatgatttgtacgtttttcaatgttttaaaaaattgaaaggagtataatgtttcataacacatggaaattatgtgcagctcaaatttcagtatccataaataaagttttattggaacacagctacgctcactcattagatattgtctatggctgtttttgtgcaaaatggcagagttgggttcagagttagcaacagagagcttgtagcctgcaagcctagagtatttactatctgg

SEQ ID NO: 64236 - DNA, 6431 bp, Homo sapiens
agcgggggtacaggaaagaagccagtgccccaggtcacctaagacaggcatcaagctcattcggcaaaatccagttgggttgttctaactggctcattcttacttgggtgacctctgcatggcaggagtaacttctgtgcctttgttttcatgttcagcgccatggatattgcaccctgggggaagctttcaacagactggacttctcaactgccattctggattccagaagatttaactacgtggtccggctgttggagctgatagcaaagtcacagctcacatccctgagtggcatcgcccaaaagaacttcatgaatattttggaaaaagtggtactgaaagtccttgaagaccagcaaaacattagactaataagggaactactccagaccctctacacatccttatgtacactggtccaaagagtcggcaagtctgtgctggtcgggaacattaacatgtgggtgtatcggatggagacgattctccactggcagcagcagctgaacaacattcagatcaccaggcctgccttcaaaggcctcaccttcactgacctgcctttgtgcctacaactgaacatcatgcagaggctgagcgacgggcgggacctggtcagcctgggccaggctgcccccgacctgcacgtgctcagcgaagaccggctgctgtggaagaaactctgccagtaccacttctccgagcggcagatccgcaaacgattaattctgtcagacaaagggcagctggattggaagaagatgtatttcaaacttgtccgatgttacccaaggaaagagcagtatggagatacccttcagctctgcaaacactgtcacatcctttcctggaagggcactgaccatccgtgcactgccaataacccagagagctgctccgtttcactttcaccccaggactttatcaacttgttcaagttctgaatcccagcacatgacaacacttcagaagggtccccctgctgactggagagctgggaatatggcatttggacacttcatttgtaaatagtgtacattttaaacattggctcgaaacttcagagataagtcatggagaggacattggaggggagaaatgcagttgctgactgggaatttaagaatgtgaacttctcactagaattggtatggaaaagcaaaatactgtaaataaactttttttctaacaatttgccagcaagactataagggcaataattctatttcagcggtgaaaatggagtcctcttaatggtcacagaaactctcttatagttccctaggaagaaaaaggcaaaactcaaatacaaaataggacgctttgtttacaatgtgaaaatttgtttagaaaagaaaaaatgaagaaggaaaactatataggagaaattcctgggctttggggtttgatctggtgtttgttttgagaaggcgaaggaagcgccacccatcctaaacctgcatgggcacagagccttaccctacagagataccacacaatggtctacctctaaaagcgtagagtgccctctctgacaacgcatgtgatccagtaggcagtgtctgtttttctcgtaagtgttttcatcactataaaaagtgatttaaaatggaaagggatattggaggcaatcctctggtttcacacttccttttcaggcaaacagggccctccttagagttatctgttcaccagaacaacccaaaagcacatgttccttttttcctgtcatgttgtagctcatttgggggaaaagaaggccaacttaaaacagtcccaggggaggactgcttgagcccaggagtctgaggtttgcagtgagctatgattgtgccactgcgctccagcctgtctccaaaacaaaacaaaacaaaacaaaagccgtcccagaggaagtcctgctgcagaaaagatgatagaattggtcacccaatcaatagctgtgaagacttccttattcctgctgaacttccttccttggatatcttcatggataagcctgtgtctgtggacagagtggggcccaagtgctgaggctcgaaagacaggttttacaatcagccaattaaacatcttaccagttgctgtaccccttgccaaggggatgagctgaggagcttcttttctttaggtccaacatcaaaatgagtccatctaagctagggctttttgcaaaggtgattaaaaatcaaggctggagttccagccaaatagggaggagaggtaccacaagttcatcttaaacttgcttccgggctgggtagttaaaacaggaagatcccaaggggatcttacgaggcaaatatcagcaggtaactgtggaagaaaggaaatctcaggacctaatgagttcgttgtaaaatattcctgggagtagatgggggatctactcccagttttttactttttacagaatattgttgctttcctacaacaatgtacatatatttgcagttgtatatgctttttttttttccaaataaacttgtcaccctgcatgcccttggcaaataagtgaagcagaaataggaacacagtccacattcaagttgaggaacagtgtatctttaagagctgacctttgggtgacctggaaagggggaaagatggctaagcatggagagaaacgaggcaagagacaagctatgatacaacaccgcttcagcccctgccctcaatagcacacaacccacatatcagctttctgaagagaaggaacctactgtttagtgctcctcactttgcaatgtttgtgctacgccagaatttctccagtttttttcattatcatccccctgagaaaaaaattacattgaatttaaattttccctaataagagaaattaaatatgaaagaataggattttgttgggtaagattgagctttggaaggtcacgaaccattattctatctaaggtgtgtgttttgttttgtttttttttgttttttttttgcaatccctctccccctgaaccaatttcacattgggaatgcaggacctagactgctgaataaaaagctacttcttctataattgtcaggttctctccaatttctcagcttcctcaaagacatggggtggagttgggtgtgccatcactgagagagctctggaacttttgactcttagtgacatttttagatttaggggttcatggccttccacatgttgccaccaactggtgatctctgccccttcatgctgatcaagaaagtagaaactcctcgtcgccttcaggtttgcagtcgcagaaacattgcctgctgtggactgtcagcacaaaactgggacactggtgtcatttagactgtcagcagtgcacatgattgtacgatagactccaggcaaccatgtgcatctgtgcaagatgacctctgccccaagagaagggttacggtctaattaaatgtttaccaagatggtaccagtgggctctccccgtgtcctttggtgttattggagctggtgtatgacagactcaaggaaattttttaaggaaaatgaagaagaaatcaacctttatggttctctttcattggaagaggagaataaggaaagaaatggcaggtagagagggagggggaaaggaatagaaatggcatgtctttgatgctgtggcttgtgtggggacaatgggaagagcacagcaggcacaacatatctgtgttagtgccacgtggtatctgttaagtatggccagagcctcacatataagtgaagagagttaagacaattcttgctctttgaacaataatagtctatagaatttctattggcaaaccatcccagacaacctgacctatcaaacaaaagcaaataatccctgtctcagaactgctggtctaaaagctagaaggggcatgataatggaaattgctagaaaagagagaatgctctactctctttcctgtgcctacctacccccatcctaaaccctgtaaaacagaatttcaaaatagatgtcaaatatgaagtaattcagacttccaaagaaggaaagagttctgcccagggcagtatgagcaaatccacagggatgttaagatttggtccaactcaaaggtttatgggcagtgagcctagagtctcttgagagtaaacccttgcatttgggacaaggagaatatgtgaagttcaggagtgctcacactagagcaagatccagaaaaaaaaaaatccaatggcattttaaactagattgcattatcactcaatgctgttactttgagcagacaaatcagttgaatgggagggcaaatggcagaaatgaacaaaagctattaggtgaaagcatccccaatgtatcagttgtgagatgatttttgtttaatgatgatcaggtttacattgaagtggcttggaagacgtatttcagagggactgggtttgtactgcaaaactctgaacactagagcaggttctactagcacttgggcagtaaggtagcgggtgtgtattatgctattgccatagttctcgtctttgtggattcacataccctttcccatgaggagcttgctactaacagcctcctgtttctgttgtttttatatgggagaagagaaagagcttggaatttcaattgtctaaacaattggtatgatttacaagaaggcaaaccattcaggagatgttcaacagtgtatcattcttagcattcaatacaatgtttattataaaatatacacctgagtttatgtttttctgccaggctgaagggcaataatgtcttgctatgcaaacactctattttatgtgtgaatttttttaactgtaattttatgtgtgaatttttttaactaaactctatcatcattttctatgttgacatcttttttttttttttaatctgtttccaactctgagtctgtgaactatctcttctgactggatgctggcctaaaatcctattagtgcttaaacagacctcaaaacactctgaacctgtaggccaatacagagatgttgttctttgatatatcttgggtccttgatggcttcaacaaacaaggtcataatttgtttaaattcagtgttttctgtagataccttcttctcagtttcattaagaagagtaaccatctttggttttccaaagaatggaaactcctaccctagactttagacttagagcgtctgcctttcacgatgagtaagagatccagaatgtttaggggatgtgcgtcagcccacctggtacagtggcaaagctgaatgcgaacttgaggcctcctgaggcctgaccttctatgcccccagccctccaccccaagcaccttttggtgtggctggaaacacatgacattggatgtgatttttctcaagcccttcactgtggaaggcatgggagactgcccagcattgggcatgtggctgttaacgtttccatttcaagtccctgattcttactggagaagttaaggagccacttaatgttttcacagacctctgattctgttgtgaatgtggcattccagtgagtacaacctgcttgctataaagaaagcagcatattttgacaattttatttcttccttgggtacttacatttttattacaaaaatggccgttataaaaaaagacagaagggctgggcagtggcttgctccctagaaactgagattccgaagcaggtgtttcctctcccctagactcagaggtacatttaatccatcttctccatttcctccttcaggaccagctatgagattcagtgcatttctagcccagcggatgttcattctccactaaacttcatcttttactaagcaaagggggattattccatgaggcagccaggagcaaggggccatgatattcatgactttgtctgctgggcatttttcaaagtgtccttgaattcactcagcaaacaaagctttctggagaatctctcaaaacttaggccctgctccatttggccaaaaatgatggctgctccaaaactctgaacttcttaaaactccatctgctacattatttctggagtttaaacatgactttttctgtctttgagtatagatgtgtttgtttaattaacgaagcacaagtctgttaagcagaaggctccaagctgtattctatacttgggaatccttggtgccatctttattctaccaagtgccaatcaccatggctaaagtgggcgtatattacagcctgtgtcctaagcttagaagctttaatgtacttttttaaatgaaaagtattagagggggttgaacattgtaactaaagcataaagttagaccaattacatgcagagatgtttatttaatattgtgtgagctgagtccttctgtataaattatttgcacacttttcttgcatgatgaactgattttttatagttgtttgtaccagacggtggcatatttttgtaaaaaacttttgacactgaattgcaataaatgtttttccaacaaca

SEQ ID NO: 64237 - DNA, 6729 bp, Homo sapiens
tgcaacgcttgagatcctctccgcgcccgccaccccgcagggtgccccgcgccgttcccgccgccccgccgcccccgtcgcgggcccctgcaccccgagcatccgccccgggtggcacgtccccgagcccaccaggccggccccgtctccccatccgtctagtccgctcgcggtgccatgccattcctcgggcaggactggcggtcccccgggcagaactgggtgaagacggccgacggctggaagcgcttcctggatgagaagagcggcagtttcgtgagcgacctcagcagttactgcaacaaggaggtatacaataaggagaatcttttcaacagcctgaactatgatgttgcagccaagaagagaaagaaggacatgctgaatagcaaaaccaaaactcagtatttccaccaagaaaaatggatctatgttcacaaaggaagtactaaagagcgccatggatattgcaccctgggggaagctttcaacagactggacttctcaactgccattctggattccagaagatttaactacgtggtccggctgttggagctgatagcaaagtcacagctcacatccctgagtggcatcgcccaaaagaacttcatgaatattttggaaaaagtggtactgaaagtccttgaagaccagcaaaacattagactaataagggaactactccagaccctctacacatccttatgtacactggtccaaagagtcggcaagtctgtgctggtcgggaacattaacatgtgggtgtatcggatggagacgattctccactggcagcagcagctgaacaacattcagatcaccaggcctgccttcaaaggcctcaccttcactgacctgcctttgtgcctacaactgaacatcatgcagaggctgagcgacgggcgggacctggtcagcctgggccaggctgcccccgacctgcacgtgctcagcgaagaccggctgctgtggaagaaactctgccagtaccacttctccgagcggcagatccgcaaacgattaattctgtcagacaaagggcagctggattggaagaagatgtatttcaaacttgtccgatgttacccaaggaaagagcagtatggagatacccttcagctctgcaaacactgtcacatcctttcctggaagggcactgaccatccgtgcactgccaataacccagagagctgctccgtttcactttcaccccaggactttatcaacttgttcaagttctgaatcccagcacatgacaacacttcagaagggtccccctgctgactggagagctgggaatatggcatttggacacttcatttgtaaatagtgtacattttaaacattggctcgaaacttcagagataagtcatggagaggacattggaggggagaaatgcagttgctgactgggaatttaagaatgtgaacttctcactagaattggtatggaaaagcaaaatactgtaaataaactttttttctaacaatttgccagcaagactataagggcaataattctatttcagcggtgaaaatggagtcctcttaatggtcacagaaactctcttatagttccctaggaagaaaaaggcaaaactcaaatacaaaataggacgctttgtttacaatgtgaaaatttgtttagaaaagaaaaaatgaagaaggaaaactatataggagaaattcctgggctttggggtttgatctggtgtttgttttgagaaggcgaaggaagcgccacccatcctaaacctgcatgggcacagagccttaccctacagagataccacacaatggtctacctctaaaagcgtagagtgccctctctgacaacgcatgtgatccagtaggcagtgtctgtttttctcgtaagtgttttcatcactataaaaagtgatttaaaatggaaagggatattggaggcaatcctctggtttcacacttccttttcaggcaaacagggccctccttagagttatctgttcaccagaacaacccaaaagcacatgttccttttttcctgtcatgttgtagctcatttgggggaaaagaaggccaacttaaaacagtcccaggggaggactgcttgagcccaggagtctgaggtttgcagtgagctatgattgtgccactgcgctccagcctgtctccaaaacaaaacaaaacaaaacaaaagccgtcccagaggaagtcctgctgcagaaaagatgatagaattggtcacccaatcaatagctgtgaagacttccttattcctgctgaacttccttccttggatatcttcatggataagcctgtgtctgtggacagagtggggcccaagtgctgaggctcgaaagacaggttttacaatcagccaattaaacatcttaccagttgctgtaccccttgccaaggggatgagctgaggagcttcttttctttaggtccaacatcaaaatgagtccatctaagctagggctttttgcaaaggtgattaaaaatcaaggctggagttccagccaaatagggaggagaggtaccacaagttcatcttaaacttgcttccgggctgggtagttaaaacaggaagatcccaaggggatcttacgaggcaaatatcagcaggtaactgtggaagaaaggaaatctcaggacctaatgagttcgttgtaaaatattcctgggagtagatgggggatctactcccagttttttactttttacagaatattgttgctttcctacaacaatgtacatatatttgcagttgtatatgctttttttttttccaaataaacttgtcaccctgcatgcccttggcaaataagtgaagcagaaataggaacacagtccacattcaagttgaggaacagtgtatctttaagagctgacctttgggtgacctggaaagggggaaagatggctaagcatggagagaaacgaggcaagagacaagctatgatacaacaccgcttcagcccctgccctcaatagcacacaacccacatatcagctttctgaagagaaggaacctactgtttagtgctcctcactttgcaatgtttgtgctacgccagaatttctccagtttttttcattatcatccccctgagaaaaaaattacattgaatttaaattttccctaataagagaaattaaatatgaaagaataggattttgttgggtaagattgagctttggaaggtcacgaaccattattctatctaaggtgtgtgttttgttttgtttttttttgttttttttttgcaatccctctccccctgaaccaatttcacattgggaatgcaggacctagactgctgaataaaaagctacttcttctataattgtcaggttctctccaatttctcagcttcctcaaagacatggggtggagttgggtgtgccatcactgagagagctctggaacttttgactcttagtgacatttttagatttaggggttcatggccttccacatgttgccaccaactggtgatctctgccccttcatgctgatcaagaaagtagaaactcctcgtcgccttcaggtttgcagtcgcagaaacattgcctgctgtggactgtcagcacaaaactgggacactggtgtcatttagactgtcagcagtgcacatgattgtacgatagactccaggcaaccatgtgcatctgtgcaagatgacctctgccccaagagaagggttacggtctaattaaatgtttaccaagatggtaccagtgggctctccccgtgtcctttggtgttattggagctggtgtatgacagactcaaggaaattttttaaggaaaatgaagaagaaatcaacctttatggttctctttcattggaagaggagaataaggaaagaaatggcaggtagagagggagggggaaaggaatagaaatggcatgtctttgatgctgtggcttgtgtggggacaatgggaagagcacagcaggcacaacatatctgtgttagtgccacgtggtatctgttaagtatggccagagcctcacatataagtgaagagagttaagacaattcttgctctttgaacaataatagtctatagaatttctattggcaaaccatcccagacaacctgacctatcaaacaaaagcaaataatccctgtctcagaactgctggtctaaaagctagaaggggcatgataatggaaattgctagaaaagagagaatgctctactctctttcctgtgcctacctacccccatcctaaaccctgtaaaacagaatttcaaaatagatgtcaaatatgaagtaattcagacttccaaagaaggaaagagttctgcccagggcagtatgagcaaatccacagggatgttaagatttggtccaactcaaaggtttatgggcagtgagcctagagtctcttgagagtaaacccttgcatttgggacaaggagaatatgtgaagttcaggagtgctcacactagagcaagatccagaaaaaaaaaaatccaatggcattttaaactagattgcattatcactcaatgctgttactttgagcagacaaatcagttgaatgggagggcaaatggcagaaatgaacaaaagctattaggtgaaagcatccccaatgtatcagttgtgagatgatttttgtttaatgatgatcaggtttacattgaagtggcttggaagacgtatttcagagggactgggtttgtactgcaaaactctgaacactagagcaggttctactagcacttgggcagtaaggtagcgggtgtgtattatgctattgccatagttctcgtctttgtggattcacataccctttcccatgaggagcttgctactaacagcctcctgtttctgttgtttttatatgggagaagagaaagagcttggaatttcaattgtctaaacaattggtatgatttacaagaaggcaaaccattcaggagatgttcaacagtgtatcattcttagcattcaatacaatgtttattataaaatatacacctgagtttatgtttttctgccaggctgaagggcaataatgtcttgctatgcaaacactctattttatgtgtgaatttttttaactgtaattttatgtgtgaatttttttaactaaactctatcatcattttctatgttgacatcttttttttttttttaatctgtttccaactctgagtctgtgaactatctcttctgactggatgctggcctaaaatcctattagtgcttaaacagacctcaaaacactctgaacctgtaggccaatacagagatgttgttctttgatatatcttgggtccttgatggcttcaacaaacaaggtcataatttgtttaaattcagtgttttctgtagataccttcttctcagtttcattaagaagagtaaccatctttggttttccaaagaatggaaactcctaccctagactttagacttagagcgtctgcctttcacgatgagtaagagatccagaatgtttaggggatgtgcgtcagcccacctggtacagtggcaaagctgaatgcgaacttgaggcctcctgaggcctgaccttctatgcccccagccctccaccccaagcaccttttggtgtggctggaaacacatgacattggatgtgatttttctcaagcccttcactgtggaaggcatgggagactgcccagcattgggcatgtggctgttaacgtttccatttcaagtccctgattcttactggagaagttaaggagccacttaatgttttcacagacctctgattctgttgtgaatgtggcattccagtgagtacaacctgcttgctataaagaaagcagcatattttgacaattttatttcttccttgggtacttacatttttattacaaaaatggccgttataaaaaaagacagaagggctgggcagtggcttgctccctagaaactgagattccgaagcaggtgtttcctctcccctagactcagaggtacatttaatccatcttctccatttcctccttcaggaccagctatgagattcagtgcatttctagcccagcggatgttcattctccactaaacttcatcttttactaagcaaagggggattattccatgaggcagccaggagcaaggggccatgatattcatgactttgtctgctgggcatttttcaaagtgtccttgaattcactcagcaaacaaagctttctggagaatctctcaaaacttaggccctgctccatttggccaaaaatgatggctgctccaaaactctgaacttcttaaaactccatctgctacattatttctggagtttaaacatgactttttctgtctttgagtatagatgtgtttgtttaattaacgaagcacaagtctgttaagcagaaggctccaagctgtattctatacttgggaatccttggtgccatctttattctaccaagtgccaatcaccatggctaaagtgggcgtatattacagcctgtgtcctaagcttagaagctttaatgtacttttttaaatgaaaagtattagagggggttgaacattgtaactaaagcataaagttagaccaattacatgcagagatgtttatttaatattgtgtgagctgagtccttctgtataaattatttgcacacttttcttgcatgatgaactgattttttatagttgtttgtaccagacggtggcatatttttgtaaaaaacttttgacactgaattgcaataaatgtttttccaacaaca

SEQ ID NO: 64238 - DNA, 6377 bp, Homo sapiens
agcgggggtacaggaaagaagccagtgccccaggtcacctaagacaggcatcaagctcattcggcaaaatccagttgggttgttctaactggctcattcttacttgggtgacctctgcatggcaggagtaacttctgtgcctttgttttcatgttcagcgccatggatattgcaccctgggggaagctttcaacagactggacttctcaactgccattctggattccagaagatttaactacgtggtccggctgttggagctgatagcaaagtcacagctcacatccctgagtggcatcgcccaaaagaacttcatgaatattttggaaaaagtggtactgaaagtccttgaagaccagcaaaacattagactaataagggaactactccagaccctctacacatccttatgtacactggtccaaagagtcggcaagtctgtgctggtcgggaacattaacatgtgggtgtatcggatggagacgattctccactggcagcagcagctgaacaacattcagatcaccaggcctgccttcaaaggcctcaccttcactgacctgcctttgtgcctacaactgaacatcatgcagaggctgagcgacgggcgggacctggtcagcctgggccaggctgcccccgacctgcacgtgctcagcgaagaccggctgctgtggaagaaactctgccagtaccacttctccgagcggcagatccgcaaacgattaattctgtcagacaaagggcagctggattggaagaagatgtatttcaaacttgtccgatgttacccaaggaaagagcagtatggagatacccttcagctctgcaaacactgtcacatcctttcctggaagggcactgaccatccgtgcactgccaataacccagagagctgctccgtttcactttcaccccaggactttatcaacttgttcaagttctgaatcccagcacatgacaacacttcagaagggtccccctgctgactggagagctgggaatatggcatttggacacttcatttgtaaatagtgtacattttaaacattggctcgaaacttcagagataagtcatggagaggacattggaggggagaaatgcagttgctgactgggaatttaagaatgtgaacttctcactagaattggtatggaaaagcaaaatactgtaaataaactttttttctaacaatttgccagcaagactataagggcaataattctatttcagcggtgaaaatggagtcctcttaatggtcacagaaactctcttatagttccctaggaagaaaaaggcaaaactcaaatacaaaataggacgctttgtttacaatgtgaaaatttgtttagaaaagaaaaaatgaagaaggaaaactatataggagaaattcctgggctttggggtttgatctggtgtttgttttgagaaggcgaaggaagcgccacccatcctaaacctgcatgggcacagagccttaccctacagagataccacacaatggtctacctctaaaagcgtagagtgccctctctgacaacgcatgtgatccagtaggcagtgtctgtttttctcgtaagtgttttcatcactataaaaagtgatttaaaatggaaagggatattggaggcaatcctctggtttcacacttccttttcaggcaaacagggccctccttagagttatctgttcaccagaacaacccaaaagcacatgttccttttttcctgtcatgttgtagctcatttgggggaaaagaaggccaacttaaaacagtcccaggggaggactgcttgagcccaggagtctgaggtttgcagtgagctatgattgtgccactgcgctccagcctgtctccaaaacaaaacaaaacaaaacaaaagccgtcccagaggaagtcctgctgcagaaaagatgatagaattggtcacccaatcaatagctgtgaagacttccttattcctgctgaacttccttccttggatatcttcatggataagcctgtgtctgtggacagagtggggcccaagtgctgaggctcgaaagacaggttttacaatcagccaattaaacatcttaccagttgctgtaccccttgccaaggggatgagctgaggagcttcttttctttaggtccaacatcaaaatgagtccatctaagctagggctttttgcaaaggtgattaaaaatcaaggctggagttccagccaaatagggaggagaggtaccacaagttcatcttaaacttgcttccgggctgggtagttaaaacaggaagatcccaaggggatcttacgaggcaaatatcagcaggtaactgtggaagaaaggaaatctcaggacctaatgagttcgttgtaaaatattcctgggagtagatgggggatctactcccagttttttactttttacagaatattgttgctttcctacaacaatgtacatatatttgcagttgtatatgctttttttttttccaaataaacttgtcaccctgcatgcccttggcaaataagtgaagcagaaataggaacacagtccacattcaagttgaggaacagtgtatctttaagagctgacctttgggtgacctggaaagggggaaagatggctaagcatggagagaaacgaggcaagagacaagctatgatacaacaccgcttcagcccctgccctcaatagcacacaacccacatatcagctttctgaagagaaggaacctactgtttagtgctcctcactttgcaatgtttgtgctacgccagaatttctccagtttttttcattatcatccccctgagaaaaaaattacattgaatttaaattttccctaataagagaaattaaatatgaaagaataggattttgttgggtaagattgagctttggaaggtcacgaaccattattctatctaaggtgtgtgttttgttttgtttttttttgttttttttttgcaatccctctccccctgaaccaatttcacattgggaatgcaggacctagactgctgaataaaaagctacttcttctataattgtcaggttctctccaatttctcagcttcctcaaagacatggggtggagttgggtgtgccatcactgagagagctctggaacttttgactcttagtgacatttttagatttaggggttcatggccttccacatgttgccaccaactggtgatctctgccccttcatgctgatcaagaaagtagaaactcctcgtcgccttcaggtttgcagtcgcagaaacattgcctgctgtggactgtcagcacaaaactgggacactggtgtcatttagactgtcagcagtgcacatgattgtacgatagactccaggcaaccatgtgcatctgtgcaagatgacctctgccccaagagaagggttacggtctaattaaatgtttaccaagatggtaccagtgggctctccccgtgtcctttggtgttattggagctggtgtatgacagactcaaggaaattttttaaggaaaatgaagaagaaatcaacctttatggttctctttcattggaagaggagaataaggaaagaaatggcaggtagagagggagggggaaaggaatagaaatggcatgtctttgatgctgtggcttgtgtggggacaatgggaagagcacagcaggcacaacatatctgtgttagtgccacgtggtatctgttaagtatggccagagcctcacatataagtgaagagagttaagacaattcttgctctttgaacaataatagtctatagaatttctattggcaaaccatcccagacaacctgacctatcaaacaaaagcaaataatccctgtctcagaactgctggtctaaaagctagaaggggcatgataatggaaattgctagaaaagagagaatgctctactctctttcctgtgcctacctacccccatcctaaaccctgtaaaacagaatttcaaaatagatgtcaaatatgaagtaattcagacttccaaagaaggaaagagttctgcccagggcagtatgagcaaatccacagggatgttaagatttggtccaactcaaaggtttatgggcagtgagcctagagtctcttgagagtaaacccttgcatttgggacaaggagaatatgtgaagttcaggagtgctcacactagagcaagatccagaaaaaaaaaaatccaatggcattttaaactagattgcattatcactcaatgctgttactttgagcagacaaatcagttgaatgggagggcaaatggcagaaatgaacaaaagctattaggtgaaagcatccccaatgtatcagttgtgagatgatttttgtttaatgatgatcaggtttacattgaagtggcttggaagacgtatttcagagggactgggtttgtactgcaaaactctgaacactagagcaggttctactagcacttgggcagtaaggtagcgggtgtgtattatgctattgccatagttctcgtctttgtggattcacataccctttcccatgaggagcttgctactaacagcctcctgtttctgttgtttttatatgggagaagagaaagagcttggaatttcaattgtctaaacaattggtatgatttacaagaaggcaaaccattcaggagatgttcaacagtgtatcattcttagcattcaatacaatgtttattataaaatatacacctgagtttatgtttttctgccaggctgaagggcaataatgtcttgctatgcaaacactctattttatgtgtgaatttttttaactgtaattttatgtgtgaatttttttaactaaactctatcatcattttctatgttgacatcttttttttttttttaatctgtttccaactctgagtctgtgaactatctcttctgactggatgctggcctaaaatcctattagtgcttaaacagaccttgggtccttgatggcttcaacaaacaaggtcataatttgtttaaattcagtgttttctgtagataccttcttctcagtttcattaagaagagtaaccatctttggttttccaaagaatggaaactcctaccctagactttagacttagagcgtctgcctttcacgatgagtaagagatccagaatgtttaggggatgtgcgtcagcccacctggtacagtggcaaagctgaatgcgaacttgaggcctcctgaggcctgaccttctatgcccccagccctccaccccaagcaccttttggtgtggctggaaacacatgacattggatgtgatttttctcaagcccttcactgtggaaggcatgggagactgcccagcattgggcatgtggctgttaacgtttccatttcaagtccctgattcttactggagaagttaaggagccacttaatgttttcacagacctctgattctgttgtgaatgtggcattccagtgagtacaacctgcttgctataaagaaagcagcatattttgacaattttatttcttccttgggtacttacatttttattacaaaaatggccgttataaaaaaagacagaagggctgggcagtggcttgctccctagaaactgagattccgaagcaggtgtttcctctcccctagactcagaggtacatttaatccatcttctccatttcctccttcaggaccagctatgagattcagtgcatttctagcccagcggatgttcattctccactaaacttcatcttttactaagcaaagggggattattccatgaggcagccaggagcaaggggccatgatattcatgactttgtctgctgggcatttttcaaagtgtccttgaattcactcagcaaacaaagctttctggagaatctctcaaaacttaggccctgctccatttggccaaaaatgatggctgctccaaaactctgaacttcttaaaactccatctgctacattatttctggagtttaaacatgactttttctgtctttgagtatagatgtgtttgtttaattaacgaagcacaagtctgttaagcagaaggctccaagctgtattctatacttgggaatccttggtgccatctttattctaccaagtgccaatcaccatggctaaagtgggcgtatattacagcctgtgtcctaagcttagaagctttaatgtacttttttaaatgaaaagtattagagggggttgaacattgtaactaaagcataaagttagaccaattacatgcagagatgtttatttaatattgtgtgagctgagtccttctgtataaattatttgcacacttttcttgcatgatgaactgattttttatagttgtttgtaccagacggtggcatatttttgtaaaaaacttttgacactgaattgcaataaatgtttttccaacaaca

SEQ ID NO: 64239 - DNA, 6668 bp, Homo sapiens
agcgggggtacaggaaagaagccagtgccccaggtcacctaagacaggcatcaagctcattcggcaaaatccagttgggttgttctaactggctcattcttacttgggtgacctctgcatggcaggagtaacttctgtgcctttgttttcatgttcagcgccatggatattgcaccctgggggaagctttcaacagactggacttctcaactgccattctggattccagaagatttaactacgtggtccggctgttggagctgatagcaaagtcacagctcacatccctgagtggcatcgcccaaaagaacttcatgaatattttggaaaaagtggtactgaaagtccttgaagaccagcaaaacattagactaataagggaactactccagaccctctacacatccttatgtacactggtccaaagagtcggcaagtctgtgctggtcgggaacattaacatgtgggtgtatcggatggagacgattctccactggcagcagcagctgaacaacattcagatcaccaggcctgccttcaaaggcctcaccttcactgacctgcctttgtgcctacaactgaacatcatgcagaggctgagcgacgggcgggacctggtcagcctgggccaggctgcccccgacctgcacgtgctcagcgaagaccggctgctgtggaagaaactctgccagtaccacttctccgagcggcagatccgcaaacgattaattctgtcagacaaagggcagctggattggaagaagatgtatttcaaacttgtccgatgttacccaaggaaagagcagtatggagatacccttcagctctgcaaacactgtcacatcctttcctggaagggcactgaccatccgtgcactgccaataacccagagagctgctccgtttcactttcaccccaggactttatcaacttgttcaagttctgaatcccagcacatgacaacacttcagaagggtccccctgctgactggagagctgggaatatggcatttggacacttcatttgtaaatagtgtacattttaaacattggctcgaaacttcagagataagtcatggagaggacattggaggggagaaatgcagttgctgactgggaatttaagaatgtgaacttctcactagaattggtatggaaaagcaaaatactgtaaataaactttttttctaacaatttgccagcaagactataagggcaataattctatttcagcggtgaaaatggagtcctcttaatggtcacagaaactctcttatagttccctaggaagaaaaaggcaaaactcaaatacaaaataggacgctttgtttacaatgtgaaaatttgtttagaaaagaaaaaatgaagaaggaaaactatataggagaaattcctgggctttggggtttgatctggtgtttgttttgagaaggcgaaggaagcgccacccatcctaaacctgcatgggcacagagccttaccctacagagataccacacaatggtctacctctaaaagcgtagagtgccctctctgacaacgcatgtgatccagtaggcagtgtctgtttttctcgtaagtgttttcatcactataaaaagtgatttaaaatggaaagggatattggaggcaatcctctggtttcacacttccttttcaggcaaacagggccctccttagagttatctgttcaccagaacaacccaaaagcacatgttccttttttcctgtcatgttgtagctcatttgggggaaaagaaggccaacttaaaacagtcccaggggaggactgcttgagcccaggagtctgaggtttgcagtgagctatgattgtgccactgcgctccagcctgtctccaaaacaaaacaaaacaaaacaaaagccgtcccagaggaagtcctgctgcagaaaagatgatagaattggtcacccaatcaatagctgtgaagacttccttattcctgctgaacttccttccttggatatcttcatggataagcctgtgtctgtggacagagtggggcccaagtgctgaggctcgaaagacaggttttacaatcagccaattaaacatcttaccagttgctgtaccccttgccaaggggatgagctgaggagcttcttttctttaggtccaacatcaaaatgagtccatctaagctagggctttttgcaaaggtgattaaaaatcaaggctggagttccagccaaatagggaggagaggtaccacaagttcatcttaaacttgcttccgggctgggtagttaaaacaggaagatcccaaggggatcttacgaggcaaatatcagcaggtaactgtggaagaaaggaaatctcaggacctaatgagttcgttgtaaaatattcctgggagtagatgggggatctactcccagttttttactttttacagaatattgttgctttcctacaacaatgtacatatatttgcagttgtatatgctttttttttttccaaataaacttgtcaccctgcatgcccttggcaaataagtgaagcagaaataggaacacagtccacattcaagttgaggaacagtgtatctttaagagctgacctttgggtgacctggaaagggggaaagatggctaagcatggagagaaacgaggcaagagacaagctatgatacaacaccgcttcagcccctgccctcaatagcacacaacccacatatcagctttctgaagagaaggaacctactgtttagtgctcctcactttgcaatgtttgtgctacgccagaatttctccagtttttttcattatcatccccctgagaaaaaaattacattgaatttaaattttccctaataagagaaattaaatatgaaagaataggattttgttgggtaagattgagctttggaaggtcacgaaccattattctatctaaggtgtgtgttttgttttgtttttttttgttttttttttgcaatccctctccccctgaaccaatttcacattgggaatgcaggacctagactgctgaataaaaagctacttcttctataattgtcaggttctctccaatttctcagcttcctcaaagacatggggtggagttgggtgtgccatcactgagagagctctggaacttttgactcttagtgacatttttagatttaggggttcatggccttccacatgttgccaccaactggtgatctctgccccttcatgctgatcaagaaagtagaaactcctcgtcgccttcaggtttgcagtcgcagaaacattgcctgctgtggactgtcagcacaaaactgggacactggtgtcatttagactgtcagcagtgcacatgattgtacgatagactccaggcaaccatgtgcatctgtgcaagatgacctctgccccaagagaagggttacggtctaattaaatgtttaccaagatggtaccagtgggctctccccgtgtcctttggtgttattggagctggtgtatgacagactcaaggaaattttttaaggaaaatgaagaagaaatcaacctttatggttctctttcattggaagaggagaataaggaaagaaatggcaggtagagagggagggggaaaggaatagaaatggcatgtctttgatgctgtggcttgtgtggggacaatgggaagagcacagcaggcacaacatatctgtgttagtgccacgtggtatctgttaagtatggccagagcctcacatataagtgaagagagttaagacaattcttgctctttgaacaataatagtctatagaatttctattggcaaaccatcccagacaacctgacctatcaaacaaaagcaaataatccctgtctcagaactgctggtctaaaagctagaaggggcatgataatggaaattgctagaaaagagagaatgctctactctctttcctgtgcctacctacccccatcctaaaccctgtaaaacagaatttcaaaatagatgtcaaatatgaagtaattcagacttccaaagaaggaaagagttctgcccagggcagtatgagcaaatccacagggatgttaagatttggtccaactcaaaggtttatgggcagtgagcctagagtctcttgagagtaaacccttgcatttgggacaaggagaatatgtgaagttcaggagtgctcacactagagcaagatccagaaaaaaaaaaatccaatggcattttaaactagattgcattatcactcaatgctgttactttgagcagacaaatcagttgaatgggagggcaaatggcagaaatgaacaaaagctattaggtgaaagcatccccaatgtatcagttgtgagatgatttttgtttaatgatgatcaggtttacattgaagtggcttggaagacgtatttcagagggactgggtttgtactgcaaaactctgaacactagagcaggttctactagcacttgggcagtaaggtagcgggtgtgtattatgctattgccatagttctcgtctttgtggattcacataccctttcccatgaggagcttgctactaacagcctcctgtttctgttgtttttatatgggagaagagaaagagcttggaatttcaattgtctaaacaattggtatgatttacaagaaggcaaaccattcaggagatgttcaacagtgtatcattcttagcattcaatacaatgtttattataaaatatacacctgagtttatgtttttctgccaggctgaagggcaataatgtcttgctatgcaaacactctattttatgtgtgaatttttttaactgtaattttatgtgtgaatttttttaactaaactctatcatcattttctatgttgacatcttttttttttttttaatctgtttccaactctgagtctgtgaactatctcttctgactggatgctggcctaaaatcctattagtgcttaaacagacctcaaaacactctgaacctgtaggccaatacagagatgttgttctttgatatatcttgggtccttgatggcttcaacaaacaaggtcataatttgtttaaattcagtgttttctgtagataccttcttctcagtttcattaagaagagtaaccatctttggttttccaaagaatggaaactcctaccctagactttagacttagagcgtctgcctttcacgatgagtaagagatccagaatgtttaggggatgtgcgtcagcccacctggtacagtggcaaagctgaatgcgaacttgaggcctcctgaggcctgaccttctatgcccccagccctccaccccaagcaccttttggtgtggctggaaacacatgacattggatgtgatttttctcaagcccttcactgtggaaggcatgggagactgcccagcattgggcatgtggctgttaacgtttccatttcaagtccctgattcttactggagaagttaaggagccacttaatgttttcacagacctctgattctgttgtgaatgtggcattccagtgagtacaacctgcttgctataaagaaagcagcatattttgacaattttatttcttccttgggtacttacatttttattacaaaaatggccgttataaaaaaagacagaagggctgggcagtggcttgctccctagaaactgagattccgaagcaggtgtttcctctcccctagactcagaggtacatttaatccatcttctccatttcctccttcaggaccagctatgagattcagtgcatttctagcccagcggatgttcattctccactaaacttcatcttttactaagcaaagggggattattccatgaggcagccaggagcaaggggccatgatattcatgactttgtctgctgggcatttttcaaagtgtccttgaattcactcagcaaacaaagctttctggagaatctctcaaaacttaggccctgctccatttggccaaaaatgatggctgctccaaaactctgaacttcttaaaactccatctgctacattatttctggagtttaaacatgactttttctgtctttgagtatagatgtgtttgtttaattaacgaagcacaagtctgttaagcagaaggctccaagctgtattctatacttgggaatccttggtgccatctttattctaccaagtgccaatcaccatggctaaagtgggcgtatattacagcctgtgtcctaagcttagaagctttaatgtacttttttaaatgaaaagtattagagggggttgaacattgtaactaaagcataaagttagaccaattacatgcagagatgtttatttaatattgtgtgagctgagtccttctgtataaattatttgcacacttttcttgcatgatgaactgattttttatagttgtttgtaccagacggtggcatatttttgtaaaaaacttttgacactgaattgcaataaatgtttttccaacaacaaaaaaaaaaaaaaaaaaaaaggctgttggggggcccggacccgaagaagttttcagaaccctcgcggcggcggcgcgaccagagtaaggcacggcccaagcggcgccagaaaccgtgcgaacagggcggttctcccccaaaaaaccggcgccgcggttggaaaaccaaggctcgcgctcgctgcacgctcaacatcccccccccgcccgcaccaaagagagcaaagaacagacgcca

SEQ ID NO: 64240 - DNA, 6043 bp, Homo sapiens
  misc_feature (6)..(6): n is a, c, g, or t
cagggntctttccctcaaagcacatgttccttttttcctgtcatgttgtagctcatttgggggaaaagaaggccaacttaaaacagtcccaggggaggactgcttgagcccaggagtctgaggtttgcagtgagctatgattgtgccactgcgctccagcctgtctccaaaacaaaacaaaacaaaacaaaagccgtcccagaggaagtcctgctgcagaaaagatgatagaattggtcacccaatcaatagctgtgaagacttccttattcctgctgaacttccttccttggatatcttcatgaaatctactttcacagctcccacatacgagtgagaacatgcaacatttaggcctggggcattattgacagagaattgttgctttgaagttggaaaatgccttatggtgctaaaagccaaagagaggcctctgagaacttgaagctaaccatgtgttcctttccagggcactgaccatccgtgcactgccaataacccagagagctgctccgtttcactttcaccccaggactttatcaacttgttcaagttctgaatcccagcacatgacaacacttcagaagggtccccctgctgactggagagctgggaatatggcatttggacacttcatttgtaaatagtgtacattttaaacattggctcgaaacttcagagataagtcatggagaggacattggaggggagaaatgcagttgctgactgggaatttaagaatgtgaacttctcactagaattggtatggaaaagcaaaatactgtaaataaactttttttctaacaatttgccagcaagactataagggcaataattctatttcagcggtgaaaatggagtcctcttaatggtcacagaaactctcttatagttccctaggaagaaaaaggcaaaactcaaatacaaaataggacgctttgtttacaatgtgaaaatttgtttagaaaagaaaaaatgaagaaggaaaactatataggagaaattcctgggctttggggtttgatctggtgtttgttttgagaaggcgaaggaagcgccacccatcctaaacctgcatgggcacagagccttaccctacagagataccacacaatggtctacctctaaaagcgtagagtgccctctctgacaacgcatgtgatccagtaggcagtgtctgtttttctcgtaagtgttttcatcactataaaaagtgatttaaaatggaaagggatattggaggcaatcctctggtttcacacttccttttcaggcaaacagggccctccttagagttatctgttcaccagaacaacccaaaagcacatgttccttttttcctgtcatgttgtagctcatttgggggaaaagaaggccaacttaaaacagtcccaggggaggactgcttgagcccaggagtctgaggtttgcagtgagctatgattgtgccactgcgctccagcctgtctccaaaacaaaacaaaacaaaacaaaagccgtcccagaggaagtcctgctgcagaaaagatgatagaattggtcacccaatcaatagctgtgaagacttccttattcctgctgaacttccttccttggatatcttcatggataagcctgtgtctgtggacagagtggggcccaagtgctgaggctcgaaagacaggttttacaatcagccaattaaacatcttaccagttgctgtaccccttgccaaggggatgagctgaggagcttcttttctttaggtccaacatcaaaatgagtccatctaagctagggctttttgcaaaggtgattaaaaatcaaggctggagttccagccaaatagggaggagaggtaccacaagttcatcttaaacttgcttccgggctgggtagttaaaacaggaagatcccaaggggatcttacgaggcaaatatcagcaggtaactgtggaagaaaggaaatctcaggacctaatgagttcgttgtaaaatattcctgggagtagatgggggatctactcccagttttttactttttacagaatattgttgctttcctacaacaatgtacatatatttgcagttgtatatgctttttttttttccaaataaacttgtcaccctgcatgcccttggcaaataagtgaagcagaaataggaacacagtccacattcaagttgaggaacagtgtatctttaagagctgacctttgggtgacctggaaagggggaaagatggctaagcatggagagaaacgaggcaagagacaagctatgatacaacaccgcttcagcccctgccctcaatagcacacaacccacatatcagctttctgaagagaaggaacctactgtttagtgctcctcactttgcaatgtttgtgctacgccagaatttctccagtttttttcattatcatccccctgagaaaaaaattacattgaatttaaattttccctaataagagaaattaaatatgaaagaataggattttgttgggtaagattgagctttggaaggtcacgaaccattattctatctaaggtgtgtgttttgttttgtttttttttgttttttttttgcaatccctctccccctgaaccaatttcacattgggaatgcaggacctagactgctgaataaaaagctacttcttctataattgtcaggttctctccaatttctcagcttcctcaaagacatggggtggagttgggtgtgccatcactgagagagctctggaacttttgactcttagtgacatttttagatttaggggttcatggccttccacatgttgccaccaactggtgatctctgccccttcatgctgatcaagaaagtagaaactcctcgtcgccttcaggtttgcagtcgcagaaacattgcctgctgtggactgtcagcacaaaactgggacactggtgtcatttagactgtcagcagtgcacatgattgtacgatagactccaggcaaccatgtgcatctgtgcaagatgacctctgccccaagagaagggttacggtctaattaaatgtttaccaagatggtaccagtgggctctccccgtgtcctttggtgttattggagctggtgtatgacagactcaaggaaattttttaaggaaaatgaagaagaaatcaacctttatggttctctttcattggaagaggagaataaggaaagaaatggcaggtagagagggagggggaaaggaatagaaatggcatgtctttgatgctgtggcttgtgtggggacaatgggaagagcacagcaggcacaacatatctgtgttagtgccacgtggtatctgttaagtatggccagagcctcacatataagtgaagagagttaagacaattcttgctctttgaacaataatagtctatagaatttctattggcaaaccatcccagacaacctgacctatcaaacaaaagcaaataatccctgtctcagaactgctggtctaaaagctagaaggggcatgataatggaaattgctagaaaagagagaatgctctactctctttcctgtgcctacctacccccatcctaaaccctgtaaaacagaatttcaaaatagatgtcaaatatgaagtaattcagacttccaaagaaggaaagagttctgcccagggcagtatgagcaaatccacagggatgttaagatttggtccaactcaaaggtttatgggcagtgagcctagagtctcttgagagtaaacccttgcatttgggacaaggagaatatgtgaagttcaggagtgctcacactagagcaagatccagaaaaaaaaaaatccaatggcattttaaactagattgcattatcactcaatgctgttactttgagcagacaaatcagttgaatgggagggcaaatggcagaaatgaacaaaagctattaggtgaaagcatccccaatgtatcagttgtgagatgatttttgtttaatgatgatcaggtttacattgaagtggcttggaagacgtatttcagagggactgggtttgtactgcaaaactctgaacactagagcaggttctactagcacttgggcagtaaggtagcgggtgtgtattatgctattgccatagttctcgtctttgtggattcacataccctttcccatgaggagcttgctactaacagcctcctgtttctgttgtttttatatgggagaagagaaagagcttggaatttcaattgtctaaacaattggtatgatttacaagaaggcaaaccattcaggagatgttcaacagtgtatcattcttagcattcaatacaatgtttattataaaatatacacctgagtttatgtttttctgccaggctgaagggcaataatgtcttgctatgcaaacactctattttatgtgtgaatttttttaactgtaattttatgtgtgaatttttttaactaaactctatcatcattttctatgttgacatcttttttttttttttaatctgtttccaactctgagtctgtgaactatctcttctgactggatgctggcctaaaatcctattagtgcttaaacagacctcaaaacactctgaacctgtaggccaatacagagatgttgttctttgatatatcttgggtccttgatggcttcaacaaacaaggtcataatttgtttaaattcagtgttttctgtagataccttcttctcagtttcattaagaagagtaaccatctttggttttccaaagaatggaaactcctaccctagactttagacttagagcgtctgcctttcacgatgagtaagagatccagaatgtttaggggatgtgcgtcagcccacctggtacagtggcaaagctgaatgcgaacttgaggcctcctgaggcctgaccttctatgcccccagccctccaccccaagcaccttttggtgtggctggaaacacatgacattggatgtgatttttctcaagcccttcactgtggaaggcatgggagactgcccagcattgggcatgtggctgttaacgtttccatttcaagtccctgattcttactggagaagttaaggagccacttaatgttttcacagacctctgattctgttgtgaatgtggcattccagtgagtacaacctgcttgctataaagaaagcagcatattttgacaattttatttcttccttgggtacttacatttttattacaaaaatggccgttataaaaaaagacagaagggctgggcagtggcttgctccctagaaactgagattccgaagcaggtgtttcctctcccctagactcagaggtacatttaatccatcttctccatttcctccttcaggaccagctatgagattcagtgcatttctagcccagcggatgttcattctccactaaacttcatcttttactaagcaaagggggattattccatgaggcagccaggagcaaggggccatgatattcatgactttgtctgctgggcatttttcaaagtgtccttgaattcactcagcaaacaaagctttctggagaatctctcaaaacttaggccctgctccatttggccaaaaatgatggctgctccaaaactctgaacttcttaaaactccatctgctacattatttctggagtttaaacatgactttttctgtctttgagtatagatgtgtttgtttaattaacgaagcacaagtctgttaagcagaaggctccaagctgtattctatacttgggaatccttggtgccatctttattctaccaagtgccaatcaccatggctaaagtgggcgtatattacagcctgtgtcctaagcttagaagctttaatgtacttttttaaatgaaaagtattagagggggttgaacattgtaactaaagcataaagttagaccaattacatgcagagatgtttatttaatattgtgtgagctgagtccttctgtataaattatttgcacacttttcttgcatgatgaactgattttttatagttgtttgtaccagacggtggcatatttttgtaaaaaacttttgacactgaattgcaataaatgtttttccaacaaca

SEQ ID NO: 64241 - DNA, 4824 bp, Homo sapiens
agcgggggtacaggaaagaagccagtgccccaggtcacctaagacaggcatcaagctcattcggcaaaatccagttgggttgttctaactggctcattcttacttgggtgacctctgcatggcaggagtaacttctgtgcctttgttttcatgttcagcgccatggatattgcaccctgggggaagctttcaacagactggacttctcaactgccattctggattccagaagatttaactacgtggtccggctgttggagctgatagcaaagtcacagctcacatccctgagtggcatcgcccaaaagaacttcatgaatattttggaaaaagtggtactgaaagtccttgaagaccagcaaaacattagactaataagggaactactccagaccctctacacatccttatgtacactggtccaaagagtcggcaagtctgtgctggtcgggaacattaacatgtgggtgtatcggatggagacgattctccactggcagcagcagctgaacaacattcagatcaccaggcctgccttcaaaggcctcaccttcactgacctgcctttgtgcctacaactgaacatcatgcagaggctgagcgacgggcgggacctggtcagcctgggccaggctgcccccgacctgcacgtgctcagcgaagaccggctgctgtggaagaaactctgccagtaccacttctccgagcggcagatccgcaaacgattaattctgtcagacaaagggcagctggattggaagaagatgtatttcaaacttgtccgatgttacccaaggaaagagcagtatggagatacccttcagctctgcaaacactgtcacatcctttcctggaagggcactgaccatccgtgcactgccaataacccagagagctgctccgtttcactttcaccccaggactttatcaacttgttcaagttctgaatcccagcacatgacaacacttcagaagggtccccctgctgactggagagctgggaatatggcatttggacacttcatttgtaaatagtgtacattttaaacattggctcgaaacttcagagataagtcatggagaggacattggaggggagaaatgcagttgctgactgggaatttaagaatgtgaacttctcactagaattggtatggaaaagcaaaatactgtaaataaactttttttctaacaatttgccagcaagactataagggcaataattctatttcagcggtgaaaatggagtcctcttaatggtcacagaaactctcttatagttccctaggaagaaaaaggcaaaactcaaatacaaaataggacgctttgtttacaatgtgaaaatttgtttagaaaagaaaaaatgaagaaggaaaactatataggagaaattcctgggctttggggtttgatctggtgtttgttttgagaaggcgaaggaagcgccacccatcctaaacctgcatgggcacagagccttaccctacagagataccacacaatggtctacctctaaaagcgtagagtgccctctctgacaacgcatgtgatccagtaggcagtgtctgtttttctcgtaagtgttttcatcactataaaaagtgatttaaaatggaaagggatattggaggcaatcctctggtttcacacttccttttcaggcaaacagggccctccttagagttatctgttcaccagaacaacccaaaagcacatgttccttttttcctgtcatgttgtagctcatttgggggaaaagaaggccaacttaaaacagtcccaggggaggactgcttgagcccaggagtctgaggtttgcagtgagctatgattgtgccactgcgctccagcctgtctccaaaacaaaacaaaacaaaacaaaagccgtcccagaggaagtcctgctgcagaaaagatgatagaattggtcacccaatcaatagctgtgaagacttccttattcctgctgaacttccttccttggatatcttcatggataagcctgtgtctgtggacagagtggggcccaagtgctgaggctcgaaagacaggttttacaatcagccaattaaacatcttaccagttgctgtaccccttgccaaggggatgagctgaggagcttcttttctttaggtccaacatcaaaatgagtccatctaagctagggctttttgcaaaggtgattaaaaatcaaggctggagttccagccaaatagggaggagaggtaccacaagttcatcttaaacttgcttccgggctgggtagttaaaacaggaagatcccaaggggatcttacgaggcaaatatcagcaggtaactgtggaagaaaggaaatctcaggacctaatgagttcgttgtaaaatattcctgggagtagatgggggatctactcccagttttttactttttacagaatattgttgctttcctacaacaatgtacatatatttgcagttgtatatgctttttttttttccaaataaacttgtcaccctgcatgcccttggcaaataagtgaagcagaaataggaacacagtccacattcaagttgaggaacagtgtatctttaagagctgacctttgggtgacctggaaagggggaaagatggctaagcatggagagaaacgaggcaagagacaagctatgatacaacaccgcttcagcccctgccctcaatagcacacaacccacatatcagctttctgaagagaaggaacctactgtttagtgctcctcactttgcaatgtttgtgctacgccagaatttctccagtttttttcattatcatccccctgagaaaaaaattacattgaatttaaattttccctaataagagaaattaaatatgaaagaataggattttgttgggtaagattgagctttggaaggtcacgaaccattattctatctaaggtgtgtgttttgttttgtttttttttgttttttttttgcaatccctctccccctgaaccaatttcacattgggaatgcaggacctagactgctgaataaaaagctacttcttctataattgtcaggttctctccaatttctcagcttcctcaaagacatggggtggagttgggtgtgccatcactgagagagctctggaacttttgactcttagtgacatttttagatttaggggttcatggccttccacatgttgccaccaactggtgatctctgccccttcatgctgatcaagaaagtagaaactcctcgtcgccttcaggtttgcagtcgcagaaacattgcctgctgtggactgtcagcacaaaactgggacactggtgtcatttagactgtcagcagtgcacatgattgtacgatagactccaggcaaccatgtgcatctgtgcaagatgacctctgccccaagagaagggttacggtctaattaaatgtttaccaagatggtaccagtgggctctccccgtgtcctttggtgttattggagctggtgtatgacagactcaaggaaattttttaaggaaaatgaagaagaaatcaacctttatggttctctttcattggaagaggagaataaggaaagaaatggcaggtagagagggagggggaaaggaatagaaatggcatgtctttgatgctgtggcttgtgtggggacaatgggaagagcacagcaggcacaacatatctgtgttagtgccacgtggtatctgttaagtatggccagagcctcacatataagtgaagagagttaagacaattcttgctctttgaacaataatagtctatagaatttctattggcaaaccatcccagacaacctgacctatcaaacaaaagcaaataatccctgtctcagaactgctggtctaaaagctagaaggggcatgataatggaaattgctagaaaagagagaatgctctactctctttcctgtgcctacctacccccatcctaaaccctgtaaaacagaatttcaaaatagatgtcaaatatgaagtaattcagacttccaaagaaggaaagagttctgcccagggcagtatgagcaaatccacagggatgttaagatttggtccaactcaaaggtttatgggcagtgagcctagagtctcttgagagtaaacccttgcatttgggacaaggagaatatgtgaagttcaggagtgctcacactagagcaagatccagaaaaaaaaaaatccaatggcattttaaactagattgcattatcactcaatgctgttactttgagcagacaaatcagttgaatgggagggcaaatggcagaaatgaacaaaagctattaggtgaaagcatccccaatgtatcagttgtgagatgatttttgtttaatgatgatcaggtttacattgaagtggcttggaagacgtatttcagagggactgggtttgtactgcaaaactctgaacactagagcaggttctactagcacttgggcagtaaggtagcgggtgtgtattatgctattgccatagttctcgtctttgtggattcacataccctttcccatgaggagcttgctactaacagcctcctgtttctgttgtttttatatgggagaagagaaagagcttggaatttcaattgtctaaacaattggtatgatttacaagaaggcaaaccattcaggagatgttcaacagtgtatcattcttagcattcaatacaatgtttattataaaatatacacctgagtttatgtttttctgccaggctgaagggcaataatgtcttgctatgcaaacactctattttatgtgtgaatttttttaactgtaattttatgtgtgaatttttttaactaaactctatcatcattttc

SEQ ID NO: 64242 - DNA, 3368 bp, Homo sapiens
gccggtaccggacttcctggtgtgttgggtgtgccatcactgagagagctctggaacttttgactcttagtgacatttttagatttaggggttcatggccttccacatgttgccaccaactggtgatctctgccccttcatgctgatcaagaaagtagaaactcctcgtcgccttcaggtttgcagtcgcagaaacattgcctgctgtggactgtcagcacaaaactgggacactggtgtcatttagactgtcagcagtgcacatgattgtacgatagactccaggcaaccatgtgcatctgtgcaagatgacctctgccccaagagaagggttacggtctaattaaatgtttaccaagatggtaccagtgggctctccccgtgtcctttggtgttattggagctggtgtatgacagactcaaggaaattttttaaggaaaatgaagaagaaatcaacctttatggttctctttcattggaagaggagaataaggaaagaaatggcaggtagagagggagggggaaaggaatagaaatggcatgtctttgatgctgtggcttgtgtggggacaatgggaagagcacagcaggcacaacatatctgtgttagtgccacgtggtatctgttaagtatggccagagcctcacatataagtgaagagagttaagacaattcttgctctttgaacaataatagtctatagaatttctattggcaaaccatcccagacaacctgacctatcaaacaaaagcaaataatccctgtctcagaactgctggtctaaaagctagaaggggcatgataatggaaattgctagaaaagagagaatgctctactctctttcctgtgcctacctacccccatcctaaaccctgtaaaacagaatttcaaaatagatgtcaaatatgaagtaattcagacttccaaagaaggaaagagttctgcccagggcagtatgagcaaatccacagggatgttaagatttggtccaactcaaaggtttatgggcagtgagcctagagtctcttgagagtaaacccttgcatttgggacaaggagaatatgtgaagttcaggagtgctcacactagagcaagatccagaaaaaaaaaaatccaatggcattttaaactagattgcattatcactcaatgctgttactttgagcagacaaatcagttgaatgggagggcaaatggcagaaatgaacaaaagctattaggtgaaagcatccccaatgtatcagttgtgagatgatttttgtttaatgatgatcaggtttacattgaagtggcttggaagacgtatttcagagggactgggtttgtactgcaaaactctgaacactagagcaggttctactagcacttgggcagtaaggtagcgggtgtgtattatgctattgccatagttctcgtctttgtggattcacataccctttcccatgaggagcttgctactaacagcctcctgtttctgttgtttttatatgggagaagagaaagagcttggaatttcaattgtctaaacaattggtatgatttacaagaaggcaaaccattcaggagatgttcaacagtgtatcattcttagcattcaatacaatgtttattataaaatatacacctgagtttatgtttttctgccaggctgaagggcaataatgtcttgctatgcaaacactctattttatgtgtgaatttttttaactgtaattttatgtgtgaatttttttaactaaactctatcatcattttctatgttgacatcttttttttttttttaatctgtttccaactctgagtctgtgaactatctcttctgactggatgctggcctaaaatcctattagtgcttaaacagacctcaaaacactctgaacctgtaggccaatacagagatgttgttctttgatatatcttgggtccttgatggcttcaacaaacaaggtcataatttgtttaaattcagtgttttctgtagataccttcttctcagtttcattaagaagagtaaccatctttggttttccaaagaatggaaactcctaccctagactttagacttagagcgtctgcctttcacgatgagtaagagatccagaatgtttaggggatgtgcgtcagcccacctggtacagtggcaaagctgaatgcgaacttgaggcctcctgaggcctgaccttctatgcccccagccctccaccccaagcaccttttggtgtggctggaaacacatgacattggatgtgatttttctcaagcccttcactgtggaaggcatgggagactgcccagcattgggcatgtggctgttaacgtttccatttcaagtccctgattcttactggagaagttaaggagccacttaatgttttcacagacctctgattctgttgtgaatgtggcattccagtgagtacaacctgcttgctataaagaaagcagcatattttgacaattttatttcttccttgggtacttacatttttattacaaaaatggccgttataaaaaaagacagaagggctgggcagtggcttgctccctagaaactgagattccgaagcaggtgtttcctctcccctagactcagaggtacatttaatccatcttctccatttcctccttcaggaccagctatgagattcagtgcatttctagcccagcggatgttcattctccactaaacttcatcttttactaagcaaagggggattattccatgaggcagccaggagcaaggggccatgatattcatgactttgtctgctgggcatttttcaaagtgtccttgaattcactcagcaaacaaagctttctggagaatctctcaaaacttaggccctgctccatttggccaaaaatgatggctgctccaaaactctgaacttcttaaaactccatctgctacattatttctggagtttaaacatgactttttctgtctttgagtatagatgtgtttgtttaattaacgaagcacaagtctgttaagcagaaggctccaagctgtattctatacttgggaatccttggtgccatctttattctaccaagtgccaatcaccatggctaaagtgggcgtatattacagcctgtgtcctaagcttagaagctttaatgtacttttttaaatgaaaagtattagagggggttgaacattgtaactaaagcataaagttagaccaattacatgcagagatgtttatttaatattgtgtgagctgagtccttctgtataaattatttgcacacttttcttgcatgatgaactgattttttatagttgtttgtaccagacggtggcatatttttgtaaaaaacttttgacactgaattgcaataaatgtttttccaacaaca

SEQ ID NO: 64243 - DNA, 2040 bp, Homo sapiens
tggtgatagtgttctagaggatcccggcaggttctactagcacttgggcagtaaggtagcgggtgtgtattatgctattgccatagttctcgtctttgtggattcacataccctttcccatgaggagcttgctactaacagcctcctgtttctgttgtttttatatgggagaagagaaagagcttggaatttcaattgtctaaacaattggtatgatttacaagaaggcaaaccattcaggagatgttcaacagtgtatcattcttagcattcaatacaatgtttattataaaatatacacctgagtttatgtttttctgccaggctgaagggcaataatgtcttgctatgcaaacactctattttatgtgtgaatttttttaactgtaattttatgtgtgaatttttttaactaaactctatcatcattttctatgttgacatcttttttttttttttaatctgtttccaactctgagtctgtgaactatctcttctgactggatgctggcctaaaatcctattagtgcttaaacagacctcaaaacactctgaacctgtaggccaatacagagatgttgttctttgatatatcttgggtccttgatggcttcaacaaacaaggtcataatttgtttaaattcagtgttttctgtagataccttcttctcagtttcattaagaagagtaaccatctttggttttccaaagaatggaaactcctaccctagactttagacttagagcgtctgcctttcacgatgagtaagagatccagaatgtttaggggatgtgcgtcagcccacctggtacagtggcaaagctgaatgcgaacttgaggcctcctgaggcctgaccttctatgcccccagccctccaccccaagcaccttttggtgtggctggaaacacatgacattggatgtgatttttctcaagcccttcactgtggaaggcatgggagactgcccagcattgggcatgtggctgttaacgtttccatttcaagtccctgattcttactggagaagttaaggagccacttaatgttttcacagacctctgattctgttgtgaatgtggcattccagtgagtacaacctgcttgctataaagaaagcagcatattttgacaattttatttcttccttgggtacttacatttttattacaaaaatggccgttataaaaaaagacagaagggctgggcagtggcttgctccctagaaactgagattccgaagcaggtgtttcctctcccctagactcagaggtacatttaatccatcttctccatttcctccttcaggaccagctatgagattcagtgcatttctagcccagcggatgttcattctccactaaacttcatcttttactaagcaaagggggattattccatgaggcagccaggagcaaggggccatgatattcatgactttgtctgctgggcatttttcaaagtgtccttgaattcactcagcaaacaaagctttctggagaatctctcaaaacttaggccctgctccatttggccaaaaatgatggctgctccaaaactctgaacttcttaaaactccatctgctacattatttctggagtttaaacatgactttttctgtctttgagtatagatgtgtttgtttaattaacgaagcacaagtctgttaagcagaaggctccaagctgtattctatacttgggaatccttggtgccatctttattctaccaagtgccaatcaccatggctaaagtgggcgtatattacagcctgtgtcctaagcttagaagctttaatgtacttttttaaatgaaaagtattagagggggttgaacattgtaactaaagcataaagttagaccaattacatgcagagatgtttatttaatattgtgtgagctgagtccttctgtataaattatttgcacacttttcttgcatgatgaactgattttttatagttgtttgtaccagacggtggcatatttttgtaaaaaacttttgacactgaattgcaataaatgtttttccaacaaca

SEQ ID NO: 64244 - DNA, 1197 bp, Homo sapiens
agcgggggtacaggaaagaagccagtgccccaggtcacctaagacaggcatcaagctcattcggcaaaatccagttgggttgttctaactggctcattcttacttgggtgacctctgcatggcaggagtaacttctgtgcctttgttttcatgttcagcgccatggatattgcaccctgggggaagctttcaacagactggacttctcaactgccattctggattccagaagatttaactacgtggtccggctgttggagctgatagcaaagtcacagctcacatccctgagtggcatcgcccaaaagaacttcatgaatattttggaaaaagtggtactgaaagtccttgaagaccagcaaaacattagactaataagggaactactccagaccctctacacatccttatgtacactggtccaaagagtcggcaagtctgtgctggtcgggaacattaacatgtgggtgtatcggatggagacgattctccactggcagcagcagctgaacaacattcagatcaccaggcctgccttcaaaggcctcaccttcactgacctgcctttgtgcctacaactgaacatcatgcagaggctgagcgacgggcgggacctggtcagcctgggccaggctgcccccgacctgcacgtgctcagcgaagaccggctgctgtggaagaaactctgccagtaccacttctccgagcggcagatccgcaaacgattaattctgtcagacaaagggcagctggattggaagaagatgtatttcaaacttgtccgatgttacccaaggaaagagcagtatggagatacccttcagctctgcaaacactgtcacatcctttcctggaagggcactgaccatccgtgcactgccaataacccagagagctgctccgtttcactttcaccccaggactttatcaacttgttcaagttctgaatcccagcacatgacaacacttcagaagggtccccctgctgactggagagctgggaatatggcatttggacacttcatttgtaaatagtgtacattttaaacattggctcgaaacttcagagataagtcatggagaggacattggaggggagaaatgcagttgctgactgggaatttaagaatgtgaacttctcactagaattggtatggaaaagcaaaatactgtaaataaactttttttctaacaatt

SEQ ID NO: 64245 - DNA, 1317 bp, Homo sapiens
  misc_feature (1147)..(1147): n is a, c, g, or t
  misc_feature (1286)..(1286): n is a, c, g, or t
  misc_feature (1296)..(1296): n is a, c, g, or t
agcgggggtacaggaaagaagccagtgccccaggtcacctaagacaggcatcaagctcattcggcaaaatccagttgggttgttctaactggctcattcttacttgggtgacctctgcatggcaggagtaacttctgtgcctttgttttcatgttcagcgccatggatattgcaccctgggggaagctttcaacagactggacttctcaactgccattctggattccagaagatttaactacgtggtccggctgttggagctgatagcaaagtcacagctcacatccctgagtggcatcgcccaaaagaacttcatgaatattttggaaaaagtggtactgaaagtccttgaagaccagcaaaacattagactaataagggaactactccagaccctctacacatccttatgtacactggtccaaagagtcggcaagtctgtgctggtcgggaacattaacatgtgggtgtatcggatggagacgattctccactggcagcagcagctgaacaacattcagatcaccaggcctgccttcaaaggcctcaccttcactgacctgcctttgtgcctacaactgaacatcatgcagaggctgagcgacgggcgggacctggtcagcctgggccaggctgcccccgacctgcacgtgctcagcgaagaccggctgctgtggaagaaactctgccagtaccacttctccgagcggcagatccgcaaacgattaattctgtcagacaaagggcagctggattggaagaagatgtatttcaaacttgtccgatgttacccaaggaaagagcagtatggagatacccttcagctctgcaaacactgtcacatcctttcctggaagggcactgaccatccgtgcactgccaataacccagagagctgctccgtttcactttcaccccaggactttatcaacttgttcaagttctgaatcccagcacatgacaacacttcagaagggtccccctgctgactggagagctgggaatatggcatttggacacttcatttgtaaatagtgtacattttaaacattggctcgaaacttcagagataagtcatggagaggacattggagaaggagagcaggaagcaggctagtgagggccatgcctgttgctggagtacatnggtataggccctgtgtgcccattatggggtttgagaggtgcaaggtaatagctggagacattctgaaattagttttgaggttctggaggggacacaccgctggctggtgaactcgatcacattcccaactcttttaggnccagtacctnccattacagaggacagaagag

SEQ ID NO: 64246 - DNA, 959 bp, Homo sapiens
tgcaacgcttgagatcctctccgcgcccgccaccccgcagggtgccccgcgccgttcccgccgccccgccgcccccgtcgcgggcccctgcaccccgagcatccgccccgggtggcacgtccccgagcccaccaggccggccccgtctccccatccgtctagtccgctcgcggtgccatgccattcctcgggcaggactggcggtcccccgggcagaactgggtgaagacggccgacggctggaagcgcttcctggatgagaagagcggcagtttcgtgagcgacctcagcagcagttacctgccacacaggacggtatagcaataacggacgaactctctttcgacacagcctgacactatgactgtctgcagccacagaagacggaacacgaacggacgatgcttgaaactagcaaccaccgaaaacatcagggtatttccaccaagaacacaactggcatctatgtgcacaagaggaacgtactaaagagcgccatggatattgcaccctgggggaagctttcaacagactggacttctcaactgccattctggattccagaagatttaactacgtggtccgggccctgccactagccagtgagggaaatagatgaaatagatctgactctaccttgaaggtctgcagcaggggtcagcaaacttctagccctcaggtcaatagcctgccgcctgtttttgtatggcccatgagctaagaatgatttgtacgtttttcaatgttttaaaaaattgaaaggagtataatgtttcataacacatggaaattatgtgcagctcaaatttcagtatccataaataaagttttattggaacacagctacgctcactcattagatattgtctatggctgtttttgtgcaaaatggcagagttgggttcagagttagcaacagagagcttgtagcctgcaagcctagagtatttactatctgg

SEQ ID NO: 64247 - DNA, 4423 bp, Homo sapiens
  misc_feature (4364)..(4364): n is a, c, g, or t
  misc_feature (4410)..(4410): n is a, c, g, or t
agcgggggtacaggaaagaagccagtgccccaggtcacctaagacaggcatcaagctcattcggcaaaatccagttgggttgttctaactggctcattcttacttgggtgacctctgcatggcaggagtaacttctgtgcctttgttttcatgttcagcgccatggatattgcaccctgggggaagctttcaacagactggacttctcaactgccattctggattccagaagatttaactacgtggtccggctgttggagctgatagcaaagtcacagctcacatccctgagtggcatcgcccaaaagaacttcatgaatattttggaaaaagtggtactgaaagtccttgaagaccagcaaaacattagactaataagggaactactccagaccctctacacatccttatgtacactggtccaaagagtcggcaagtctgtgctggtcgggaacattaacatgtgggtgtatcggatggagacgattctccactggcagcagcagctgaacaacattcagatcaccaggcctgccttcaaaggcctcaccttcactgacctgcctttgtgcctacaactgaacatcatgcagaggctgagcgacgggcgggacctggtcagcctgggccaggctgcccccgacctgcacgtgctcagcgaagaccggctgctgtggaagaaactctgccagtaccacttctccgagcggcagatccgcaaacgattaattctgtcagacaaagggcagctggattggaagaagatgtatttcaaacttgtccgatgttacccaaggaaagagcagtatggagatacccttcagctctgcaaacactgtcacatcctttcctggaagggcactgaccatccgtgcactgccaataacccagagagctgctccgtttcactttcaccccaggactttatcaacttgttcaagttctgaatcccagcacatgacaacacttcagaagggtccccctgctgactggagagctgggaatatggcatttggacacttcatttgtaaatagtgtacattttaaacattggctcgaaacttcagagataagtcatggagaggacattggaggggagaaatgcagttgctgactgggaatttaagaatgtgaacttctcactagaattggtatggaaaagcaaaatactgtaaataaactttttttctaacaatttgccagcaagactataagggcaataattctatttcagcggtgaaaatggagtcctcttaatggtcacagaaactctcttatagttccctaggaagaaaaaggcaaaactcaaatacaaaataggacgctttgtttacaatgtgaaaatttgtttagaaaagaaaaaatgaagaaggaaaactatataggagaaattcctgggctttggggtttgatctggtgtttgttttgagaaggcgaaggaagcgccacccatcctaaacctgcatgggcacagagccttaccctacagagataccacacaatggtctacctctaaaagcgtagagtgccctctctgacaacgcatgtgatccagtaggcagtgtctgtttttctcgtaagtgttttcatcactataaaaagtgatttaaaatggaaagggatattggaggcaatcctctggtttcacacttccttttcaggcaaacagggccctccttagagttatctgttcaccagaacaacccaaaagcacatgttccttttttcctgtcatgttgtagctcatttgggggaaaagaaggccaacttaaaacagtcccaggggaggactgcttgagcccaggagtctgaggtttgcagtgagctatgattgtgccactgcgctccagcctgtctccaaaacaaaacaaaacaaaacaaaagccgtcccagaggaagtcctgctgcagaaaagatgatagaattggtcacccaatcaatagctgtgaagacttccttattcctgctgaacttccttccttggatatcttcatggataagcctgtgtctgtggacagagtggggcccaagtgctgaggctcgaaagacaggttttacaatcagccaattaaacatcttaccagttgctgtaccccttgccaaggggatgagctgaggagcttcttttctttaggtccaacatcaaaatgagtccatctaagctagggctttttgcaaaggtgattaaaaatcaaggctggagttccagccaaatagggaggagaggtaccacaagttcatcttaaacttgcttccgggctgggtagttaaaacaggaagatcccaaggggatcttacgaggcaaatatcagcaggtaactgtggaagaaaggaaatctcaggacctaatgagttcgttgtaaaatattcctgggagtagatgggggatctactcccagttttttactttttacagaatattgttgctttcctacaacaatgtacatatatttgcagttgtatatgctttttttttttccaaataaacttgtcaccctgcatgcccttggcaaataagtgaagcagaaataggaacacagtccacattcaagttgaggaacagtgtatctttaagagctgacctttgggtgacctggaaagggggaaagatggctaagcatggagagaaacgaggcaagagacaagctatgatacaacaccgcttcagcccctgccctcaatagcacacaacccacatatcagctttctgaagagaaggaacctactgtttagtgctcctcactttgcaatgtttgtgctacgccagaatttctccagtttttttcattatcatccccctgagaaaaaaattacattgaatttaaattttccctaataagagaaattaaatatgaaagaataggattttgttgggtaagattgagctttggaaggtcacgaaccattattctatctaaggtgtgtgttttgttttgtttttttttgttttttttttgcaatccctctccccctgaaccaatttcacattgggaatgcaggacctagactgctgaataaaaagctacttcttctataattgtcaggttctctccaatttctcagcttcctcaaagacatggggtggagttgggtgtgccatcactgagagagctctggaacttttgactcttagtgacatttttagatttaggggttcatggccttccacatgttgccaccaactggtgatctctgccccttcatgctgatcaagaaagtagaaactcctcgtcgccttcaggtttgcagtcgcagaaacattgcctgctgtggactgtcagcacaaaactgggacactggtgtcatttagactgtcagcagtgcacatgattgtacgatagactccaggcaaccatgtgcatctgtgcaagatgacctctgccccaagagaagggttacggtctaattaaatgtttaccaagatggtaccagtgggctctccccgtgtcctttggtgttattggagctggtgtatgacagactcaaggaaattttttaaggaaaatgaagaagaaatcaacctttatggttctctttcattggaagaggagaataaggaaagaaatggcaggtagagagggagggggaaaggaatagaaatggcatgtctttgatgctgtggcttgtgtggggacaatgggaagagcacagcaggcacaacatatctgtgttagtgccacgtggtatctgttaagtatggccagagcctcacatataagtgaagagagttaagacaattcttgctctttgaacaataatagtctatagaatttctattggcaaaccatcccagacaacctgacctatcaaacaaaagcaaataatccctgtctcagaactgctggtctaaaagctagaaggggcatgataatggaaattgctagaaaagagagaatgctctactctctttcctgtgcctacctacccccatcctaaaccctgtaaaacagaatttcaaaatagatgtcaaatatgaagtaattcagacttccaaagaaggaaagagttctgcccagggcagtatgagcaaatccacagggatgttaagatttggtccaactcaaaggtttatgggcagtgagcctagagtctcttgagagtaaacccttgcatttgggacaaggagaatatgtgaagttcaggagtgctcacactagagcaagatccagaaaaaaaaaaatccaatggcattttaaactagattgcattatcactcaatgctgttactttgagcagacaaatcagttgaatgggagggcaaatggcagaaatgaacaaaagctattaggtgaaagcatccccaatgtatcagttgtgagatgatttttgtttaatgatgaaaagacattgaagaatccaaaatntaaagatagagctggaaaacgtagggagcaggttggaagtgaaggnactttccaaagag

SEQ ID NO: 64248 - DNA, 605 bp, Homo sapiens
aaaaaaaaaagccctcccatgccagaacagaggatggcagtctgtttcaataagacactgtgtccttggtgttggttctgattaagactcactgagatccagtgctcttgagctgggtctcagtcccctcccatgtcctgtgctctgccgccactgttttcattgttgtgttctcgttgtgattgttaagactcacactcctggctcagcagtggttttccagaaggcccaaagagcggtgccgggcaccccacgtcgcagtgtccgttccgggcttgggaagctggggaggtgggcagacctggtcgcatctcaccacacacacacacacacacacacacacacacacgctgtcagaaactcggccgtcccccctacctctgagctctcaatgctgctaatctctgccaagtgtccctgtgctccagcaccttccttgaaggactgacgcccaccccacgctctttgcgaggttgtccaggctgtgtttgtcgcatgctcttcttctgtatagttctcatcttccaattttatgggattcaacaaaagcctattatgcttgtttgcattatggttacaatattaaaaagtggattcaacaaaac

SEQ ID NO: 64249 - DNA, 624 bp, Homo sapiens
agagcggctcttttaatgagggttgcgacgtctccctccccacacccataaaccagtcgggttggacgtcactgctaattcgtttcagtgatgataggataaaggagggacattaagaaataaattccccctcacgaccctcgctgagctcacggctcagtccctacatatttatgccgcgtttccagccgctgggtgaggagctacttagcgccgcggctcctccgaggggcggccgggcagcgagcagcggccgagcggacgggatgaagaaacggaggcaccaagatgctgaagcccttgaccgagtcacgtgtcagtaaatgacagaatcaggatttgaatcccatgcctgtgaccctgaaccatgacattcccctttaacccttccttccaacctctgcgacatcagcttatagactgttgaaggtgacaccgttctcttctgtgatttttatttcaggggttatttgcagagctctgttcagtaaagctgactcaggtggggatgtgtcccgcagtgtcgaggtagggtgtcctccaggggcttcccaggtgtgctggtgcaacacgagataaagaccaagccagttcaggtaacccccaggtagagtcactaaaaaa

SEQ ID NO: 64250 - DNA, 7347 bp, Homo sapiens
ctagggacaaatgcagaaattcgtccgtgaattcgtcgtgtgaatgcagaaatatacacggatgtgcacacaactacagctctccacactgagcatgtgatctgtgcccagattaatccccacaaccacacaattccattttatagatgtgaaggctgggtgcagagggatgaagtaactggcccaccccaagttcagaacccaaaactcatagccctcttggggccacacacagcatgatgggcttctaagtaccttggatttttaaaagccactttataaagtgcttttatgaaacaagatctcacctgacctggaaaaccagtgaggctgggactattcaactcattcgacagcagaataactgaagatggagaaacaggctatccggcaaatctgactggaactcccaggcccctcccttgaggagctgctgctgagagatggaagaactggcctcatctgtcctgctcatgatgcctcagatctgatccgcatctaacaggctggcaatgaagatacccagagaatagttcacatctatcatgcgtcacttctagacacagccatcagacgcatctcctcccctttctgcctgaccttaggacacgtcccaccgcctctcttgacgtctgcctggtcaaccatcacttccttagagaataaggagagaggcggatgcaggaaatcatgccaccgacgggccaccagccatgagtgggtgacgctgagctgacgtcaaagacagagagggctgaagccttgtcagcacctgtcaccccggctcctgctctccgtgtagcctgaagcctggatcctcctggtgaaatcatcttggcctgatagcattgtgaggtcttcagacaggacccctcggaagctagttaccatggaggatcacatgttcggtgttcagcaaatccagcccaatgtcatttctgttcgtctcttcaagcgcaaagttgggggcctgggatttctggtgaaggagcgggtcagtaagccgcccgtgatcatctctgacctgattcgtgggggcgccgcagagcagagtggcctcatccaggccggagacatcattcttgcggtcaacggccggcccttggtggacctgagctatgacagcgccctggaggtactcagaggcattgcctctgagacccacgtggtcctcattctgaggggccctgaaggtttcaccacgcacctggagaccacctttacaggtgatgggacccccaagaccatccgggtgacacagcccctgggtccccccaccaaagccgtggatctgtcccaccagccaccggccggcaaagaacagcccctggcagtggatggggcctcgggtcccgggaatgggcctcagcatgcctacgatgatgggcaggaggctggctcactcccccatgccaacggcctggcccccaggcccccaggccaggaccccgcgaagaaagcaaccagagtcagcctccaaggcagaggggagaacaatgaactgctcaaggagatagagcctgtgctgagccttctcaccagtgggagcagaggggtcaagggaggggcacctgccaaggcagagatgaaagatatgggaatccaggtggacagagatttggacggcaagtcacacaaacctctgcccctcggcgtggagaacgaccgagtcttcaatgacctatgggggaagggcaatgtgcctgtcgtcctcaacaacccatattcagagaaggagcagccccccacctcaggaaaacagtcccccacaaagaatggcagcccctccaagtgtccacgcttcctcaaggtcaagaactgggagactgaggtggttctcactgacaccctccaccttaagagcacattggaaacgggatgcactgagtacatctgcatgggctccatcatgcatccttctcagcatgcaaggaggcctgaagacgtccgcacaaaaggacagctcttccctctcgccaaagagtttattgatcaatactattcatcaattaaaagatttggctccaaagcccacatggaaaggctggaagaggtgaacaaagagatcgacaccactagcacttaccagctcaaggacacagagctcatctatggggccaagcacgcctggcggaatgcctcgcgctgtgtgggcaggatccagtggtccaagctgcaggtattcgatgcccgtgactgcaccacggcccacgggatgttcaactacatctgtaaccatgtcaagtatgccaccaacaaagggaacctcaggtctgccatcaccatattcccccagaggacagacggcaagcacgacttccgagtctggaactcccagctcatccgctacgctggctacaagcagcctgacggctccaccctgggggacccagccaatgtgcagttcacagagatatgcatacagcagggctggaaaccgcctagaggccgcttcgatgtcctgccgctcctgcttcaggccaacggcaatgaccctgagctcttccagattcctccagagctggtgttggaagttcccatcaggcaccccaagtttgagtggttcaaggacctggggctgaagtggtacggcctccccgccgtgtccaacatgctcctagagattggcggcctggagttcagcgcctgtcccttcagtggctggtacatgggcacagagattggtgtccgcgactactgtgacaactcccgctacaatatcctggaggaagtggccaagaagatgaacttagacatgaggaagacgtcctccctgtggaaggaccaggcgctggtggagatcaatatcgcggttctctatagcttccagagtgacaaagtgaccattgttgaccatcactccgccaccgagtccttcattaagcacatggagaatgagtaccgctgccgggggggctgccctgccgactgggtgtggatcgtgccccccatgtccggaagcatcacccctgtgttccaccaggagatgctcaactaccggctcaccccctccttcgaataccagcctgatccctggaacacgcatgtctggaaaggcaccaacgggacccccacaaagcggcgagccatcggcttcaagaagctagcagaagctgtcaagttctcggccaagctgatggggcaggctatggccaagagggtgaaagcgaccatcctctatgccacagagacaggcaaatcgcaagcttatgccaagaccttgtgtgagatcttcaaacacgcctttgatgccaaggtgatgtccatggaagaatatgacattgtgcacctggaacatgaaactctggtccttgtggtcaccagcacctttggcaatggagatccccctgagaatggggagaaattcggctgtgctttgatggaaatgaggcaccccaactctgtgcaggaagaaaggaagagctacaaggtccgattcaacagcgtctcctcctactctgactcccaaaaatcatcaggcgatgggcccgacctcagagacaactttgagagtgctggacccctggccaatgtgaggttctcagtttttggcctcggctcacgagcataccctcacttttgcgccttcggacacgctgtggacaccctcctggaagaactgggaggggagaggatcctgaagatgagggaaggggatgagctctgtgggcaggaagaggctttcaggacctgggccaagaaggtcttcaaggcagcctgtgatgtcttctgtgtgggagatgatgtcaacattgaaaaggccaacaattccctcatcagcaatgatcgcagctggaagagaaacaagttccgcctcacctttgtggccgaagctccagaactcacacaaggtctatccaatgtccacaaaaagcgagtctcagctgcccggctccttagccgtcaaaacctccagagccctaaatccagtcggtcaactatcttcgtgcgtctccacaccaacgggagccaggagctgcagtaccagcctggggaccacctgggtgtcttccctggcaaccacgaggacctcgtgaatgccctgatcgagcggctggaggacgcgccgcctgtcaaccagatggtgaaagtggaactgctggaggagcggaacacggctttaggtgtcatcagtaactggacagacgagctccgcctcccgccctgcaccatcttccaggccttcaagtactacctggacatcaccacgccaccaacgcctctgcagctgcagcagtttgcctccctagctaccagcgagaaggagaagcagcgtctgctggtcctcagcaagggtttgcaggagtacgaggaatggaaatggggcaagaaccccaccatcgtggaggtgctggaggagttcccatctatccagatgccggccaccctgctcctgacccagctgtccctgctgcagccccgctactattccatcagctcctccccagacatgtaccctgatgaagtgcacctcactgtggccatcgtttcctaccgcactcgagatggagaaggaccaattcaccacggcgtatgctcctcctggctcaaccggatacaggctgacgaactggtcccctgtttcgtgagaggagcacccagcttccacctgccccggaacccccaagtcccctgcatcctcgttggaccaggcaccggcattgcccctttccgaagcttctggcaacagcggcaatttgatatccaacacaaaggaatgaacccctgccccatggtcctggtcttcgggtgccggcaatccaagatagatcatatctacagggaagagaccctgcaggccaagaacaagggggtcttcagagagctgtacacggcttactcccgggagccagacaaaccaaagaagtacgtgcaggacatcctgcaggagcagctggcggagtctgtgtaccgagccctgaaggagcaagggggccacatatacgtctgtggggacgtcaccatggctgctgatgtcctcaaagccatccagcgcatcatgacccagcaggggaagctctcggcagaggacgccggcgtattcatcagccggatgagggatgacaaccgataccatgaggatatttttggagtcaccctgcgaacgtacgaagtgaccaaccgccttagatctgagtccattgccttcattgaagagagcaaaaaagacaccgatgaggttttcagctcctaactggaccctcttgcccagccggctgcaagttttgtaagcgcggacagacactgctgaacctttcctctgggaccccctgtggccctcgctctgcctcctgtccttgtcgctgtgccctggtttccctcctcgggcttctcgcccctcagtggtttcctcggccctcctgggtttactccttgagttttcctgctgcgatgcaatgcttttctaatctgcagtggctcttacaaaactctgttcccactccctctcttgccgacaagggcaactcacgggtgcatgaaaccactggaacatggccgtcgctgtgggggtttttttctctggggttcccctggaaaggctgcaggaactaggcacaagctctctgagccagtccctcagccactgaagtccccctttctccttttttatgatgacattttggttgtgcgtgcctgtgtgtgtgtgtgtgtgtgtgtgtgtgtgtgtgatgggccaggtctctgtccgtcctcttccctgcacaagtgtgtcgatcttagattgccactgctttcattgaagaccctcaatgccaagaaacgtgtccctggcccatattaatccctcgtgtgtccataattagggtccacgcccatgtacctgaaacatttggaagccccataattgttctagttagaaagggttcagggcatggggagaggagtgggaaattgattaaaggggctgtctcccaatgaaagaggcattcccagaatttgctgcatttagattttgataccagtgagcagagccctcatgtgacatgaacccatccaatggattgtgcaaatcccctccccaaacccacccataccagctagaatcacttgactttgccacatccattgactgaccccctcctccagcaatagcatccaaggggcctggaagttatgttgttcaaagaagcctggtggcaataaggatcttcccactttgccactggatgactttggatgggtcacttgtcctcagtttttcctagtcataatgtcatacgaacctaaagaatatgaatggattaaatgttaaagctttggtgcctggaaacaatatcaagtaacaatatgattattatttttttattcccccaaagcgggcttgctgcttcacccttggggatgaaataatggaagctggttaaagtggatgaggttggaaagagttgccataatgaggtcccacgtggcttcttcgataggagccacaacttggggtgggaagaacttgtccctcaggcttgttgccctctgcagttgatctccaaagttttaaacctgttaaattaattttgacaaataagttaccctcaactcagatcaaaaatgggcagccaagtcttcggtaggaattggagccggtgtaattcctccctaagaggcaacctgttgaatttactctctcagagtaaatggtgggaagggatccctttgtatacttttttaaatactacaaattagtgtcaggcagttcccagaaagagacaagaaatcctagtggcctcccagactgcagggtccccaaggatggaaagggaatgttctgctggttctaccctgtttgttgtgtcttgctatacagaaaaaccacatttcttttatatactgtacgtgggcatatcttgttgttcagtttgggtgtctgctaaagaggaagtgcactggccctctttgaaagggctttacagtgggggcaccaagaccccaaaggcccaggccaggagactgttaaagtgaaaaggcaatctatgactcaccttgctctgccatccctggcagcccccaccggtgtcctgttcctgccacatggagcttgacttcatgccagctataatctcccctgccttcctttaatcccaatttcccctgctcactcttccacagatataaagaacaaacacttagcatcccacactcaccccttctaatcctgaagggaagcccattctaaactcctttcctgcaaacccatttccagctcctagtagctttcctcccaaaggctttctttccaatcctttatagctttggagacgcctccccaattccccagggaaggaaactgttgtgtccaatccccattaaagacaaattgatcagtgcttcccactccaagtcaagctttat

SEQ ID NO: 64251 - DNA, 7449 bp, Homo sapiens
ctagggacaaatgcagaaattcgtccgtgaattcgtcgtgtgaatgcagaaatatacacggatgtgcacacaactacagctctccacactgagcatgtgatctgtgcccagattaatccccacaaccacacaattccattttatagatgtgaaggctgggtgcagagggatgaagtaactggcccaccccaagttcagaacccaaaactcatagccctcttggggccacacacagcatgatgggcttctaagtaccttggatttttaaaagccactttataaagtgcttttatgaaacaagatctcacctgacctggaaaaccagtgaggctgggactattcaactcattcgacagcagaataactgaagatggagaaacaggctatccggcaaatctgactggaactcccaggcccctcccttgaggagctgctgctgagagatggaagaactggcctcatctgtcctgctcatgatgcctcagatctgatccgcatctaacaggctggcaatgaagatacccagagaatagttcacatctatcatgcgtcacttctagacacagccatcagacgcatctcctcccctttctgcctgaccttaggacacgtcccaccgcctctcttgacgtctgcctggtcaaccatcacttccttagagaataaggagagaggcggatgcaggaaatcatgccaccgacgggccaccagccatgagtgggtgacgctgagctgacgtcaaagacagagagggctgaagccttgtcagcacctgtcaccccggctcctgctctccgtgtagcctgaagcctggatcctcctggtgaaatcatcttggcctgatagcattgtgaggtcttcagacaggacccctcggaagctagttaccatggaggatcacatgttcggtgttcagcaaatccagcccaatgtcatttctgttcgtctcttcaagcgcaaagttgggggcctgggatttctggtgaaggagcgggtcagtaagccgcccgtgatcatctctgacctgattcgtgggggcgccgcagagcagagtggcctcatccaggccggagacatcattcttgcggtcaacggccggcccttggtggacctgagctatgacagcgccctggaggtactcagaggcattgcctctgagacccacgtggtcctcattctgaggggccctgaaggtttcaccacgcacctggagaccacctttacaggtgatgggacccccaagaccatccgggtgacacagcccctgggtccccccaccaaagccgtggatctgtcccaccagccaccggccggcaaagaacagcccctggcagtggatggggcctcgggtcccgggaatgggcctcagcatgcctacgatgatgggcaggaggctggctcactcccccatgccaacggcctggcccccaggcccccaggccaggaccccgcgaagaaagcaaccagagtcagcctccaaggcagaggggagaacaatgaactgctcaaggagatagagcctgtgctgagccttctcaccagtgggagcagaggggtcaagggaggggcacctgccaaggcagagatgaaagatatgggaatccaggtggacagagatttggacggcaagtcacacaaacctctgcccctcggcgtggagaacgaccgagtcttcaatgacctatgggggaagggcaatgtgcctgtcgtcctcaacaacccatattcagagaaggagcagccccccacctcaggaaaacagtcccccacaaagaatggcagcccctccaagtgtccacgcttcctcaaggtcaagaactgggagactgaggtggttctcactgacaccctccaccttaagagcacattggaaacgggatgcactgagtacatctgcatgggctccatcatgcatccttctcagcatgcaaggaggcctgaagacgtccgcacaaaaggacagctcttccctctcgccaaagagtttattgatcaatactattcatcaattaaaagatttggctccaaagcccacatggaaaggctggaagaggtgaacaaagagatcgacaccactagcacttaccagctcaaggacacagagctcatctatggggccaagcacgcctggcggaatgcctcgcgctgtgtgggcaggatccagtggtccaagctgcaggtattcgatgcccgtgactgcaccacggcccacgggatgttcaactacatctgtaaccatgtcaagtatgccaccaacaaagggaacctcaggtctgccatcaccatattcccccagaggacagacggcaagcacgacttccgagtctggaactcccagctcatccgctacgctggctacaagcagcctgacggctccaccctgggggacccagccaatgtgcagttcacagagatatgcatacagcagggctggaaaccgcctagaggccgcttcgatgtcctgccgctcctgcttcaggccaacggcaatgaccctgagctcttccagattcctccagagctggtgttggaagttcccatcaggcaccccaagtttgagtggttcaaggacctggggctgaagtggtacggcctccccgccgtgtccaacatgctcctagagattggcggcctggagttcagcgcctgtcccttcagtggctggtacatgggcacagagattggtgtccgcgactactgtgacaactcccgctacaatatcctggaggaagtggccaagaagatgaacttagacatgaggaagacgtcctccctgtggaaggaccaggcgctggtggagatcaatatcgcggttctctatagcttccagagtgacaaagtgaccattgttgaccatcactccgccaccgagtccttcattaagcacatggagaatgagtaccgctgccgggggggctgccctgccgactgggtgtggatcgtgccccccatgtccggaagcatcacccctgtgttccaccaggagatgctcaactaccggctcaccccctccttcgaataccagcctgatccctggaacacgcatgtctggaaaggcaccaacgggacccccacaaagcggcgagccatcggcttcaagaagctagcagaagctgtcaagttctcggccaagctgatggggcaggctatggccaagagggtgaaagcgaccatcctctatgccacagagacaggcaaatcgcaagcttatgccaagaccttgtgtgagatcttcaaacacgcctttgatgccaaggtgatgtccatggaagaatatgacattgtgcacctggaacatgaaactctggtccttgtggtcaccagcacctttggcaatggagatccccctgagaatggggagaaattcggctgtgctttgatggaaatgaggcaccccaactctgtgcaggaagaaaggaagtacccggaacccttgcgtttctttccccgtaaagggcctcccctccccaatggtgacacagaagtccacggtctggctgcagcccgtgacagccagcacaggagctacaaggtccgattcaacagcgtctcctcctactctgactcccaaaaatcatcaggcgatgggcccgacctcagagacaactttgagagtgctggacccctggccaatgtgaggttctcagtttttggcctcggctcacgagcataccctcacttttgcgccttcggacacgctgtggacaccctcctggaagaactgggaggggagaggatcctgaagatgagggaaggggatgagctctgtgggcaggaagaggctttcaggacctgggccaagaaggtcttcaaggcagcctgtgatgtcttctgtgtgggagatgatgtcaacattgaaaaggccaacaattccctcatcagcaatgatcgcagctggaagagaaacaagttccgcctcacctttgtggccgaagctccagaactcacacaaggtctatccaatgtccacaaaaagcgagtctcagctgcccggctccttagccgtcaaaacctccagagccctaaatccagtcggtcaactatcttcgtgcgtctccacaccaacgggagccaggagctgcagtaccagcctggggaccacctgggtgtcttccctggcaaccacgaggacctcgtgaatgccctgatcgagcggctggaggacgcgccgcctgtcaaccagatggtgaaagtggaactgctggaggagcggaacacggctttaggtgtcatcagtaactggacagacgagctccgcctcccgccctgcaccatcttccaggccttcaagtactacctggacatcaccacgccaccaacgcctctgcagctgcagcagtttgcctccctagctaccagcgagaaggagaagcagcgtctgctggtcctcagcaagggtttgcaggagtacgaggaatggaaatggggcaagaaccccaccatcgtggaggtgctggaggagttcccatctatccagatgccggccaccctgctcctgacccagctgtccctgctgcagccccgctactattccatcagctcctccccagacatgtaccctgatgaagtgcacctcactgtggccatcgtttcctaccgcactcgagatggagaaggaccaattcaccacggcgtatgctcctcctggctcaaccggatacaggctgacgaactggtcccctgtttcgtgagaggagcacccagcttccacctgccccggaacccccaagtcccctgcatcctcgttggaccaggcaccggcattgcccctttccgaagcttctggcaacagcggcaatttgatatccaacacaaaggaatgaacccctgccccatggtcctggtcttcgggtgccggcaatccaagatagatcatatctacagggaagagaccctgcaggccaagaacaagggggtcttcagagagctgtacacggcttactcccgggagccagacaaaccaaagaagtacgtgcaggacatcctgcaggagcagctggcggagtctgtgtaccgagccctgaaggagcaagggggccacatatacgtctgtggggacgtcaccatggctgctgatgtcctcaaagccatccagcgcatcatgacccagcaggggaagctctcggcagaggacgccggcgtattcatcagccggatgagggatgacaaccgataccatgaggatatttttggagtcaccctgcgaacgtacgaagtgaccaaccgccttagatctgagtccattgccttcattgaagagagcaaaaaagacaccgatgaggttttcagctcctaactggaccctcttgcccagccggctgcaagttttgtaagcgcggacagacactgctgaacctttcctctgggaccccctgtggccctcgctctgcctcctgtccttgtcgctgtgccctggtttccctcctcgggcttctcgcccctcagtggtttcctcggccctcctgggtttactccttgagttttcctgctgcgatgcaatgcttttctaatctgcagtggctcttacaaaactctgttcccactccctctcttgccgacaagggcaactcacgggtgcatgaaaccactggaacatggccgtcgctgtgggggtttttttctctggggttcccctggaaaggctgcaggaactaggcacaagctctctgagccagtccctcagccactgaagtccccctttctccttttttatgatgacattttggttgtgcgtgcctgtgtgtgtgtgtgtgtgtgtgtgtgtgtgtgtgatgggccaggtctctgtccgtcctcttccctgcacaagtgtgtcgatcttagattgccactgctttcattgaagaccctcaatgccaagaaacgtgtccctggcccatattaatccctcgtgtgtccataattagggtccacgcccatgtacctgaaacatttggaagccccataattgttctagttagaaagggttcagggcatggggagaggagtgggaaattgattaaaggggctgtctcccaatgaaagaggcattcccagaatttgctgcatttagattttgataccagtgagcagagccctcatgtgacatgaacccatccaatggattgtgcaaatcccctccccaaacccacccataccagctagaatcacttgactttgccacatccattgactgaccccctcctccagcaatagcatccaaggggcctggaagttatgttgttcaaagaagcctggtggcaataaggatcttcccactttgccactggatgactttggatgggtcacttgtcctcagtttttcctagtcataatgtcatacgaacctaaagaatatgaatggattaaatgttaaagctttggtgcctggaaacaatatcaagtaacaatatgattattatttttttattcccccaaagcgggcttgctgcttcacccttggggatgaaataatggaagctggttaaagtggatgaggttggaaagagttgccataatgaggtcccacgtggcttcttcgataggagccacaacttggggtgggaagaacttgtccctcaggcttgttgccctctgcagttgatctccaaagttttaaacctgttaaattaattttgacaaataagttaccctcaactcagatcaaaaatgggcagccaagtcttcggtaggaattggagccggtgtaattcctccctaagaggcaacctgttgaatttactctctcagagtaaatggtgggaagggatccctttgtatacttttttaaatactacaaattagtgtcaggcagttcccagaaagagacaagaaatcctagtggcctcccagactgcagggtccccaaggatggaaagggaatgttctgctggttctaccctgtttgttgtgtcttgctatacagaaaaaccacatttcttttatatactgtacgtgggcatatcttgttgttcagtttgggtgtctgctaaagaggaagtgcactggccctctttgaaagggctttacagtgggggcaccaagaccccaaaggcccaggccaggagactgttaaagtgaaaaggcaatctatgactcaccttgctctgccatccctggcagcccccaccggtgtcctgttcctgccacatggagcttgacttcatgccagctataatctcccctgccttcctttaatcccaatttcccctgctcactcttccacagatataaagaacaaacacttagcatcccacactcaccccttctaatcctgaagggaagcccattctaaactcctttcctgcaaacccatttccagctcctagtagctttcctcccaaaggctttctttccaatcctttatagctttggagacgcctccccaattccccagggaaggaaactgttgtgtccaatccccattaaagacaaattgatcagtgcttcccactccaagtcaagctttat

SEQ ID NO: 64252 - DNA, 7143 bp, Homo sapiens
agagcggctcttttaatgagggttgcgacgtctccctccccacacccataaaccagtcgggttggacgtcactgctaattcgtttcagtgatgataggataaaggagggacattaagaaataaattccccctcacgaccctcgctgagctcacggctcagtccctacatatttatgccgcgtttccagccgctgggtgaggagctacttagcgccgcggctcctccgaggggcggccgggcagcgagcagcggccgagcggacgggctcatgatgcctcagatctgatccgcatctaacaggctggcaatgaagatacccagagaatagttcacatctatcatgcgtcacttctagacacagccatcagacgcatctcctcccctttctgcctgaccttaggacacgtcccaccgcctctcttgacgtctgcctggtcaaccatcacttccttagagaataaggagagaggcggatgcaggaaatcatgccaccgacgggccaccagccatgagtgggtgacgctgagctgacgtcaaagacagagagggctgaagccttgtcagcacctgtcaccccggctcctgctctccgtgtagcctgaagcctggatcctcctggtgaaatcatcttggcctgatagcattgtgaggtcttcagacaggacccctcggaagctagttaccatggaggatcacatgttcggtgttcagcaaatccagcccaatgtcatttctgttcgtctcttcaagcgcaaagttgggggcctgggatttctggtgaaggagcgggtcagtaagccgcccgtgatcatctctgacctgattcgtgggggcgccgcagagcagagtggcctcatccaggccggagacatcattcttgcggtcaacggccggcccttggtggacctgagctatgacagcgccctggaggtactcagaggcattgcctctgagacccacgtggtcctcattctgaggggccctgaaggtttcaccacgcacctggagaccacctttacaggtgatgggacccccaagaccatccgggtgacacagcccctgggtccccccaccaaagccgtggatctgtcccaccagccaccggccggcaaagaacagcccctggcagtggatggggcctcgggtcccgggaatgggcctcagcatgcctacgatgatgggcaggaggctggctcactcccccatgccaacggcctggcccccaggcccccaggccaggaccccgcgaagaaagcaaccagagtcagcctccaaggcagaggggagaacaatgaactgctcaaggagatagagcctgtgctgagccttctcaccagtgggagcagaggggtcaagggaggggcacctgccaaggcagagatgaaagatatgggaatccaggtggacagagatttggacggcaagtcacacaaacctctgcccctcggcgtggagaacgaccgagtcttcaatgacctatgggggaagggcaatgtgcctgtcgtcctcaacaacccatattcagagaaggagcagccccccacctcaggaaaacagtcccccacaaagaatggcagcccctccaagtgtccacgcttcctcaaggtcaagaactgggagactgaggtggttctcactgacaccctccaccttaagagcacattggaaacgggatgcactgagtacatctgcatgggctccatcatgcatccttctcagcatgcaaggaggcctgaagacgtccgcacaaaaggacagctcttccctctcgccaaagagtttattgatcaatactattcatcaattaaaagatttggctccaaagcccacatggaaaggctggaagaggtgaacaaagagatcgacaccactagcacttaccagctcaaggacacagagctcatctatggggccaagcacgcctggcggaatgcctcgcgctgtgtgggcaggatccagtggtccaagctgcaggtattcgatgcccgtgactgcaccacggcccacgggatgttcaactacatctgtaaccatgtcaagtatgccaccaacaaagggaacctcaggtctgccatcaccatattcccccagaggacagacggcaagcacgacttccgagtctggaactcccagctcatccgctacgctggctacaagcagcctgacggctccaccctgggggacccagccaatgtgcagttcacagagatatgcatacagcagggctggaaaccgcctagaggccgcttcgatgtcctgccgctcctgcttcaggccaacggcaatgaccctgagctcttccagattcctccagagctggtgttggaagttcccatcaggcaccccaagtttgagtggttcaaggacctggggctgaagtggtacggcctccccgccgtgtccaacatgctcctagagattggcggcctggagttcagcgcctgtcccttcagtggctggtacatgggcacagagattggtgtccgcgactactgtgacaactcccgctacaatatcctggaggaagtggccaagaagatgaacttagacatgaggaagacgtcctccctgtggaaggaccaggcgctggtggagatcaatatcgcggttctctatagcttccagagtgacaaagtgaccattgttgaccatcactccgccaccgagtccttcattaagcacatggagaatgagtaccgctgccgggggggctgccctgccgactgggtgtggatcgtgccccccatgtccggaagcatcacccctgtgttccaccaggagatgctcaactaccggctcaccccctccttcgaataccagcctgatccctggaacacgcatgtctggaaaggcaccaacgggacccccacaaagcggcgagccatcggcttcaagaagctagcagaagctgtcaagttctcggccaagctgatggggcaggctatggccaagagggtgaaagcgaccatcctctatgccacagagacaggcaaatcgcaagcttatgccaagaccttgtgtgagatcttcaaacacgcctttgatgccaaggtgatgtccatggaagaatatgacattgtgcacctggaacatgaaactctggtccttgtggtcaccagcacctttggcaatggagatccccctgagaatggggagaaattcggctgtgctttgatggaaatgaggcaccccaactctgtgcaggaagaaaggaagagctacaaggtccgattcaacagcgtctcctcctactctgactcccaaaaatcatcaggcgatgggcccgacctcagagacaactttgagagtgctggacccctggccaatgtgaggttctcagtttttggcctcggctcacgagcataccctcacttttgcgccttcggacacgctgtggacaccctcctggaagaactgggaggggagaggatcctgaagatgagggaaggggatgagctctgtgggcaggaagaggctttcaggacctgggccaagaaggtcttcaaggcagcctgtgatgtcttctgtgtgggagatgatgtcaacattgaaaaggccaacaattccctcatcagcaatgatcgcagctggaagagaaacaagttccgcctcacctttgtggccgaagctccagaactcacacaaggtctatccaatgtccacaaaaagcgagtctcagctgcccggctccttagccgtcaaaacctccagagccctaaatccagtcggtcaactatcttcgtgcgtctccacaccaacgggagccaggagctgcagtaccagcctggggaccacctgggtgtcttccctggcaaccacgaggacctcgtgaatgccctgatcgagcggctggaggacgcgccgcctgtcaaccagatggtgaaagtggaactgctggaggagcggaacacggctttaggtgtcatcagtaactggacagacgagctccgcctcccgccctgcaccatcttccaggccttcaagtactacctggacatcaccacgccaccaacgcctctgcagctgcagcagtttgcctccctagctaccagcgagaaggagaagcagcgtctgctggtcctcagcaagggtttgcaggagtacgaggaatggaaatggggcaagaaccccaccatcgtggaggtgctggaggagttcccatctatccagatgccggccaccctgctcctgacccagctgtccctgctgcagccccgctactattccatcagctcctccccagacatgtaccctgatgaagtgcacctcactgtggccatcgtttcctaccgcactcgagatggagaaggaccaattcaccacggcgtatgctcctcctggctcaaccggatacaggctgacgaactggtcccctgtttcgtgagaggagcacccagcttccacctgccccggaacccccaagtcccctgcatcctcgttggaccaggcaccggcattgcccctttccgaagcttctggcaacagcggcaatttgatatccaacacaaaggaatgaacccctgccccatggtcctggtcttcgggtgccggcaatccaagatagatcatatctacagggaagagaccctgcaggccaagaacaagggggtcttcagagagctgtacacggcttactcccgggagccagacaaaccaaagaagtacgtgcaggacatcctgcaggagcagctggcggagtctgtgtaccgagccctgaaggagcaagggggccacatatacgtctgtggggacgtcaccatggctgctgatgtcctcaaagccatccagcgcatcatgacccagcaggggaagctctcggcagaggacgccggcgtattcatcagccggatgagggatgacaaccgataccatgaggatatttttggagtcaccctgcgaacgtacgaagtgaccaaccgccttagatctgagtccattgccttcattgaagagagcaaaaaagacaccgatgaggttttcagctcctaactggaccctcttgcccagccggctgcaagttttgtaagcgcggacagacactgctgaacctttcctctgggaccccctgtggccctcgctctgcctcctgtccttgtcgctgtgccctggtttccctcctcgggcttctcgcccctcagtggtttcctcggccctcctgggtttactccttgagttttcctgctgcgatgcaatgcttttctaatctgcagtggctcttacaaaactctgttcccactccctctcttgccgacaagggcaactcacgggtgcatgaaaccactggaacatggccgtcgctgtgggggtttttttctctggggttcccctggaaaggctgcaggaactaggcacaagctctctgagccagtccctcagccactgaagtccccctttctccttttttatgatgacattttggttgtgcgtgcctgtgtgtgtgtgtgtgtgtgtgtgtgtgtgtgtgatgggccaggtctctgtccgtcctcttccctgcacaagtgtgtcgatcttagattgccactgctttcattgaagaccctcaatgccaagaaacgtgtccctggcccatattaatccctcgtgtgtccataattagggtccacgcccatgtacctgaaacatttggaagccccataattgttctagttagaaagggttcagggcatggggagaggagtgggaaattgattaaaggggctgtctcccaatgaaagaggcattcccagaatttgctgcatttagattttgataccagtgagcagagccctcatgtgacatgaacccatccaatggattgtgcaaatcccctccccaaacccacccataccagctagaatcacttgactttgccacatccattgactgaccccctcctccagcaatagcatccaaggggcctggaagttatgttgttcaaagaagcctggtggcaataaggatcttcccactttgccactggatgactttggatgggtcacttgtcctcagtttttcctagtcataatgtcatacgaacctaaagaatatgaatggattaaatgttaaagctttggtgcctggaaacaatatcaagtaacaatatgattattatttttttattcccccaaagcgggcttgctgcttcacccttggggatgaaataatggaagctggttaaagtggatgaggttggaaagagttgccataatgaggtcccacgtggcttcttcgataggagccacaacttggggtgggaagaacttgtccctcaggcttgttgccctctgcagttgatctccaaagttttaaacctgttaaattaattttgacaaataagttaccctcaactcagatcaaaaatgggcagccaagtcttcggtaggaattggagccggtgtaattcctccctaagaggcaacctgttgaatttactctctcagagtaaatggtgggaagggatccctttgtatacttttttaaatactacaaattagtgtcaggcagttcccagaaagagacaagaaatcctagtggcctcccagactgcagggtccccaaggatggaaagggaatgttctgctggttctaccctgtttgttgtgtcttgctatacagaaaaaccacatttcttttatatactgtacgtgggcatatcttgttgttcagtttgggtgtctgctaaagaggaagtgcactggccctctttgaaagggctttacagtgggggcaccaagaccccaaaggcccaggccaggagactgttaaagtgaaaaggcaatctatgactcaccttgctctgccatccctggcagcccccaccggtgtcctgttcctgccacatggagcttgacttcatgccagctataatctcccctgccttcctttaatcccaatttcccctgctcactcttccacagatataaagaacaaacacttagcatcccacactcaccccttctaatcctgaagggaagcccattctaaactcctttcctgcaaacccatttccagctcctagtagctttcctcccaaaggctttctttccaatcctttatagctttggagacgcctccccaattccccagggaaggaaactgttgtgtccaatccccattaaagacaaattgatcagtgcttcccactccaagtcaagctttat

SEQ ID NO: 64253 - DNA, 612 bp, Homo sapiens
gttcctttctttctctctctctctttctttctatctgtcaacagggtctcactctgtcacccaggctggagtgcagtggcatgatcatagctcatggcagcctcaagcacctgaactcaagcagtcctcccacctcatcctcccaagaaactggggtactgcagacatccaccaccacatccagctaatttttcttaattttttgtagagacagggtcttactatgtttcccaggctggccttgaactcctagcctcaagtgatcctctctccccggccccccaaagcactgcaattacaagcatgagccactgcacctgccaactgttacttttattttgccttcttcctggaccccctcaggtcctcatgggaagtatgtggcagctgggttcaagcttgtctctgtccatctccttggcacagggtttgcaggagtacgaggaatggaaatggggcaagaaccccaccatcgtggaggtgctggaggagttcccatctatccagatgccggccaccctgctcctgacccagctgtccctgctgcagccccgctactattccatcagctcctccccagacatgtaccctgatgaagtgcacctcactgtg

SEQ ID NO: 64254 - DNA, 369 bp, Homo sapiens
atattcccaggataattttggttttacttaagcatcactattgccctgaaatgtcaagtcaagtggaaaaataaatgcgaataatcccaccactagcctccagacttgatgtttatgttatttcctttttaaaatgacctttaaaaagttataaattagaaacgtggaaagtagaatggtttcatgcaagaaatactggaataagatccctgttctggccccaaagtcttagacaagtcattcagcctttctaagcgtcagttctcccatctggaaaatgtgggcattcatctctatgggagcttctagctctgtcagtgagtttctgaaacttgcccaggaaggagcagccctagtctgagtgcatgc

SEQ ID NO: 64255 - DNA, 327 bp, Homo sapiens
ccctttttcaaactcagatcaaattgtacattaacaaatatagtaacagcactgctagatttacacctcacagaaccccactgaatttatattcacatgaaaccttccaaagattgtcagctcacttcctcagaagcatgcaaccacagcaagactccaattacccccccaaaaaaaaagctcataaaacacacacttcagatcatttttgttaaatcagagaattagttacttgagaaagcacaacaaatattctcattgtaaatatgaaaaaaatagggacaattgcagggctactgggagtaatacaggagacttacataattt

SEQ ID NO: 64256 - DNA, 157 bp, Homo sapiens
gaaaagaaggaaggaaagaggggagggagggaggaaaggagagagggagggaaagaaggagaaaatgctggagcaaaggaggttggttacatgatttctctaatggcaatgagctgctttctggatgaaatacagaatcagagcgagactccgtctc

SEQ ID NO: 64257 - DNA, 196 bp, Homo sapiens
gatccacccacctctgcctcccaaagtgctgggatgacaagcatgagccaccgctccaggccaacaggagattgttttgaaaacatgggtgaagactgtgtgcccaaatccaccggcattggaggggtcagtgtgggcttggcacaagcccccatcaggaacgaatgggaatttaagagcacctggattttctgaa

SEQ ID NO: 64258 - DNA, 908 bp, Homo sapiens
tgtaattaggcaaatgctgttatttttaataaacaaatgattgtgaatacagactggtccagcaccatgcctggcacctcagtgttccctggagcctgcttcttaaagatcacagttttgcttatttgaggtgtgggacagcagccctactgcagaggtccttcacagggcagcagccagctgtgggtaggcatttccaggaagagcacaaggccttccttcctctctaccccagctgacagtttgctaagctatggagagtctgagtgggtagtgtaggagaaagagcatgaggtttgaagtcagaccaatagatagagattcaagaccctatctcagcactcacagttctaaagaccttttgtgaatcagataacatctttaaacctttgttttctcatctgtaaaatgggaataacaatgataatacctccttcagaattgcattaatatttgcataagattactgagaaatttcagtgaaatgataaaatgaccattgtttgttactgtgaacaacagtaacacttatataatactaaaagtaatgagaatctcttgcaggacaaagcccacaaacgctatctgctaatgagcattgaccagaggaaaaagatgctcaaaaacctccgtaacaccaactatgatgtctttgagaagatatgctgggggctgggaattgagtacaccttcccccctctgtattaccgaagagcccaccgccgattcgtgaccaagaaggctctgtgcattcgggttttccaggagactcaaaagctgaagaagcgaagaagagccttaaaggctgcagcagcagcccaaaaacaagcaaagcggaggaacccagacagccctgccaaagccataccaaagacactcaaagacagccaataaattctgttcaatca

SEQ ID NO: 64259 - DNA, 1709 bp, Homo sapiens
actggcaagaggtttatttaccttttaagaagatttacattcatcgcaaagcagtagagaaagtattcacaattacaagttttctaaagtaaatgctctcagaaaagtgaggggaaggagtcttttccctttttgcgccagggaaaattaaattttctttttcttctaatttgtatccacccttacaccactcatttcacaaataacgtcaccgtaaagatttactaaatgctcactatataccaggtggtctgcatacaactcagttaatcctctcaacaacctaaaagagagatattgttattactatccctacagggcccacataggttaagtgacttgcccacaagatcacatgttgagtaaatggctgagttaggattccagaccaggactgtgcgattccaaactcagcgactttagtctccaggctacgaggctgccagagacatggctgaaacccagtagtagttcttacacggtcccatccttgtctaagggaggggtgaggtggggtggagaggggattgggttgggggtagaaggctaccgcaggcgccatggacctcccaaaataaccctggcccgagggccaggaatgagattaaggacggaacgcatgccctccaaaaagtggcattttagaatttatacagcaccccagcacgctgctaaacgtgggcacacaaccaccacggcccgatcacgcgcagcgggaacccggtctctgagctccgccccgtgcgttgcgtcatcagagtcacgccacctaatccattctctcggtcttcgtctgctccggtattgcaactgcctcgattggtcgatcctgggccagcatggcggcgcccatgtaacccggtccgtgccgcaaagcgaacggcggccgcggcgcgggccccgcgggggttagaggtcaccatgctgagggtcgcgtggaggacgctgagtttgattcggacccgggcagttacccaggtcctagtacccgggctgccgggcggtgggagcgccaagtttcctttcaaccagtggggcctgcagcctcgaagtctcctcctccaggccgcgcgcggatatgtcgtccggaaaccagcccagtctaggctggatgatgacccacctccttctacgctgctcaaagactaccagaatgtccctggaattgagaaggttgatgatgtcgtgaaaagactcttgtctttggaaatggccaacaagaaggagatgctaaaaatcaagcaagaacagtttatgaagaagattgttgcaaacccagaggacaccagatccctggaggctcgaattattgccttgtctgtcaagatccgcagttatgaagaacacttggagaaacatcgaaaggacaaagcccacaaacgctatctgctaatgagcattgaccagaggaaaaagatgctcaaaaacctccgtaacaccaactatgatgtctttgagaagatatgctgggggctgggaattgagtacaccttcccccctctgtattaccgaagagcccaccgccgattcgtgaccaagaaggctctgtgcattcgggttttccaggagactcaaaagctgaagaagcgaagaagagccttaaaggctgcagcagcagcccaaaaacaagcaaagcggaggaacccagacagccctgccaaagccataccaaagacactcaaagacagccaataaattctgttcaatca

SEQ ID NO: 64260 - DNA, 2910 bp, Homo sapiens
actggcaagaggtttatttaccttttaagaagatttacattcatcgcaaagcagtagagaaagtattcacaattacaagttttctaaagtaaatgctctcagaaaagtgaggggaaggagtcttttccctttttgcgccagggaaaattaaattttctttttcttctaatttgtatccacccttacaccactcatttcacaaataacgtcaccgtaaagatttactaaatgctcactatataccaggtggtctgcatacaactcagttaatcctctcaacaacctaaaagagagatattgttattactatccctacagggcccacataggttaagtgacttgcccacaagatcacatgttgagtaaatggctgagttaggattccagaccaggactgtgcgattccaaactcagcgactttagtctccaggctacgaggctgccagagacatggctgaaacccagtagtagttcttacacggtcccatccttgtctaagggaggggtgaggtggggtggagaggggattgggttgggggtagaaggctaccgcaggcgccatggacctcccaaaataaccctggcccgagggccaggaatgagattaaggacggaacgcatgccctccaaaaagtggcattttagaatttatacagcaccccagcacgctgctaaacgtgggcacacaaccaccacggcccgatcacgcgcagcgggaacccggtctctgagctccgccccgtgcgttgcgtcatcagagtcacgccacctaatccattctctcggtcttcgtctgctccggtattgcaactgcctcgattggtcgatcctgggccagcatggcggcgcccatgtaacccggtccgtgccgcaaagcgaacggcggccgcggcgcgggccccgcgggggttagagtcaccacgcccagcccacagatgtcacttctgcctttccattattactcagttttctgaatgccagttgcttctagcatagtgcctgctctagagaacccctcaggaaccaaggcctatctttctgtgttgttccactctacacctaagttgctgtgatggagccatgtggtcggggtcagggttcccactgcactttctgcagtgctcccagaactcagtatgtactgggaagggcctgctgtcgtgacagcctctctttggggccagcttctgcttttgcccccatctttgcagtacagggggtaaattaaacaagaggatgcctgaatgaacgatatcctgggttcttgagagacaagtgggagctgataattctgaaaattcattagtcaaagcatggagataaaggtggcagcaggaaggggagaggcaaggagtagacccgtgacagttttagaatcttatttgtgccaaaatactttactgcattggcttggacctctaatacaatgttgaattgttaaccatgatagcactgtatcctggtctaattcctgaattgaatggctagtcttaccattaagaatgctatttgcggccaggcacggtggctcacacctgtaaccccaccactttgggaggccaaggcaggtggatcacttgaggtcaggagtttgagaccagcctggccaacatggtgaaaccccgtctctactaaaaatagaaaaattagccgtgtgtggtggcgggcgcctgtaatcccagctgctctggagtctgaggcaagagaatcacctgaacctgggaggcagaggctgcggtgagccgagatcgcaccactgcactccagcctgggcaacagagcgagactccgtctcaaaaaaaagaatgctatttgctatgatttttggatgatatctttataatattaagggatgtcccttccttggattttgctttttaagggaaggtaatgtctaagataagcctttgaaatcttgaaattcagagtgatttgggatttatagagagctgtacagagcattggtgattgttattccttgagttcttaaaacgtaaaccaggcctgggcccttccttcctctgtgcccaactctcatcctctgtggtttgtggtttcagttattgccttgtctgtcaagatccgcagttatgaagaacacttggagaaacatcgaaaggacaaagcccacaaacgctatctgctaatgagcattgaccagaggaaaaagatgctcaaaaacctccgtaacaccaactatgatgtctttgagaagatatgctgggggctgggaattgagtacaccttcccccctctgtattaccgaagagcccaccgccgattcgtgaccaagaaggctctgtgcattcgggttttccaggagactcaaaagctgaagaagcgaagaagagccttaaaggctgcagcagcagcccaaaaacaagcaaagcggaggaacccagacagccctgccaaagccataccaaagacactcaaagacagccaataaattctgttcaatcatttaaaatttctgtcttgaagaatgataggagagatgatggggctctttttggcctgaagaggagaaggaatttattctttcattcagctctgagatcccagagttttctgaggcagagtccctgcctcacccaccagagatacacacttatgacatgcctcccacacactcatacaaacaagtacctgtcatccaggtgatgtgtgtcagtggaggcaagacagagcatgtgacagcacagtggaagtgtggccggctgggtaggaagaactgctgtaggagctgccttctggactgggtcctaaaggatgagtaggaattcactatatagagacaggaagggaaggcctcctgggcagaagggattgcaagtacaaaggcaaggaagtctagagaggcatgctgtattcagagaacggggagaatgagaaataaagcttgaaagg

SEQ ID NO: 64261 - DNA, 1214 bp, Homo sapiens
acagatgccttcctcttgtctcaactgcaagaggaatgccttcctcttatactaatcctcctcagcacagaccctttacgggtgtcgggctgggggacggtcaggtctttcccttcccatgaggccatatttcagactatcacatggggagaaaccttggacaatacctggctttcctaggcagaggtccctgcggccttccgcagtttttgtgtccctggaattgagaaggttgatgatgtcgtgaaaagactcttgtctttggaaatggccaacaagaaggagatgctaaaaatcaagcaagaacagtttatgaagaagattgttgcaaacccagaggacaccagatccctggaggctcgaattattgccttgtctgtcaagatccgcagttatgaagaacacttggagaaacatcgaaaggacaaagcccacaaacgctatctgctaatgagcattgaccagaggaaaaagatgctcaaaaacctccgtaacaccaactatgatgtctttgagaagatatgctgggggctgggaattgagtacaccttcccccctctgtattaccgaagagcccaccgccgattcgtgaccaagaaggctctgtgcattcgggttttccaggagactcaaaagctgaagaagcgaagaagagccttaaaggctgcagcagcagcccaaaaacaagcaaagcggaggaacccagacagccctgccaaagccataccaaagacactcaaagacagccaataaattctgttcaatcatttaaaatttctgtcttgaagaatgataggagagatgatggggctctttttggcctgaagaggagaaggaatttattctttcattcagctctgagatcccagagttttctgaggcagagtccctgcctcacccaccagagatacacacttatgacatgcctcccacacactcatacaaacaagtacctgtcatccaggtgatgtgtgtcagtggaggcaagacagagcatgtgacagcacagtggaagtgtggccggctgggtaggaagaactgctgtaggagctgccttctggactgggtcctaaaggatgagtaggaattcactatatagagacaggaagggaaggcctcctgggcagaagggattgcaagtacaaaggcaaggaagtctagagaggcatgctgtattcagagaacggggagaatgagaaataaagcttgaaagg

SEQ ID NO: 64262 - DNA, 1021 bp, Homo sapiens
  misc_feature (71)..(71): n is a, c, g, or t
attgtctctttaaaggacccgtatttaaataaaacaaattgggttgacgagtcgagacttgatcttgtctntggaaatggccaacaaaggagatgctaaaaatcaagcaagaacagtttatgaagaagattgttgcaaacccagaggacaccagatccctggaggctcgaattattgccttgtctgtcaagatccgcagttatgaagaacacttggagaaacatcgaaaggacaaagcccacaaacgctatctgctaatgagcattgaccagaggaaaaagatgctcaaaaacctccgtaacaccaactatgatgtctttgagaagatatgctgggggctgggaattgagtacaccttcccccctctgtattaccgaagagcccaccgccgattcgtgaccaagaaggctctgtgcattcgggttttccaggagactcaaaagctgaagaagcgaagaagagccttaaaggctgcagcagcagcccaaaaacaagcaaagcggaggaacccagacagccctgccaaagccataccaaagacactcaaagacagccaataaattctgttcaatcatttaaaatttctgtcttgaagaatgataggagagatgatggggctctttttggcctgaagaggagaaggaatttattctttcattcagctctgagatcccagagttttctgaggcagagtccctgcctcacccaccagagatacacacttatgacatgcctcccacacactcatacaaacaagtacctgtcatccaggtgatgtgtgtcagtggaggcaagacagagcatgtgacagcacagtggaagtgtggccggctgggtaggaagaactgctgtaggagctgccttctggactgggtcctaaaggatgagtaggaattcactatatagagacaggaagggaaggcctcctgggcagaagggattgcaagtacaaaggcaaggaagtctagagaggcatgctgtattcagagaacggggagaatgagaaataaagcttgaaagg

SEQ ID NO: 64263 - DNA, 1355 bp, Homo sapiens
tgtaattaggcaaatgctgttatttttaataaacaaatgattgtgaatacagactggtccagcaccatgcctggcacctcagtgttccctggagcctgcttcttaaagatcacagttttgcttatttgaggtgtgggacagcagccctactgcagaggtccttcacagggcagcagccagctgtgggtaggcatttccaggaagagcacaaggccttccttcctctctaccccagctgacagtttgctaagctatggagagtctgagtgggtagtgtaggagaaagagcatgaggtttgaagtcagaccaatagatagagattcaagaccctatctcagcactcacagttctaaagaccttttgtgaatcagataacatctttaaacctttgttttctcatctgtaaaatgggaataacaatgataatacctccttcagaattgcattaatatttgcataagattactgagaaatttcagtgaaatgataaaatgaccattgtttgttactgtgaacaacagtaacacttatataatactaaaagtaatgagaatctcttgcaggacaaagcccacaaacgctatctgctaatgagcattgaccagaggaaaaagatgctcaaaaacctccgtaacaccaactatgatgtctttgagaagatatgctgggggctgggaattgagtacaccttcccccctctgtattaccgaagagcccaccgccgattcgtgaccaagaaggctctgtgcattcgggttttccaggagactcaaaagctgaagaagcgaagaagagccttaaaggctgcagcagcagcccaaaaacaagcaaagcggaggaacccagacagccctgccaaagccataccaaagacactcaaagacagccaataaattctgttcaatcatttaaaatttctgtcttgaagaatgataggagagatgatggggctctttttggcctgaagaggagaaggaatttattctttcattcagctctgagatcccagagttttctgaggcagagtccctgcctcacccaccagagatacacacttatgacatgcctcccacacactcatacaaacaagtacctgtcatccaggtgatgtgtgtcagtggaggcaagacagagcatgtgacagcacagtggaagtgtggccggctgggtaggaagaactgctgtaggagctgccttctggactgggtcctaaaggatgagtaggaattcactatatagagacaggaagggaaggcctcctgggcagaagggattgcaagtacaaaggcaaggaagtctagagaggcatgctgtattcagagaacggggagaatgagaaataaagcttgaaagg

SEQ ID NO: 64264 - DNA, 1656 bp, Homo sapiens
actggcaagaggtttatttaccttttaagaagatttacattcatcgcaaagcagtagagaaagtattcacaattacaagttttctaaagtaaatgctctcagaaaagtgaggggaaggagtcttttccctttttgcgccagggaaaattaaattttctttttcttctaatttgtatccacccttacaccactcatttcacaaataacgtcaccgtaaagatttactaaatgctcactatataccaggtggtctgcatacaactcagttaatcctctcaacaacctaaaagagagatattgttattactatccctacagggcccacataggttaagtgacttgcccacaagatcacatgttgagtaaatggctgagttaggattccagaccaggactgtgcgattccaaactcagcgactttagtctccaggctacgaggctgccagagacatggctgaaacccagtagtagttcttacacggtcccatccttgtctaagggaggggtgaggtggggtggagaggggattgggttgggggtagaaggctaccgcaggcgccatggacctcccaaaataaccctggcccgagggccaggaatgagattaaggacggaacgcatgccctccaaaaagtggcattttagaatttatacagcaccccagcacgctgctaaacgtgggcacacaaccaccacggcccgatcacgcgcagcgggaacccggtctctgagctccgccccgtgcgttgcgtcatcagagtcacgccacctaatccattctctcggtcttcgtctgctccggtattgcaactgcctcgattggtcgatcctgggccagcatggcggcgcccatgtaacccggtccgtgccgcaaagcgaacggcggccgcggcgcgggccccgcgggggttagaggtcaccatgctgagggtcgcgtggaggacgctgagtttgattcggacccgggcagttacccaggtcctagtacccgggctgccgggcggtgggagcgccaagtttcctttcaaccagtggggcctgcagcctcgaagtctcctcctccaggccgcgcgcggatatgtcgtccggaaaccagcccagtctaggctggatgatgacccacctccttctacgctgctcaaagactaccagaatgtccctggaattgagaaggttgatgatgtcgtgaaaagactcttgtctttggaaatggccaacaagaaggagatgctaaaaatcaagcaagaacagtttatgaagaagattgttgcaaacccagaggacaccagatccctggaggctcgaattattgccttgtctgtcaagatccgcagttatgaagaacacttggagaaacatcgaaaggacaaagcccacaaacgctatctgctaatgagcattgaccagaggaaaaagatgctcaaaaactgagtacaccttcccccctctgtattaccgaagagcccaccgccgattcgtgaccaagaaggctctgtgcattcgggttttccaggagactcaaaagctgaagaagcgaagaagagccttaaaggctgcagcagcagcccaaaaacaagcaaagcggaggaacccagacagccctgccaaagccataccaaagacactcaaagacagccaataaattctgttcaatca

SEQ ID NO: 64265 - DNA, 1465 bp, Homo sapiens
actggcaagaggtttatttaccttttaagaagatttacattcatcgcaaagcagtagagaaagtattcacaattacaagttttctaaagtaaatgctctcagaaaagtgaggggaaggagtcttttccctttttgcgccagggaaaattaaattttctttttcttctaatttgtatccacccttacaccactcatttcacaaataacgtcaccgtaaagatttactaaatgctcactatataccaggtggtctgcatacaactcagttaatcctctcaacaacctaaaagagagatattgttattactatccctacagggcccacataggttaagtgacttgcccacaagatcacatgttgagtaaatggctgagttaggattccagaccaggactgtgcgattccaaactcagcgactttagtctccaggctacgaggctgccagagacatggctgaaacccagtagtagttcttacacggtcccatccttgtctaagggaggggtgaggtggggtggagaggggattgggttgggggtagaaggctaccgcaggcgccatggacctcccaaaataaccctggcccgagggccaggaatgagattaaggacggaacgcatgccctccaaaaagtggcattttagaatttatacagcaccccagcacgctgctaaacgtgggcacacaaccaccacggcccgatcacgcgcagcgggaacccggtctctgagctccgccccgtgcgttgcgtcatcagagtcacgccacctaatccattctctcggtcttcgtctgctccggtattgcaactgcctcgattggtcgatcctgggccagcatggcggcgcccatgtaacccggtccgtgccgcaaagcgaacggcggccgcggcgcgggccccgcgggggttagaggtcaccatgctgagggtcgcgtggaggacgctgagtttgattcggacccgggcagttacccaggtcctagtacccgggctgccgggcggtgggagcgccaagtttcctttcaaccagtggggcctgcagcctcgaagtctcctcctccaggccgcgcgcggatatgtcgtccggaaaccagcccagtctaggctggatgatgacccacctccttctacgctgctcaaagactaccagaatgtccctggaattgagaaggttgatgatgtcgtgaaaagactcttgtctttggaaatggccaacaagaaggagatgctaaaaatcaagcaagaacagtttatgaagaagattgttgcaaacccagaggacaccagatccctggaggctcgaattattgccttgtctgtcaagatccgcagttatgaagaacacttggagaaacatcgaaaggacaaagcccacaaacgctatctgctaatgagcattgaccagaggaaaaagatgctcaaaaaccctccgtacacctcctaataaaacgggaccggctcat

SEQ ID NO: 64266 - DNA, 2463 bp, Homo sapiens
actggcaagaggtttatttaccttttaagaagatttacattcatcgcaaagcagtagagaaagtattcacaattacaagttttctaaagtaaatgctctcagaaaagtgaggggaaggagtcttttccctttttgcgccagggaaaattaaattttctttttcttctaatttgtatccacccttacaccactcatttcacaaataacgtcaccgtaaagatttactaaatgctcactatataccaggtggtctgcatacaactcagttaatcctctcaacaacctaaaagagagatattgttattactatccctacagggcccacataggttaagtgacttgcccacaagatcacatgttgagtaaatggctgagttaggattccagaccaggactgtgcgattccaaactcagcgactttagtctccaggctacgaggctgccagagacatggctgaaacccagtagtagttcttacacggtcccatccttgtctaagggaggggtgaggtggggtggagaggggattgggttgggggtagaaggctaccgcaggcgccatggacctcccaaaataaccctggcccgagggccaggaatgagattaaggacggaacgcatgccctccaaaaagtggcattttagaatttatacagcaccccagcacgctgctaaacgtgggcacacaaccaccacggcccgatcacgcgcagcgggaacccggtctctgagctccgccccgtgcgttgcgtcatcagagtcacgccacctaatccattctctcggtcttcgtctgctccggtattgcaactgcctcgattggtcgatcctgggccagcatggcggcgcccatgtaacccggtccgtgccgcaaagcgaacggcggccgcggcgcgggccccgcgggggttagagtcaccacgcccagcccacagatgtcacttctgcctttccattattactcagttttctgaatgccagttgcttctagcatagtgcctgctctagagaacccctcaggaaccaaggcctatctttctgtgttgttccactctacacctaagttgctgtgatggagccatgtggtcggggtcagggttcccactgcactttctgcagtgctcccagaactcagtatgtactgggaagggcctgctgtcgtgacagcctctctttggggccagcttctgcttttgcccccatctttgcagtacagggggtaaattaaacaagaggatgcctgaatgaacgatatcctgggttcttgagagacaagtgggagctgataattctgaaaattcattagtcaaagcatggagataaaggtggcagcaggaaggggagaggcaaggagtagacccgtgacagttttagaatcttatttgtgccaaaatactttactgcattggcttggacctctaatacaatgttgaattgttaaccatgatagcactgtatcctggtctaattcctgaattgaatggctagtcttaccattaagaatgctatttgcggccaggcacggtggctcacacctgtaaccccaccactttgggaggccaaggcaggtggatcacttgaggtcaggagtttgagaccagcctggccaacatggtgaaaccccgtctctactaaaaatagaaaaattagccgtgtgtggtggcgggcgcctgtaatcccagctgctctggagtctgaggcaagagaatcacctgaacctgggaggcagaggctgcggtgagccgagatcgcaccactgcactccagcctgggcaacagagcgagactccgtctcaaaaaaaagaatgctatttgctatgatttttggatgatatctttataatattaagggatgtcccttccttggattttgctttttaagggaaggtaatgtctaagataagcctttgaaatcttgaaattcagagtgatttgggatttatagagagctgtacagagcattggtgattgttattccttgagttcttaaaacgtaaaccaggcctgggcccttccttcctctgtgcccaactctcatcctctgtggtttgtggtttcagttattgccttgtctgtcaagatccgcagttatgaagaacacttggagaaacatcgaaaggacaaagcccacaaacgctatctgctaatgagcattgaccagaggaaaaagatgctcaaaaacctccgtaacaccaactatgatgtctttgagaagatatgctgggggctgggaattgagtacaccttcccccctctgtattaccgaagagcccaccgccgattcgtgaccaagaaggctctgtgcattcgggttttccaggagactcaaaagctgaagaagcgaagaagagccttaaaggctgcagcagcagcccaaaaacaagcaaagcggaggaacccagacagccctgccaaagccataccaaagacactcaaagacagccaataaattctgttcaatca

SEQ ID NO: 64267 - DNA, 1508 bp, Homo sapiens
ttcggctaggtagaggccgggtttagttgcttctagcatagtgcctgctctagagaacccctcaggaaccaaggcctatctttctgtgttgttccactctacacctaagttgctgtgatggagccatgtggtcggggtcagggttcccactgcactttctgcagtgctcccagaactcagtatgtactgggaagggcctgctgtcgtgacagcctctctttggggccagcttctgcttttgcccccatctttgcagtacagggggtaaattaaacaagaggatgcctgaatgaacgatatcctgggttcttgagagacaagtgggagctgataattctgaaaattcattagtcaaagcatggagataaaggtggcagcaggaaggggagaggcaaggagtagacccgtgacagttttagaatcttatttgtgccaaaatactttactgcattggcttggacctctaatacaatgttgaattgttaaccatgatagcactgtatcctggtctaattcctgaattgaatggctagtcttaccattaagaatgctatttgcggccaggcacggtggctcacacctgtaaccccaccactttgggaggccaaggcaggtggatcacttgaggtcaggagtttgagaccagcctggccaacatggtgaaaccccgtctctactaaaaatagaaaaattagccgtgtgtggtggcgggcgcctgtaatcccagctgctctggagtctgaggcaagagaatcacctgaacctgggaggcagaggctgcggtgagccgagatcgcaccactgcactccagcctgggcaacagagcgagactccgtctcaaaaaaaagaatgctatttgctatgatttttggatgatatctttataatattaagggatgtcccttccttggattttgctttttaagggaaggtaatgtctaagataagcctttgaaatcttgaaattcagagtgatttgggatttatagagagctgtacagagcattggtgattgttattccttgagttcttaaaacgtaaaccaggcctgggcccttccttcctctgtgcccaactctcatcctctgtggtttgtggtttcagttattgccttgtctgtcaagatccgcagttatgaagaacacttggagaaacatcgaaaggacaaagcccacaaacgctatctgctaatgagcattgaccagaggaaaaagatgctcaaaaacctccgtaacaccaactatgatgtctttgagaagatatgctgggggctgggaattgagtacaccttcccccctctgtattaccgaagagcccaccgccgattcgtgaccaagaaggctctgtgcattcgggttttccaggagactcaaaagctgaagaagcgaagaagagccttaaaggctgcagcagcagcccaaaaacaagcaaagcggaggaacccagacagccctgccaaagccataccaaagacactcaaagacagccaataaattctgttcaatca

SEQ ID NO: 64268 - DNA, 435 bp, Homo sapiens
gctcggtaccccttttagggtctttgctcgaattattgccttgtctgtcaagatccgcagttatgaagaacacttggagaaacatcgaaaggacaaagcccacaaacgctatctgctaatgagcattgaccagaggaaaaagatgctcaaaaacctccgtaacaccaactatgatgtctttgagaagatatgctgggggctgggaattgagtacaccttcccccctctgtattaccgaagagcccaccgccgattcgtgaccaagaaggctctgtgcattcgggttttccaggagactcaaaagctgaagaagcgaagaagagccttaaaggctgcagcagcagcccaaaaacaagcaaagcggaggaacccagacagccctgccaaagccataccaaagacactcaaagacagccaataaattctgttcaatca

SEQ ID NO: 64269 - DNA, 488 bp, Homo sapiens
atgggccagactatggtggattccaagggagtcaaactctgtcctatccacaggaggacccatcctagtgggggatctgagaactgtagagccagataggtgtgtgaaaggtgcaggcacagtgtagggtcttgggaaaagccacctactcgcaacatgaaatatcaaagcaggtgcccacggagtttgcaaaggagaaactgagccgagagatatccagtgctttgcttgagaccctgaatgtcccttctggagttggagagtgggtgaaaagagccaggtctgggagggtgggcagcgagagttgactctgggtgttttctatccccatatttacttgacagcccagtctaggctggatgatgacccacctccttctacgctgctcaaagactaccagaatgtccctggaattgagaagtaagcaggaagaaacctattagaggatgcagggggccctgggaggattgtcgggagtggggaaagac

SEQ ID NO: 64270 - DNA, 2156 bp, Homo sapiens
actggcaagaggtttatttaccttttaagaagatttacattcatcgcaaagcagtagagaaagtattcacaattacaagttttctaaagtaaatgctctcagaaaagtgaggggaaggagtcttttccctttttgcgccagggaaaattaaattttctttttcttctaatttgtatccacccttacaccactcatttcacaaataacgtcaccgtaaagatttactaaatgctcactatataccaggtggtctgcatacaactcagttaatcctctcaacaacctaaaagagagatattgttattactatccctacagggcccacataggttaagtgacttgcccacaagatcacatgttgagtaaatggctgagttaggattccagaccaggactgtgcgattccaaactcagcgactttagtctccaggctacgaggctgccagagacatggctgaaacccagtagtagttcttacacggtcccatccttgtctaagggaggggtgaggtggggtggagaggggattgggttgggggtagaaggctaccgcaggcgccatggacctcccaaaataaccctggcccgagggccaggaatgagattaaggacggaacgcatgccctccaaaaagtggcattttagaatttatacagcaccccagcacgctgctaaacgtgggcacacaaccaccacggcccgatcacgcgcagcgggaacccggtctctgagctccgccccgtgcgttgcgtcatcagagtcacgccacctaatccattctctcggtcttcgtctgctccggtattgcaactgcctcgattggtcgatcctgggccagcatggcggcgcccatgtaacccggtccgtgccgcaaagcgaacggcggccgcggcgcgggccccgcgggggttagaggtcaccatgctgagggtcgcgtggaggacgctgagtttgattcggacccgggcagttacccaggtcctagtacccgggctgccgggcggtgggagcgccaagtttcctttcaaccagtggggcctgcagcctcgaagtctcctcctccaggccgcgcgcggatatgtcgtccggaaaccagcccagtctaggctggatgatgacccacctccttctacgctgctcaaagactaccagaatgtccctggaattgagaaggttgatgatgtcgtgaaaagactcttgtctttggaaatggccaacaagaaggagatgctaaaaatcaagcaagaacagtttatgaagaagattgttgcaaacccagaggacaccagatccctggaggctcgaattattgccttgtctgtcaagatccgcagttatgaagaacacttggagaaacatcgaaaggacaaagcccacaaacgctatctgctaatgagcattgaccagaggaaaaagatgctcaaaaacctccgtaacaccaactatgatgtctttgagaagatatgctgggggctgggaattgagtacaccttcccccctctgtattaccgaagagcccaccgccgattcgtgaccaagaaggctctgtgcattcgggttttccaggagactcaaaagctgaagaagcgaagaagagccttaaaggctgcagcagcagcccaaaaacaagcaaagcggaggaacccagacagccctgccaaagccataccaaagacactcaaagacagccaataaattctgttcaatcatttaaaatttctgtcttgaagaatgataggagagatgatggggctctttttggcctgaagaggagaaggaatttattctttcattcagctctgagatcccagagttttctgaggcagagtccctgcctcacccaccagagatacacacttatgacatgcctcccacacactcatacaaacaagtacctgtcatccaggtgatgtgtgtcagtggaggcaagacagagcatgtgacagcacagtggaagtgtggccggctgggtaggaagaactgctgtaggagctgccttctggactgggtcctaaaggatgagtaggaattcactatatagagacaggaagggaaggcctcctgggcagaagggattgcaagtacaaaggcaaggaagtctagagaggcatgctgtattcagagaacggggagaatgagaaataaagcttgaaagg

SEQ ID NO: 64271 - DNA, 1143 bp, Homo sapiens
ggacgcgtgggtcgacccacgcgttcggcagcctcgaagtctcctcctccaggccgcgcgcggatatgtcgtccggaaaccagcccagtctaggctggatgatgacccacctccttctacgctgctcaaagactaccagaatgtccctggaattgagaaggttgatgatgtcgtgaaaagactcttgtctttggaaatggccaacaagaaggagatgctaaaaatcaagcaagaacagtttatgaagaagattgttgcaaacccagaggacaccagatccctggaggctcgaattattgccttgtctgtcaagatccgcagttatgaagaacacttggagaaacatcgaaaggacaaagcccacaaacgctatctgctaatgagcattgaccagaggaaaaagatgctcaaaaacctccgtaacaccaactatgatgtctttgagaagatatgctgggggctgggaattgagtacaccttcccccctctgtattaccgaagagcccaccgccgattcgtgaccaagaaggctctgtgcattcgggttttccaggagactcaaaagctgaagaagcgaagaagagccttaaaggctgcagcagcagcccaaaaacaagcaaagcggaggaacccagacagccctgccaaagccataccaaagacactcaaagacagccaataaattctgttcaatcatttaaaatttctgtcttgaagaatgataggagagatgatggggctctttttggcctgaagaggagaaggaatttattctttcattcagctctgagatcccagagttttctgaggcagagtccctgcctcacccaccagagatacacacttatgacatgcctcccacacactcatacaaacaagtacctgtcatccaggtgatgtgtgtcagtggaggcaagacagagcatgtgacagcacagtggaagtgtggccggctgggtaggaagaactgctgtaggagctgccttctggactgggtcctaaaggatgagtaggaattcactatatagagacaggaagggaaggcctcctgggcagaagggattgcaagtacaaaggcaaggaagtctagagaggcatgctgtattcagagaacggggagaatgagaaataaagcttgaaagg

SEQ ID NO: 64272 - DNA, 1783 bp, Homo sapiens
actggcaagaggtttatttaccttttaagaagatttacattcatcgcaaagcagtagagaaagtattcacaattacaagttttctaaagtaaatgctctcagaaaagtgaggggaaggagtcttttccctttttgcgccagggaaaattaaattttctttttcttctaatttgtatccacccttacaccactcatttcacaaataacgtcaccgtaaagatttactaaatgctcactatataccaggtggtctgcatacaactcagttaatcctctcaacaacctaaaagagagatattgttattactatccctacagggcccacataggttaagtgacttgcccacaagatcacatgttgagtaaatggctgagttaggattccagaccaggactgtgcgattccaaactcagcgactttagtctccaggctacgaggctgccagagacatggctgaaacccagtagtagttcttacacggtcccatccttgtctaagggaggggtgaggtggggtggagaggggattgggttgggggtagaaggctaccgcaggcgccatggacctcccaaaataaccctggcccgagggccaggaatgagattaaggacggaacgcatgccctccaaaaagtggcattttagaatttatacagcaccccagcacgctgctaaacgtgggcacacaaccaccacggcccgatcacgcgcagcgggaacccggtctctgagctccgccccgtgcgttgcgtcatcagagtcacgccacctaatccattctctcggtcttcgtctgctccggtattgcaactgcctcgattggtcgatcctgggccagcatggcggcgcccatgtaacccggtccgtgccgcaaagcgaacggcggccgcggcgcgggccccgcgggggttagaggtcaccatgctgagggtcgcgtggaggacgctgagtttgattcggacccgggcagttacccaggtcctagtacccgggctgccgggcggtgggagcgccaagtttcctttcaaccagtggggcctgcagcctcgaagtctcctcctccaggccgcgcgcggatatgtcgtccggaaaccagcccagtctaggctggatgatgacccacctccttctacgctgctcaaagactaccagaatgtccctggaattgagaaggttgatgatgtcgtgaaaagactcttgtctttggaaatggccaacaagaaggagatgctaaaaatcaagcaagaacagtttatgaagaagattgttgcaaacccagaggacaccagatccctggaggctcgaattattgccttgtctgtcaagatccgcagttatgaagaacacttggagaaacatcgaaaggacaaagcccacaaacgctatctgctaatgagcattgaccagaggaaaaagatgctcaaaaacctccgtaacaccaactatgatgtctttgagaagatatgctgggggctgggaattgagtacaccttcccccctctgtattaccgaagagcccaccgccgattcgtgaccaagaaggctctgtgcattcgggttttccaggagactcaaaagctgaagaagcgaagaagagccttaaaggctgcagcagcagcccaaaaacaagcaaagcggaggaacccagacagccctgccaaagccataccaatatgatctatcttctaatgtatccatgttgtaattatatatgtgtctgtgtgtgtcgaaatctctagacatacagatatatattcatatatcatatatatatatatacaca

SEQ ID NO: 64273 - DNA, 2451 bp, Homo sapiens
actggcaagaggtttatttaccttttaagaagatttacattcatcgcaaagcagtagagaaagtattcacaattacaagttttctaaagtaaatgctctcagaaaagtgaggggaaggagtcttttccctttttgcgccagggaaaattaaattttctttttcttctaatttgtatccacccttacaccactcatttcacaaataacgtcaccgtaaagatttactaaatgctcactatataccaggtggtctgcatacaactcagttaatcctctcaacaacctaaaagagagatattgttattactatccctacagggcccacataggttaagtgacttgcccacaagatcacatgttgagtaaatggctgagttaggattccagaccaggactgtgcgattccaaactcagcgactttagtctccaggctacgaggctgccagagacatggctgaaacccagtagtagttcttacacggtcccatccttgtctaagggaggggtgaggtggggtggagaggggattgggttgggggtagaaggctaccgcaggcgccatggacctcccaaaataaccctggcccgagggccaggaatgagattaaggacggaacgcatgccctccaaaaagtggcattttagaatttatacagcaccccagcacgctgctaaacgtgggcacacaaccaccacggcccgatcacgcgcagcgggaacccggtctctgagctccgccccgtgcgttgcgtcatcagagtcacgccacctaatccattctctcggtcttcgtctgctccggtattgcaactgcctcgattggtcgatcctgggccagcatggcggcgcccatgtaacccggtccgtgccgcaaagcgaacggcggccgcggcgcgggccccgcgggggttagaggtcaccatgctgagggtcgcgtggaggacgctgagtttgattcggacccgggcagttacccaggtcctagtacccgggctgccgggcggtgggagcgccaagtttcctttcaaccagtggggcctgcagcctcgaagtgaggagctgagaaatgggacggcgggcgtagggaaacagggttcggcgaagatagggaataaggaagcacaggagtaggggagatatacagcggtcaggataagggggaaagggcggtggttgcgcaagaggtgaaacaagatgtgagagacaaggggtagggaagaaatggggcagcggttaggttcagaagcgcatagaccgtggcggacgggcaatgcgaggggcacagaaaggaactgaggggtgggctatttaaggagatggtcctcagccctctcttttctgcgtaggtctcctcctccaggccgcgcgcggatatgtcgtccggaaaccagcccagtctaggctggatgatgacccacctccttctacgctgctcaaagactaccagaatgtccctggaattgagaaggttgatgatgtcgtgaaaagactcttgtctttggaaatggccaacaagaaggagatgctaaaaatcaagcaagaacagtttatgaagaagattgttgcaaacccagaggacaccagatccctggaggctcgaattattgccttgtctgtcaagatccgcagttatgaagaacacttggagaaacatcgaaaggacaaagcccacaaacgctatctgctaatgagcattgaccagaggaaaaagatgctcaaaaacctccgtaacaccaactatgatgtctttgagaagatatgctgggggctgggaattgagtacaccttcccccctctgtattaccgaagagcccaccgccgattcgtgaccaagaaggctctgtgcattcgggttttccaggagactcaaaagctgaagaagcgaagaagagccttaaaggctgcagcagcagcccaaaaacaagcaaagcggaggaacccagacagccctgccaaagccataccaaagacactcaaagacagccaataaattctgttcaatcatttaaaatttctgtcttgaagaatgataggagagatgatggggctctttttggcctgaagaggagaaggaatttattctttcattcagctctgagatcccagagttttctgaggcagagtccctgcctcacccaccagagatacacacttatgacatgcctcccacacactcatacaaacaagtacctgtcatccaggtgatgtgtgtcagtggaggcaagacagagcatgtgacagcacagtggaagtgtggccggctgggtaggaagaactgctgtaggagctgccttctggactgggtcctaaaggatgagtaggaattcactatatagagacaggaagggaaggcctcctgggcagaagggattgcaagtacaaaggcaaggaagtctagagaggcatgctgtattcagagaacggggagaatgagaaataaagcttgaaagg

SEQ ID NO: 64274 - DNA, 1660 bp, Homo sapiens
actggcaagaggtttatttaccttttaagaagatttacattcatcgcaaagcagtagagaaagtattcacaattacaagttttctaaagtaaatgctctcagaaaagtgaggggaaggagtcttttccctttttgcgccagggaaaattaaattttctttttcttctaatttgtatccacccttacaccactcatttcacaaataacgtcaccgtaaagatttactaaatgctcactatataccaggtggtctgcatacaactcagttaatcctctcaacaacctaaaagagagatattgttattactatccctacagggcccacataggttaagtgacttgcccacaagatcacatgttgagtaaatggctgagttaggattccagaccaggactgtgcgattccaaactcagcgactttagtctccaggctacgaggctgccagagacatggctgaaacccagtagtagttcttacacggtcccatccttgtctaagggaggggtgaggtggggtggagaggggattgggttgggggtagaaggctaccgcaggcgccatggacctcccaaaataaccctggcccgagggccaggaatgagattaaggacggaacgcatgccctccaaaaagtggcattttagaatttatacagcaccccagcacgctgctaaacgtgggcacacaaccaccacggcccgatcacgcgcagcgggaacccggtctctgagctccgccccgtgcgttgcgtcatcagagtcacgccacctaatccattctctcggtcttcgtctgctccggtattgcaactgcctcgattggtcgatcctgggccagcatggcggcgcccatgtaacccggtccgtgccgcaaagcgaacggcggccgcggcgcgggccccgcgggggttagaggtcaccatgctgagggtcgcgtggaggacgctgagtttgattcggacccgggcagttacccaggtcctagtacccgggctgccgggcggtgggagcgccaagtttcctttcaaccagtggggcctgcagcctcgaagtctcctcctccaggccgcgcgcggatatgtcgtccggaaaccagcccagtctaggctggatgatgacccacctccttctacgctgctcaaagactaccagaatgtccctggaattgagaaaaggagatgctaaaaatcaagcaagaacagtttatgaagaagattgttgcaaacccagaggacaccagatccctggaggctcgaattattgccttgtctgtcaagatccgcagttatgaagaacacttggagaaacatcgaaaggacaaagcccacaaacgctatctgctaatgagcattgaccagaggaaaaagatgctcaaaaacctccgtaacaccaactatgatgtctttgagaagatatgctgggggctgggaattgagtacaccttcccccctctgtattaccgaagagcccaccgccgattcgtgaccaagaaggctctgtgcattcgggttttccaggagactcaaaagctgaagaagcgaagaagagccttaaaggctgcagcagcagcccaaaaacaagcaaagcggaggaacccagacagccctgccaaagccataccaaagacactcaaagacagccaataaattctgttcaatca

SEQ ID NO: 64275 - DNA, 1183 bp, Homo sapiens
ctcgagtccccgacgagcatcaaccgcatttggggaacccaagacagcctccccagcagcttgccctcggtttcggggacccctgaacaacccaaccaagaagggaaaactagggcgcactctcggtcggggtgggagaggaaaggggctggggcttcacggagtttggagtttgaacccacccgcacccctttgagctaggaagtttgacccttcgacgagcaggtcgcctggggtatgcccctgtctccgtgcctctgtctcagcaccgagcgtcggagagagagcgcgccctccgcaccttctcccactttgggacagactttcccttgcgctgtcagagggacccgaggctgagtacgaggcgaggcggcaggcagctcaggctggctgcgcagcgctgagtggcaccgccgccgctccccaggggcagggcccaccccacacccggctgactctcgctgcccttcctccttccctatcgggctctgcggtctggaggctggagagcggtgaggaccagggactgccctgtccatctcgggcgggtgccggcgtgggtggcggggcgcaggctgggaaagggagggcgcaagtaactggtgtgagaggcaggggttcagggatccttgctcttgagccacgatttccgatgagcccctgccgagagcatgccgctctggactcactcctcaaacataactgctctgctggaacgagagacttcaccaccctgtgcctcagtttcctcatctgaaagtgagtggaggggccttccctgcgagaagtcagagctgtgcccgtgggcaggctggctccgctgttctgctccaaggattacatgtccttcaaacgtccctgcccctgtaagtttcctccccacatccttccaccacttggggccaggcaagggcagagcttggagtcgagctgcagagaacggcttgaggtgtttggccaaagaactgcaggggtccaaccagaggctaatgtggcatgctgggtggggagagggcaacacggaagacccctgacgtctgcaagatgctccctgagaactgaaaatcgcactttggcccattcttctgtatcagcccttcccgaagtgtggatcggagttcctctgagggatgttaatgggatgacacacacccacacacaaataaaagactacatggccaag

SEQ ID NO: 64276 - DNA, 266 bp, Homo sapiens
aaaaaagatttcaaatctatctgacacagaggttcataacacttaattttgcagtagttgtttcctttccatttctttgtgggagaaatataaatgttaaacaggaaaaaaatactcaatgagagggtggcaggaatctttctaggaaccccttggtcagaccaaggtgttattttgagttaaggtagctatagtaaagaagggtatgtttccaaggcagacatagtatgtgccccagggagtcccttcatagctgtgtgagatag

SEQ ID NO: 64277 - DNA, 159 bp, Homo sapiens
aaggagaaagtgctgccggaaagtaatgtgagaagatggtataccaccatgtgtggcctaggacagtctgagaagactctcagggggctgtggcaggatttggggtgggcctaggggctgcagtatgaggctaggaggacaactgtacccctcatctcc

SEQ ID NO: 64278 - DNA, 2171 bp, Homo sapiens
tgctccccttccattaatgccaaatttattacttaaaagtaggatgaaaacagggagaataagagaaggtttacaatcttcattatcatatcgagaaaattatccgtgattttcctaactagcaatttgcctgccatgccgttcagaactgacttgcccattaattacagagatgaaaaatcatctggaattcggaaaagggaactaattccatggctggcagcgatcgcacccgtgcacggagccacatacatgtgcgacatacgtgtgcgctcacatgctataggtcccggccctcttgctggtcttgccaccatcttcctacccagcttggtgacctccctcatggccttgctcggtccaccccatgtgtgtgtggcacctgccctgggacacccctgcaggccctctttctctccaaggggcgcccatctcaatccccacttctgggaagcttgcgtaccccgtgatcacccacgctgattcctgctcttgggggtgtagctggcgcccagggttggggaggatggagagctggggaccagcacacctgggctgtggagcctgcagggagggggtggaagggggggacttgaagcccagcttctattcccagcctgcccaggggagccctttctcctggggggcctagtaggaccctgtgggcacgttggggaggagcctacaggcgcctcagctgcacgggagtgtgtttgcatccagcagtttgggcccccggccggtggcgtctccacctgcacgtgaggctgtgtgatgcttgcaggcatctcggtggggagggtggcagcgggtgcccctcaagaggaacaggaggagtgggagcactgccatccccgctggagcatcgtctttgccctccaccccctccttcctccctggcgagacatgtggccagggacacacaaggctctgggttctgtgtgggttcctctcacggatctgatttccacatgccagacacttccccttcttccagcccctccgtggggaggcagggagaggggctcccgaggcgggggttccctgggtctgaaaccctgaccccagtgaccctgaaggtgccatggcaagacagacagctcctcccaggctgggtttggggcaaagtggttgctattgggcaccctgatggaaggggagagacgggtcctggagtgaggtgggaggccaagtagaaacatggagggggtcccggtgtccccagaatccagatgtctgtctgtctctccacctgtgcataggtgtcctctgcctgtgtggcctggatggtgatctagccaagggtgcatgtggccacgtgaccatcaggcacatccggtgttcataagggtcccttgtgtgctggtgtttgtgttttgcagagggggtggtcatgctgggggaggtagggctgcaagaaggagtagctgtctgtgtgcacacatggagctgtctgcatcttttgtgcacctgcagttgtgtgctcaggatttcttggagcaaggctgggtgcaccttgtcatgcaatctgcacacacttgccaagtgccttccccacccagcaccatgcggggggtgccatgggggctggtggccacgtcctgtcctcatggagctcacactctagcaacacatatggggtttccatcaaagctctcctatcagctgggcgtggtggctcatacctgtaatcccagcactttgggaggctgaggtgggtggatcacctgaggtcaggagcttgagaccagcctggccaacatggtgaaaccccatctctactacaagtacagaaattaggcaggcatggtggtgtgcacctgtagtcccagctaccagggaggctgaggcaggaggattgcttgaattcaggaggcggaggttgcagcgagccgagattgtgccactgcactccagcgtgggcgacagagcaagactcattctcaaaaaaaaaaacccaaaacaaaaaagcaaaactctcctgtcatgcgagttggggagaaggcatgtgtctccttttcgagggtagccccaaattctgactgcagtagcccacaggcttggactgtcctggggtctggcccttcatggtctttctgggccacctcctccctcctcgttgctcctccagtgtgctaagtgtgatcctaccccggggcgtttgcactgct

SEQ ID NO: 64279 - DNA, 420 bp, Homo sapiens
atttttagtagagacagggtttcgccatgttggccaggttggtctcaaactcctgacctcagatgatccacccacctgggcctcccaaagtgctgggattacaggcctcagccatcgcgcccagctcagttttttttttaacaaaatataacaggaggaatatatcaagtacatgacatgtaataaatattttgtgtatcttttgtcatatgtattacacatacgtgtgtaatgggttacagtttacaatgaatttcttactgtggatcacatccagaagttttaaaagattggtagagaagccatattcacttgggtgtttctaaaatggaagcacagtgctggtgaatgatacacacttattttgtaattgagctgtatgcatttaatcataaataaataatctcatttatttaaatc

SEQ ID NO: 64280 - DNA, 452 bp, Homo sapiens
ataaatttacaggaattcataatccaggaacatgacctagaattgttagggtggatatgtcatgtgtttgtattgtgctatgattaaggcaatgatacagttgacaggaatcacaagtcaattgggcatcatctacctggaggtgggttttttttgctgctaagaaaatataaggattaaaaacaaattgtaaattgagtggtaatattttctacaagggtaacattaaaactgtgtttagcacaattactattattggatagtgtcccaatccaaatgctgccattcataaatgggagtgctgctttccatattgactcctgaattggacctctctttccttgataatgccattgaggcaaaggtgagctaaagcatgtgctgtgtcaagcaatttgggcagcagattgagattgaattgcaatgtgatgtagtgggagatgttaaagttt

SEQ ID NO: 64281 - DNA, 406 bp, Homo sapiens
gtaaaccctactgggccataaaacaaatctcaataaatttaaaatgatccaaattcatacaaatatattctcagaccacaatggaaataatgtaaaattagtaacagaaagatatttgaaaaaattccttaaatatttgaaaaccaattataacacacttctaaataacccatgggtcaaataaggaatcaaaaatggaaaataaaaagtagtttgaactaaatacaaatggatatacaacataatcagactttgtgagatgctgctaaagcagtactttgggggaaatttttagcactaaatgcttatattggaaatgaataaagatctctaattagtgacctcagcttccactctaagcaaccagaagataagtacaaattaaaactaagcagaaaaaaggaaa

SEQ ID NO: 64282 - DNA, 571 bp, Homo sapiens
ttttgtgggggcgtcgaccaaaagtagagtactctctgcccagcttctacagttaccaattttcaaagtctggtctatttgatttcatctagttcccgtcacgctgtcttttctgtactgattattttgaagcaaatctcagatgtcataacatttcgtctaaattggttctttatgtcagcttgatagcagtaagaagcagagaaaagttctgagcaagagagttacataaagaggtggagcttaatttcagagttccttttaagccagatcttcggctgggcatggtggctcacgcctgtaatcccagcacttggggaggccagggtgggtggatcacttgaggccaggagttcaagacctgcctggccaatatggtgaaaccctgtctctactaaaaaggcaaaaaattagccgagaatggtggtgcatgcctgtagttccagctactcgggaggctgagacatgagaatcgcttgaacccaggaggcggagattgcagtgagccgagatcatgccactgcactccagcctgagtgacagagcaagactctgtctccaaaaaaaaaga

SEQ ID NO: 64283 - DNA, 676 bp, Homo sapiens
atgaaatggtctttaatatttccacaataatcctgtgctatatttgttctaagaaacaaagtaactctatacacttcaagactttacaggattttttaaatcctgtattgttggatcaattaatagagatgcaaaaaaaactttatagagatgtaaaaacaaaactataatggatctcctatttttctttaaatacaaaaaaaaaaaggtaaatgaactattctccttgtaaagctaaattccccattctgtctaataaaggaagactgaaaaaaggttttaaagaacataaatggaaagatacaaatgctttgaaggaataaacgaaatgttaaaacagggtcaatccatttgaagaaaaagttggacaaaataatcagcattgctccctcttttatttaatatttgggtactgattatatccacatggaagtagaaggtaaggagtttaggaaaatactagaatctactctgcttacattcttgtttaagtgtttacacagtttggttcaattataaacatttggccttttactatgttatttttattttgtatgaatacattatcctccttatttatttttgttacatttattacttatgttattttgttatgcatttacaactccatttttaaataaagtgtttctggaactttaaaaaaaagaatgaagat

SEQ ID NO: 64284 - DNA, 623 bp, Homo sapiens
atgaaatggtctttaatatttccacaataatcctgtgctatatttgttctaagaaacaaagtaactctatacacttcaagactttacaggattttttaaatcctgtattgttggatcaattaatagagatgcaaaaaaaactttatagagatgtaaaaacaaaactataatggatctcctatttttctttaaatacaaaaaaaaaaaggaagactgaaaaaaggttttaaagaacataaatggaaagatacaaatgctttgaaggaataaacgaaatgttaaaacagggtcaatccatttgaagaaaaagttggacaaaataatcagcattgctccctcttttatttaatatttgggtactgattatatccacatggaagtagaaggtaaggagtttaggaaaatactagaatctactctgcttacattcttgtttaagtgtttacacagtttggttcaattataaacatttggccttttactatgttatttttattttgtatgaatacattatcctccttatttatttttgttacatttattacttatgttattttgttatgcatttacaactccatttttaaataaagtgtttctggaactttaaaaaaaagaatgaagat

SEQ ID NO: 64285 - DNA, 448 bp, Homo sapiens
gagatctggggctggaacattgtgttggaggacagatttgcttccgtatcctttaagtacatatcttttcctcttttccctaggacactctggacttcagccaacaggattcctgagctgaagtgaagatgaccacattcaaggaaaaaccttctgccccagctttgcaggatgaaacacttccccgcttggctctcattcttccacaagagagacctttctccggacctggttgctactggttcagcaactctgcagaaaatgtcctcccctgtggctgcctcagctcatgcctttggcctgaagtcccagcattgatggcagcccctcatcttccaagttttgtgctcccctttacctaacgcttcctgcctcccatgcatctgtactcctcctgtgccacaaacacattacattattaaatgtttctcaaacatggagttaaaaa

SEQ ID NO: 64286 - DNA, 383 bp, Homo sapiens
gcaaaggacttgaagagctatttcttcaaagaagtttaaaaatggccatgaagcacataaagagatgctcaatgtcattagggaattgcaaatcaaaaccacaaggatgaaacacttccccgcttggctctcattcttccacaagagagacctttctccggacctggttgctactggttcagcaactctgcagaaaatgtcctcccctgtggctgcctcagctcatgcctttggcctgaagtcccagcattgatggcagcccctcatcttccaagttttgtgctcccctttacctaacgcttcctgcctcccatgcatctgtactcctcctgtgccacaaacacattacattattaaatgtttctcaaacatggagttaaaaa

SEQ ID NO: 64287 - DNA, 1242 bp, Homo sapiens
gggcacgagggttctccctgagtgagactcacctgctcctctggcccctggtcctgtcctgttctccagcatggtgtgtctgaagctccctggaggctcctgcatggcagctctgacagtgacactgatggtgctgagctccccactggctttggctggggacacccaaccacgtttcctgtggcagggtaagtataagtgtcatttcttcaacgggacggagcgggtgcagttcctggaaagactcttctataaccaggaggagttcgtgcgcttcgacagcgacgtgggggagtaccgggcggtgacggagctagggcggcctgtcgccgagtcctggaacagccagaaggacatcctggaggacaggcggggccaggtggacaccgtgtgcagacacaactacggggttggtgagagcttcacagtgcagcggcgagtccatcctgaggtgactgtgtatcctgccaagactcagcccctgcagcaccacaacctcctggtctgctctgtgagtggtttctatccaggcagcattgaagtcaggtggttccggaacggccaggaagagaaggctggggtggtgtccacaggcctgatccagaatggagactggaccttccagaccctggtgatgctggaaacagttcctcggagtggagaagtttacacctgccaagtggagcacccaagtgtgatgagccctctcacagtggaatggagagcacggtctgaatctgcacagagcaagatgctgagtggagtcgggggctttgtgctgggcctgctcttccttggggccgggttgttcatctacttcaggaatcagaaaggacactctggacttcagccaacaggattcctgagctgaagtgaagatgaccacattcaaggaaaaaccttctgccccagctttgcaggatgaaacacttccccgcttggctctcattcttccacaagagagacctttctccggacctggttgctactggttcagcaactctgcagaaaatgtcctcccctgtggctgcctcagctcatgcctttggcctgaagtcccagcattgatggcagcccctcatcttccaagttttgtgctcccctttacctaacgcttcctgcctcccatgcatctgtactcctcctgtgccacaaacacattacattattaaatgtttctcaaacatggagttaaaaaaaaaacaaggcaaaaaggggggccggccaaaaaatccccaaggg

SEQ ID NO: 64288 - DNA, 1172 bp, Homo sapiens
gggcacgagggttctccctgagtgagactcacctgctcctctggcccctggtcctgtcctgttctccagcatggtgtgtctgaagctccctggaggctcctgcatggcagctctgacagtgacactgatggtgctgagctccccactggctttggctggggacacccaaccacgtttcctgtggcagggtaagtataagtgtcatttcttcaacgggacggagcgggtgcagttcctggaaagactcttctataaccaggaggagttcgtgcgcttcgacagcgacgtgggggagtaccgggcggtgacggagctagggcggcctgtcgccgagtcctggaacagccagaaggacatcctggaggacaggcggggccaggtggacaccgtgtgcagacacaactacggggttggtgagagcttcacagtgcagcggcgagtccatcctgaggtgactgtgtatcctgccaagactcagcccctgcagcaccacaacctcctggtctgctctgtgagtggtttctatccaggcagcattgaagtcaggtggttccggaacggccaggaagagaaggctggggtggtgtccacaggcctgatccagaatggagactggaccttccagaccctggtgatgctggaaacagttcctcggagtggagaagtttacacctgccaagtggagcacccaagtgtgatgagccctctcacagtggaatggagagcacggtctgaatctgcacagagcaagatgctgagtggagtcgggggctttgtgctgggcctgctcttccttggggccgggttgttcatctacttcaggaatcagaaaggacactctggacttcagccaacaggattcctgagctgaagtgaagatgaccacattcaaggaaaaaccttctgccccagctttgcaggatgaaacacttccccgcttggctctcattcttccacaagagagacctttctccggacctggttgctactggttcagcaactctgcagaaaatgtcctcccctgtggctgcctcagctcatgcctttggcctgaagtcccagcattgatggcagcccctcatcttccaagttttgtgctcccctttacctaacgcttcctgcctcccatgcatctgtactcctcctgtggctgatcctgttggctggcgaca

SEQ ID NO: 64289 - DNA, 1198 bp, Homo sapiens
gggcacgagggttctccctgagtgagactcacctgctcctctggcccctggtcctgtcctgttctccagcatggtgtgtctgaagctccctggaggctcctgcatggcagctctgacagtgacactgatggtgctgagctccccactggctttggctggggacacccaaccacgtttcctgtggcagggtaagtataagtgtcatttcttcaacgggacggagcgggtgcagttcctggaaagactcttctataaccaggaggagttcgtgcgcttcgacagcgacgtgggggagtaccgggcggtgacggagctagggcggcctgtcgccgagtcctggaacagccagaaggacatcctggaggacaggcggggccaggtggacaccgtgtgcagacacaactacggggttggtgagagcttcacagtgcagcggcgagtccatcctgaggtgactgtgtatcctgccaagactcagcccctgcagcaccacaacctcctggtctgctctgtgagtggtttctatccaggcagcattgaagtcaggtggttccggaacggccaggaagagaaggctggggtggtgtccacaggcctgatccagaatggagactggaccttccagaccctggtgatgctggaaacagttcctcggagtggagaagtttacacctgccaagtggagcacccaagtgtgatgagccctctcacagtggaatggagagcacggtctgaatctgcacagagcaagatgctgagtggagtcgggggctttgtgctgggcctgctcttccttggggccgggttgttcatctacttcaggaatcagaaaggacactttggacttcagccaacaggattcctgagctgaagtgaagatgaccacattcaaggaaaaaccttctgccccagctttgcaggatgaaacacttccccgcttggctctcattcttccacaagagagacctttctccggacctggttgctactggttcagcaactctgcagaaaatgtcctcccctgtggctgcctcagctcatgcctttggcctgaagtcccagcattgatggcagcccctcatcttccaagttttgtgctcccctttacctaacgcttcctgcctcccatgcatctgtactcctcctgtgccacaaacacattacattattaaatgtttctcaaacatggagttaaaaa

SEQ ID NO: 64290 - DNA, 1105 bp, Homo sapiens
tgcgtaaccatggtgatagctgactctagagggtaaacagacgaagcgagcgctggctttgactggcgaggcccgaccacgtttcctgtggcagggtaagtataagtgtcatttcttcaacgggacggagcgggtgcagttcctggaaagactcttctataaccaggaggagttcgtgcgcttcgacagcgacgtgggggagtaccgggcggtgacggagctagggcggcctgtcgccgagtcctggaacagccagaaggacatcctggaggacaggcggggccaggtggacaccgtgtgcagacacaactacggggttggtgagagcttcacagtgcagcggcgagtccatcctgaggtgactgtgtatcctgccaagactcagcccctgcagcaccacaacctcctggtctgctctgtgagtggtttctatccaggcagcattgaagtcaggtggttccggaacggccaggaagagaaggctggggtggtgtccacaggcctgatccagaatggagactggaccttccagaccctggtgatgctggaaacagttcctcggagtggagaagtttacacctgccaagtggagcacccaagtgtgatgagccctctcacagtggaatggagagcacggtctgaatctgcacagagcaagatgctgagtggagtcgggggctttgtgctgggcctgctcttccttggggccgggttgttcatctacttcaggaatcagaaaggacactctggacttcagccaacaggattcctgagctgaagtgaagatgaccacattcaaggaaaaaccttctgccccagctttgcaggatgaaacacttccccgcttggctctcattcttccacaagagagacctttctccggacctggttgctactggttcagcaactctgcagaaaatgtcctcccctgtggctgcctcagctcatgcctttggcctgaagtcccagcattgatggcagcccctcatcttccaagttttgtgctcccctttacctaacgcttcctgcctcccatgcatctgtactcctcctgtgccacaaacacattacattattaaatgtttctcaaacatggagttaaaaa

SEQ ID NO: 64291 - DNA, 1291 bp, Homo sapiens
gggcacgagggttctccctgagtgagactcacctgctcctctggcccctggtcctgtcctgttctccagcatggtgtgtctgaagctccctggaggctcctgcatggcagctctgacagtgacactgatggtgctgagctccccactggctttggctggggacacccaaccacgttacctgtggcaaggtaagtataaggtgtccattctctttctaacgggcgacggagctgcggtgacagttgtcactggcacataggaactctatcttattacacccaccgggagaggagattcgctggctgcttcggagcacgacagtagcctgctggcggtgaggtacccgcggacggatgacagtgaggtctagtggctggcctgacgaccgagtctctggacaacagtcagcacaggaccatccttggcagggacgcagcgctgggtcccaggtggacaaccagagttgcgacggcacaccaacgtcacgggtggttaggtcgcatgacgcttcactagtgcgacgcagcggcgagtccatcctgaggtgactgtgtatcctgccaagactcagcccctgcagcaccacaacctcctggtctgctctgtgagtggtttctatccaggcagcattgaagtcaggtggttccggaacggccaggaagagaaggctggggtggtgtccacaggcctgatccagaatggagactggaccttccagaccctggtgatgctggaaacagttcctcggagtggagaagtttacacctgccaagtggagcacccaagtgtgatgagccctctcacagtggaatggagagcacggtctgaatctgcacagagcaagatgctgagtggagtcgggggctttgtgctgggcctgctcttccttggggccgggttgttcatctacttcaggaatcagaaaggacactctggacttcagccaacaggattcctgagctgaagtgaagatgaccacattcaaggaaaaaccttctgccccagctttgcaggatgaaacacttccccgcttggctctcattcttccacaagagagacctttctccggacctggttgctactggttcagcaactctgcagaaaatgtcctcccctgtggctgcctcagctcatgcctttggcctgaagtcccagcattgatggcagcccctcatcttccaagttttgtgctcccctttacctaacgcttcctgcctcccatgcatctgtactcctcctgtgccacaaacacattacattattaaatgtttctcaaacatggagttaaaaa

SEQ ID NO: 64292 - DNA, 404 bp, Homo sapiens
gactctataggatcccccacgcacttgggaatcagaaaggacactctggacttcagccaacaggattcctgagctgaagtgaagatgaccacattcaaggaaaaaccttctgccccagctttgcaggatgaaacacttccccgcttggctctcattcttccacaagagagacctttctccggacctggttgctactggttcagcaactctgcagaaaatgtcctcccctgtggctgcctcagctcatgcctttggcctgaagtcccagcattgatggcagcccctcatcttccaagttttgtgctcccctttacctaacgcttcctgcctcccatgcatctgtactcctcctgtgccacaaacacattacattattaaatgtttctcaaacatggagttaaaaa

SEQ ID NO: 64293 - DNA, 1198 bp, Homo sapiens
gggcacgagggttctccctgagtgagactcacctgctcctctggcccctggtcctgtcctgttctccagcatggtgtgtctgaagctccctggaggctcctgcatggcagctctgacagtgacactgatggtgctgagctccccactggctttggctggggacacccaaccacgtttcctgtggcagggtaagtataagtgtcatttcttcaacgggacggagcgggtgcagttcctggaaagactcttctataaccaggaggagttcgtgcgcttcgacagcgacgtgggggagtaccgggcggtgacggagctagggcggcctgtcgccgagtcctggaacagccagaaggacatcctggaggacaggcggggccaggtggacaccgtgtgcagacacaactacggggttggtgagagcttcacagtgcagcggcgagtccatcctgaggtgactgtgtatcctgccaagactcagcccctgcagcaccacaacctcctggtctgctctgtgagtggtttctatccaggcagcattgaagtcaggtggttccggaacggccaggaagagaaggctggggtggtgtccacaggcctgatccagaatggagactggaccttccagaccctggtgatgctggaaacagttcctcggagtggagaagtttacacctgccaagtggagcacccaagtgtgatgagccctctcacagtggaatggagagcacggtctgaatctgcacagagcaagatgctgagtggagtcgggggctttgtgctgggcctgctcttccttggggccgggttgttcatctacttcaggaatcagaaaggacactctggacttcagccaacaggattcctgagctgaagtgaagatgaccacattcaaggaaaaaccttctgccccagctttgcaggatgaaacacttccccgcttggctctcattcttccacaagagagacctttctccggacctggttgctactggttcagcaactctgcagaaaatgtcctcccctgtggctgcctcagctcatgcctttggcctgaagtcccagcattgatggcagcccctcatcttccaagttttgtgctcccctttacctaacgcttcctgcctcccatgcatctgtactcctcctgtgccacaaacacattacattattaaatgtttctcaaacatggagttaaaaa

SEQ ID NO: 64294 - DNA, 1231 bp, Homo sapiens
gggcacgagggttctccctgagtgagactcacctgctcctctggcccctggtcctgtcctgttctccagcatggtgtgtctgaagctccctggaggctcctgcatggcagctctgacagtgacactgatggtgctgagctccccactggctttggctggggacacccaaccacgtttcctgtggcagggtaagtataagtgtcatttcttcaacgggacggagcgggtgcagttcctggaaagactcttctataaccaggaggagttcgtgcgcttcgacagcgacgtgggggagtaccgggcggtgacggagctagggcggcctgtcgccgagtcctggaacagccagaaggacatcctggaggacaggcggggccaggtggacaccgtgtgcagacacaactacggggttggtgagagcttcacagtgcagcggcgagtccatcctgaggtgactgtgtatcctgccaagactcagcccctgcagcaccacaacctcctggtctgctctgtgagtggtttctatccaggcagcattgaagtcaggtggttccggaacggccaggaagagaaggctggggtggtgtccacaggcctgatccagaatggagactggaccttccagaccctggtgatgctggaaacagttcctcggagtggagaagtttacacctgccaagtggagcacccaagtgtgatgagccctctcacagtggaatggagagcacggtctgaatctgcacagagcaagatgctgagtggagtcgggggctttgtgctgggcctgctcttccttggggccgggttgttcatctacttcaggaatcagaaaggacactctggacttcagccaacaggattcctgagctgaagtgaagatgaccacattcaaggaaaaaccttctgccccagctttgcaggatgaaacacttccccgcttggctctcattcttccacaagagagacctttctccggacctggttgctactggttcagcaactctgcagaaaatgtcctcccctgtggctgcctcagctcatgcctttggcctgaagtcccagcattgatggcagcccctcatcttccaagttttgtgctcccctttacctaacgcttcctgcctcccatgcatctgtactcctcctgtgccacaaacacattacattattaaatgtttctcaaacatggagttaaaaattaaaaatcgtctggtcatttggctccaaggac

SEQ ID NO: 64295 - DNA, 1569 bp, Homo sapiens
ccatcactttcactgctctttaagctcccccagcagagtggagaggtctgttttcccttgtttggattcctagaggcagcacaggccaaacacaaggtcatcactaaggaagtgtgcacaggatgaacgcggtgggtgctgtttaagggaagggtaaagcctttaaagggtaaagggctgagagaaggagcagagagtgtgtttggggtggaggcacccaggaggagtccgtgcaggctgcggtgctggacggatcctcctccagctcctgcttagaggtctccagaaccggctggaggcagggagggggtcccaaaagccttgggatcagaaggggttttcccgcctggtcccccagaccccccgttcgcctcaggaagacggaggatgagcctctgggctgcgcgtggtcggggttatggttgggatcagttaaggttccagtgccagcaccccgcccagggagccccggatggtggcgtctctgttagtgtcttccccggaggccgcccctgtgaccggatccttcgtgtccccacagcacgtttcctgtggcagggtaagtataagtgtcatttcttcaacgggacggagcgggtgcagttcctggaaagactcttctataaccaggaggagttcgtgcgcttcgacagcgacgtgggggagtaccgggcggtgacggagctagggcggcctgtcgccgagtcctggaacagccagaaggacatcctggaggacaggcggggccaggtggacaccgtgtgcagacacaactacggggttggtgagagcttcacagtgcagcggcgagtccatcctgaggtgactgtgtatcctgccaagactcagcccctgcagcaccacaacctcctggtctgctctgtgagtggtttctatccaggcagcattgaagtcaggtggttccggaacggccaggaagagaaggctggggtggtgtccacaggcctgatccagaatggagactggaccttccagaccctggtgatgctggaaacagttcctcggagtggagaagtttacacctgccaagtggagcacccaagtgtgatgagccctctcacagtggaatggagagcacggtctgaatctgcacagagcaagatgctgagtggagtcgggggctttgtgctgggcctgctcttccttggggccgggttgttcatctacttcaggaatcagaaaggacactctggacttcagccaacaggattcctgagctgaagtgaagatgaccacattcaaggaaaaaccttctgccccagctttgcaggatgaaacacttccccgcttggctctcattcttccacaagagagacctttctccggacctggttgctactggttcagcaactctgcagaaaatgtcctcccctgtggctgcctcagctcatgcctttggcctgaagtcccagcattgatggcagcccctcatcttccaagttttgtgctcccctttacctaacgcttcctgcctcccatgcatctgtactcctcctgtgccacaaacacattacattattaaatgtttctcaaacatggagttaaaaa

SEQ ID NO: 64296 - DNA, 717 bp, Homo sapiens
tcgtgccgaattcggcacgagcggcacgagccagcatggtgtgtctgaagctccctggaggctcctgcatggcagctctgacagtgacactgatggtgctgagctccccactggctttggctggggacacccaaccacgtttcctgtggcagggtaagtataagtgtcatttcttcaacgggacggagcgggtgcagttcctggaaagactcttctataaccaggaggagttcgtgcgcttcgacagcgacgtgggggagtaccgggcggtgacggagctagggcggcctgtcgccgagtcctggaacagccagaaggacatcctggaggacaggcggggccaggtggacaccgtgtgcagacacaactacggggttggtgagagcttcacagtgcagcggcgagtccatcctgaggtgactgtgtatcctgccaagactcagcccctgcagcaccacaacctcctggttgctactggttcagcaactctgcagaaaatgtcctcccctgtggctgcctcagctcatgcctttggcctgaagtcccagcattgatggcagcccctcatcttccaagttttgtgctcccctttacctaacgcttcctgcctcccatgcatctgtactcctcctgtgccacaaacacattacattattaaatgtttctcaaacatggagttaaaaattaaaaatcgtctggtcatttggctccaaggac

SEQ ID NO: 64297 - DNA, 3705 bp, Homo sapiens
  misc_feature (21)..(21): n is a, c, g, or t
aggtgacggcgcggcgggctntggctgcggaggttgaggggcgtccgaggcgcggaggggctggctgggcaggaggggttggcggggcagcagggccgcggccatggggagcttgaaggaggagctgctcaaagccatctggcacgccttcaccgcactcgaccaggaccacagcggcaaggtctccaagtcccagctcaaggtcctttcccataacctgtgcacggtgctgaaggttcctcatgacccagttgcccttgaagagcacttcagggatgatgatgagggtccagtgtccaaccagggctacatgccttatttaaacaggttcattttggaaaaggtccaagacaactttgacaagattgaattcaataggatgtgttggaccctctgtgtcaaaaaaaacctcacaaagaatcccctgctcattacagaagaagatgcatttaaaatatgggttattttcaactttttatctgaggacaagtatccattaattattgtgtcagaagagattgaatacctgcttaagaagcttacagaagctatgggaggaggttggcagcaagaacaatttgaacattataaaatcaactttgatgacagtaaaaatggcctttctgcatgggaacttattgagcttattggaaatggacagtttagcaaaggcatggaccggcagactgtgtctatggcaattaatgaagtctttaatgaacttatattagatgtgttaaagcagggttacatgatgaaaaagggccacagacggaaaaactggactgaaagatggtttgtactaaaacccaacataatttcttactatgtgagtgaggatctgaaggataagaaaggagacattctcttggatgaaaattgctgtgtagagtccttgcctgacaaagatggaaagaaatgcctttttctcgtaaaatgttttgataagacttttgaaatcagtgcttcagataagaagaagaaacaggagtggattcaagccattcattctactattcatctgttgaagctgggcagccctccaccacacaaagaagcccgccagcgtcggaaagaactccggaagaagcagctggctgaacaagaggaactggagcgacaaatgaaggaactccaggccgccaatgaaagcaagcagcaggagctggaggccgtgcggaagaaactggaggaagcagcatctcgtgcagcagaagaggaaaagaaacgccttcagactcaagtggaacttcaggccaggttcagcacagagctggaaagagagaagcttatcagacagcagatggaagaacaggttgctcaaaagtcctctgaactggaacagtatttacagcgagtacgggagctggaagacatgtacctaaagctgcaggaggctcttgaagatgagagacaggcccggcaagatgaagagacagtgcggaagcttcaggccaggttgttggaggaagagtcttccaagagggctgaactagaaaagtggcacttggagcagcagcaggccattcagacaaccgaggcggagaagcaggagttggagaatcagcgtgtcctgaaggaacaggccctgcaggaggccatggagcagctggaggagcttgagttagaacggaagcaagcacttgagcagtacgaggaagttaaaaagaagctggagatggcaactaataagaccaagagctggaaggacaaagtggcccatcatgaaggattaattcgactgatagaaccaggttcaaagaaccctcacctgatcactaactggggacctgcagctttcactgaggcagaacttgaagagagagagaagaactggaaagagaaaaagaccacggagtgactgagcttgctggcagtcacgtcagttatgtagatactgcatggcaggagagctttacgctaaagacaaaagaaacagctttgggggccgggcgtggtggctcacgcctgtaatcccagcactttgggaggccgaggcgggtggatcacctgaggtcaggagttcaagaccagcctggccaacctggtgaaaccctgtctctactaaaaatacaaaaaaaattagctgagcgtggtggcgggcgcctgtaatcccagctacttgggaggctgaggcaggagaatcacttgaacgtgggaggcggaggttgcagcgagctgagatcatgccgttgtactccagcttgggcaacagagtgagactccatctcaaaacaaaacaaaacaaaacaaaacaaaaaaacccggctttgctgcttttaactcttcttccttctgtgcctctctaagtgggtcagtatcctaaggaagccttcttatttatcttcctgcaaacaagggttacctgaaaagaaaaaaaaagtcaacattgtcaagctgtttgtttactctttctttgaaaacatcaccttctgaaatttgtcttttagctctctcagattcttccccaaatgaggcagggtgcagacagcacagtcagctctgcagagtttggaggggctcactgccactgggtactcagaacctctgtggactggatgtcagctctttcctttggcagcgtgtttccttttccgagtatgtgctgttaaactagattggccggttcgctttccatttcctgacacttgacatggaatgcctttgaccattggtgctctgacagagaagtcatggagtcattgccatttcctggttgcccttttggaatgtgatcctgttagtagaggttttctagcttctactaagatatttctttccctaaccatcatacacttggcatgtttcattcccatctcctttcccctcaccttaaaggagactacccctttgccccatattgtcaacctaattttctctcgtactctctctagtgaatgatgtgctaccaagtatatgccaggctgtgagaggattatactgagtagtagaaagaagctaatttgaaataaaaattatttgtataattaagaaagcagattagatgcacatggtcaacaggaagttgactgtatgtctgctagttagattcaaaacatcataaagatgatagcatgtcaatatattagcctagccattatgttagcctttgttaggtgggcagcttttctgctttttcccttcctctgtggtgacaacggaggaaatatccaacagaaatacgtctaacagggaaattgggatcatagtttatatgcatctgatttgaaaggagtattgaggaaggttttcatatatgatctatctttggattaaaaagaacatttatgaaatcaagccttctaacactagttataattgagaagcaacagtaactccgtggacagcaatcaagcttaaaattgtaaataaatatggggataattcagttgttgcaaaaaaagggcagaattcagtagaataaagtccttttctcttacaggtattaaatgaggacagagaacctcaggtgttcttatgctagtgcttgctgagtgcatactaagaaagcaattccaaatagatgtatacatctagagagagtggtattagagattcagtgtatgtatttatttacatgagaggaaactggaatataatcccataaattatcaccttttatgactggaaaatatttgccaatgaagaaatggtctgtaggtatttgtcttaagatttttggctgtttaataaaaatgtaacttt

SEQ ID NO: 64298 - DNA, 3062 bp, Homo sapiens
  misc_feature (21)..(21): n is a, c, g, or t
  misc_feature (1838)..(1838): n is a, c, g, or t
aggtgacggcgcggcgggctntggctgcggaggttgaggggcgtccgaggcgcggaggggctggctgggcaggaggggttggcggggcagcagggccgcggccatggggagcttgaaggaggagctgctcaaagccatctggcacgccttcaccgcactcgaccaggaccacagcggcaaggtctccaagtcccagctcaaggtcctttcccataacctgtgcacggtgctgaaggttcctcatgacccagttgcccttgaagagcacttcagggatgatgatgagggtccagtgtccaaccagggctacatgccttatttaaacaggttcattttggaaaaggtccaagacaactttgacaagattgaattcaataggatgtgttggaccctctgtgtcaaaaaaaacctcacaaagaatcccctgctcattacagaagaagatgcatttaaaatatgggttattttcaactttttatctgaggacaagtatccattaattattgtgtcagaagagattgaatacctgcttaagaagcttacagaagctatgggaggaggttggcagcaagaacaatttgaacattataaaatcaactttgatgacagtaaaaatggcctttctgcatgggaacttattgagcttattggaaatggacagtttagcaaaggcatggaccggcagactgtgtctatggcaattaatgaagtctttaatgaacttatattagatgtgttaaagcagggttacatgatgaaaaagggccacagacggaaaaactggactgaaagatggtttgtactaaaacccaacataatttcttactatgtgagtgaggatctgaaggataagaaaggagacattctcttggatgaaaattgctgtgtagagtccttgcctgacaaagatggaaagaaatgcctttttctcgtaaaatgttttgataagacttttgaaatcagtgcttcagataagaagaagaaacaggagtggattcaagccattcattctactattcatctgttgaagctgggcagccctccaccacacaaagaagcccgccagcgtcggaaagaactccggaagaagcagctggctgaacaagaggaactggagcgacaaatgaaggaactccaggccgccaatgaaagcaagcagcaggagctggaggccgtgcggaagaaactggaggaagcagcatctcgtgcagcagaagaggaaaagaaacgccttcagactcaagtggaacttcaggccaggttcagcacagagctggaaagagagaagcttatcagacagcagatggaagaacaggttgctcaaaagtcctctgaactggaacagtatttacagcgagtacgggagctggaagacatgtacctaaagctgcaggaggctcttgaagatgagagacaggcccggcaagatgaagagacagtgcggaagcttcaggccaggtgccagatttgtttgcagactttgcctttatgtactttgcctgggctaatacagtttcttggaatgactaacactctggtggagagggagaagtgtctctgctctggctgtgactgagctcgaggtgctgtccagattagaaagactgtggagactcgaccggctggagtgtttcttttcattctgaggcgctgggaaacccttgcttctggggctaaataagggcctattttagagcagtctggtaggtatgtttgatgaggtacccttagtcttattcgagaaaatccacaaacccagaattacctctgataagagcttggcatcttcaacacgctccagaccagagagggccattggtatgcaggcagaggcctgntcaggccaacgttgccgtcaggttttgaggaataaggaagaaatatgcagtttctatttggtcattcaggattggtaacattccttcagtaattactacttgaaatcctaattttaaaagtatttgaaacctagattttttttccccttagaactttatgatagtcatgttcgcagatgaaaattctcaattttgggccttcatggcagcagggaggacaaaataaaatgaagactcccaaagggaaaaattgagcctatcctctgccagtttctactttgctgccccatttacattatttaaggtgtctgggatgggagacaacactaaaaagtattcactacagtagcagcacagggtccagtctttgatctctgaccccctgttttggggagcagttatgagatgagctagggtagattttccatggctgccattttacatgtggagcagcaaaagatgtttctttaatctttagataggaagagaaagaagaagccatctttagttgtatattttgccaaaagtgacttcaaaaataaataaattgttttggacatttagattttaaatttaaatttttttaaggaaaaattattttctaaatagaaaattaagcatgtagcatattgccaggcatatataggccccacaggtgcacattcactgcactgtgaggttaatcaggttcttggaactcccctccagtgccactcggcagtgattttagcagaagagtcactctacgggaatgtttgagtgccatgtgacgtccagagtgacgttctacatgacactcaacattttttgagccacctcataatttgagccgtgttgagagttaatagattgtttttgtgcaaagaattcgcaggtgaaatatgctatatgtattactgcagttttgtgggaagttgattatgacacagcagagactagatcacagagggaaccagataattctagaaatactagtcttagttatttagtgtttatagaatgagtgatattttgaataagggataattttggataattgaagccagtggttttttaaccaatgttatgtatcagaatcacctcacaaagcttctgaaaaatacaccacaaagtgtggctcacccaccacactttgggaggccgaggctggaggatcacttgaacccaggagtttatgaccagcctgagcaacatggtgaaacctcatctttaaaaaaaaaaaaa

SEQ ID NO: 64299 - DNA, 204 bp, Homo sapiens
ctgtttattgaacaccttctatgtgccaggcagtgtgccaaagatgtaatggcaaaagacataaaccttgttttcaagactcctaagtggaaatttatggagccaggcatggtggcccactcctgtaatcccagcactttgggaggccaaggcatgagaattgcttgagcccaggagttcaagaccagcctgggcaatatctac

SEQ ID NO: 64300 - DNA, 4828 bp, Homo sapiens
  misc_feature (21)..(21): n is a, c, g, or t
aggtgacggcgcggcgggctntggctgcggaggttgaggggcgtccgaggcgcggaggggctggctgggcaggaggggttggcggggcagcagggccgcggccatggggagcttgaaggaggagctgctcaaagccatctggcacgccttcaccgcactcgaccaggaccacagcggcaaggtctccaagtcccagctcaaggtcctttcccataacctgtgcacggtgctgaaggttcctcatgacccagttgcccttgaagagcacttcagggatgatgatgagggtccagtgtccaaccagggctacatgccttatttaaacaggttcattttggaaaaggtccaagacaactttgacaagattgaattcaataggatgtgttggaccctctgtgtcaaaaaaaacctcacaaagaatcccctgctcattacagaagaagatgcatttaaaatatgggttattttcaactttttatctgaggacaagtatccattaattattgtgtcagaagagattgaatacctgcttaagaagcttacagaagctatgggaggaggttggcagcaagaacaatttgaacattataaaatcaactttgatgacagtaaaaatggcctttctgcatgggaacttattgagcttattggaaatggacagtttagcaaaggcatggaccggcagactgtgtctatggcaattaatgaagtctttaatgaacttatattagatgtgttaaagcagggttacatgatgaaaaagggccacagacggaaaaactggactgaaagatggtttgtactaaaacccaacataatttcttactatgtgagtgaggatctgaaggataagaaaggagacattctcttggatgaaaattgctgtgtagagtccttgcctgacaaagatggaaagaaatgcctttttctcgtaaaatgttttgataagacttttgaaatcagtgcttcagataagaagaagaaacaggagtggattcaagccattcattctactattcatctgttgaagctgggcagccctccaccacacaaagaagcccgccagcgtcggaaagaactccggaagaagcagctggctgaacaagaggaactggagcgacaaatgaaggaactccaggccgccaatgaaagcaagcagcaggagctggaggccgtgcggaagaaactggaggaagcagcatctcgtgcagcagaagaggaaaagaaacgccttcagactcaagtggaacttcaggccaggttcagcacagagctggaaagagagaagcttatcagacagcagatggaagaacaggttgctcaaaagtcctctgaactggaacagtatttacagcgagtacgggagctggaagacatgtacctaaagctgcaggaggctcttgaagatgagagacaggcccggcaagatgaagagacagtgcggaagcttcaggccaggttgttggaggaagagtcttccaagagggctgaactagaaaagtggcacttggagcagcagcaggccattcagacaaccgaggcggagaagcaggagttggagaatcagcgtgtcctgaaggaacaggccctgcaggaggccatggagcagctggaggagcttgagttagaacggaagcaagcacttgagcagtacgaggaagttaaaaagaagctggagatggcaactaataagaccaagagctggaaggacaaagtggcccatcatgaaggattaattcgactgatagaaccaggttcaaagaaccctcacctgatcactaactggggacctgcagctttcactgaggcagaacttgaagagagagagaagaactggaaagagaaaaagaccacggagtgactgagcttgctggcagtcacgtcagttatgtagatactgcatggcaggagagctttacgctaaagacaaaagaaacagctttgggggccgggcgtggtggctcacgcctgtaatcccagcactttgggaggccgaggcgggtggatcacctgaggtcaggagttcaagaccagcctggccaacctggtgaaaccctgtctctactaaaaatacaaaaaaaattagctgagcgtggtggcgggcgcctgtaatcccagctacttgggaggctgaggcaggagaatcacttgaacgtgggaggcggaggttgcagcgagctgagatcatgccgttgtactccagcttgggcaacagagtgagactccatctcaaaacaaaacaaaacaaaacaaaacaaaaaaacccggctttgctgcttttaactcttcttccttctgtgcctctctaagtgggtcagtatcctaaggaagccttcttatttatcttcctgcaaacaagggttacctgaaaagaaaaaaaaagtcaacattgtcaagctgtttgtttactctttctttgaaaacatcaccttctgaaatttgtcttttagctctctcagattcttccccaaatgaggcagggtgcagacagcacagtcagctctgcagagtttggaggggctcactgccactgggtactcagaacctctgtggactggatgtcagctctttcctttggcagcgtgtttccttttccgagtatgtgctgttaaactagattggccggttcgctttccatttcctgacacttgacatggaatgcctttgaccattggtgctctgacagagaagtcatggagtcattgccatttcctggttgcccttttggaatgtgatcctgttagtagaggttttctagcttctactaagatatttctttccctaaccatcatacacttggcatgtttcattcccatctcctttcccctcaccttaaaggagactacccctttgccccatattgtcaacctaattttctctcgtactctctctagtgaatgatgtgctaccaagtatatgccaggctgtgagaggattatactgagtagtagaaagaagctaatttgaaataaaaattatttgtataattaagaaagcagattagatgcacatggtcaacaggaagttgactgtatgtctgctagttagattcaaaacatcataaagatgatagcatgtcaatatattagcctagccattatgttagcctttgttaggtgggcagcttttctgctttttcccttcctctgtggtgacaacggaggaaatatccaacagaaatacgtctaacagggaaattgggatcatagtttatatgcatctgatttgaaaggagtattgaggaaggttttcatatatgatctatctttggattaaaaagaacatttatgaaatcaagccttctaacactagttataattgagaagcaacagtaactccgtggacagcaatcaagcttaaaattgtaaataaatatggggataattcagttgttgcaaaaaaagggcagaattcagtagaataaagtccttttctcttacaggtattaaatgaggacagagaacctcaggtgttcttatgctagtgcttgctgagtgcatactaagaaagcaattccaaatagatgtatacatctagagagagtggtattagagattcagtgtatgtatttatttacatgagaggaaactggaatataatcccataaattatcaccttttatgactggaaaatatttgccaatgaagaaatggtctgtaggtatttgtcttaagatttttggctgtttaataaaaatgtaactttaacggtttcttatagttgcctttataaagtgtattgtctaaaatatttttgtatcatgtgcctttgaaatttgacagctgatttgggtgttggatttctgcccagccatttatcagtattatcattttattcagtagctggcaggtgtattagacaaacgagacttaggtaaggaatggaacctttcctgtggtttgactgcacatcacaccagaagactccagtatccctcattccagaatgaggaagtgtggccttaggagtcaaatagtctctgcatggtggggaggatcatgatggaatatgtgaatttctacttctagaagttgtgaaataggtcctgcacttttgcagaatgtccttctttaaacctggcttattccacagctgtagctgataacatgacctggggcttagctgctctagccctgggttcttggagacctcacactgcctggcccctggccatccacctaaggactgcctgctttctggtcacatgtggaccttgatacgactaagcggttacatatgtggttgtgcaaaagctttctgtttaatgcatagtgttaccgatttacatcttggttttcagtggcactatgtctaggaggcaatatccttttaaacagtgctttggctaagatagatacttgtgaatcaaagatagcacagaaatgaactaagtatatcccatttggaattatattttgatactatttaaaatggtttcacctgttaaagggccaacagaactcttggttttacttttgtaattactgtacagaaaatttcaagagtgtttgagtgcttgtcatcaggtgttttccttaataagtagggatatgatcatttacaggaattatatatgaaaaaagtttttgaaatgtatttttgtgatgtgctatgttgaggggaaaccaaatatttatgattttaaaacattcgtatgaaaacattgtacaatgtaatatgctcaactttctcaattttttgctaatttttctaagatacattaaaaatgttttatatttttttttaagtaaaatggacccagtaagaaaattaaaaataccagaacatacactttaaactgtctgatttaataaaacagtggggggta

SEQ ID NO: 64301 - DNA, 4606 bp, Homo sapiens
aaactttatgtcataggtacgaggcctgggtgttatgctaatgacaacttcataaggcttgggagggcaccttcagaaaggttcaggatgaacctggcaagctacttctagagctgagtttgctactaataggcgctttctgagttacaaacataacaagtcatctgattttgaagaaactgaagcttggagtgtgaatgacgtgggttcagtaagagattgaatacctgcttaagaagcttacagaagctatgggaggaggttggcagcaagaacaatttgaacattataaaatcaactttgatgacagtaaaaatggcctttctgcatgggaacttattgagcttattggaaatggacagtttagcaaaggcatggaccggcagactgtgtctatggcaattaatgaagtctttaatgaacttatattagatgtgttaaagcagggttacatgatgaaaaagggccacagacggaaaaactggactgaaagatggtttgtactaaaacccaacataatttcttactatgtgagtgaggatctgaaggataagaaaggagacattctcttggatgaaaattgctgtgtagagtccttgcctgacaaagatggaaagaaatgcctttttctcgtaaaatgttttgataagacttttgaaatcagtgcttcagataagaagaagaaacaggagtggattcaagccattcattctactattcatctgttgaagctgggcagccctccaccacacaaagaagcccgccagcgtcggaaagaactccggaagaagcagctggctgaacaagaggaactggagcgacaaatgaaggaactccaggccgccaatgaaagcaagcagcaggagctggaggccgtgcggaagaaactggaggaagcagcatctcgtgcagcagaagaggaaaagaaacgccttcagactcaagtggaacttcaggccaggttcagcacagagctggaaagagagaagcttatcagacagcagatggaagaacaggttgctcaaaagtcctctgaactggaacagtatttacagcgagtacgggagctggaagacatgtacctaaagctgcaggaggctcttgaagatgagagacaggcccggcaagatgaagagacagtgcggaagcttcaggccaggttgttggaggaagagtcttccaagagggctgaactagaaaagtggcacttggagcagcagcaggccattcagacaaccgaggcggagaagcaggagttggagaatcagcgtgtcctgaaggaacaggccctgcaggaggccatggagcagctggaggagcttgagttagaacggaagcaagcacttgagcagtacgaggaagttaaaaagaagctggagatggcaactaataagaccaagagctggaaggacaaagtggcccatcatgaaggattaattcgactgatagaaccaggttcaaagaaccctcacctgatcactaactggggacctgcagctttcactgaggcagaacttgaagagagagagaagaactggaaagagaaaaagaccacggagtgactgagcttgctggcagtcacgtcagttatgtagatactgcatggcaggagagctttacgctaaagacaaaagaaacagctttgggggccgggcgtggtggctcacgcctgtaatcccagcactttgggaggccgaggcgggtggatcacctgaggtcaggagttcaagaccagcctggccaacctggtgaaaccctgtctctactaaaaatacaaaaaaaattagctgagcgtggtggcgggcgcctgtaatcccagctacttgggaggctgaggcaggagaatcacttgaacgtgggaggcggaggttgcagcgagctgagatcatgccgttgtactccagcttgggcaacagagtgagactccatctcaaaacaaaacaaaacaaaacaaaacaaaaaaacccggctttgctgcttttaactcttcttccttctgtgcctctctaagtgggtcagtatcctaaggaagccttcttatttatcttcctgcaaacaagggttacctgaaaagaaaaaaaaagtcaacattgtcaagctgtttgtttactctttctttgaaaacatcaccttctgaaatttgtcttttagctctctcagattcttccccaaatgaggcagggtgcagacagcacagtcagctctgcagagtttggaggggctcactgccactgggtactcagaacctctgtggactggatgtcagctctttcctttggcagcgtgtttccttttccgagtatgtgctgttaaactagattggccggttcgctttccatttcctgacacttgacatggaatgcctttgaccattggtgctctgacagagaagtcatggagtcattgccatttcctggttgcccttttggaatgtgatcctgttagtagaggttttctagcttctactaagatatttctttccctaaccatcatacacttggcatgtttcattcccatctcctttcccctcaccttaaaggagactacccctttgccccatattgtcaacctaattttctctcgtactctctctagtgaatgatgtgctaccaagtatatgccaggctgtgagaggattatactgagtagtagaaagaagctaatttgaaataaaaattatttgtataattaagaaagcagattagatgcacatggtcaacaggaagttgactgtatgtctgctagttagattcaaaacatcataaagatgatagcatgtcaatatattagcctagccattatgttagcctttgttaggtgggcagcttttctgctttttcccttcctctgtggtgacaacggaggaaatatccaacagaaatacgtctaacagggaaattgggatcatagtttatatgcatctgatttgaaaggagtattgaggaaggttttcatatatgatctatctttggattaaaaagaacatttatgaaatcaagccttctaacactagttataattgagaagcaacagtaactccgtggacagcaatcaagcttaaaattgtaaataaatatggggataattcagttgttgcaaaaaaagggcagaattcagtagaataaagtccttttctcttacaggtattaaatgaggacagagaacctcaggtgttcttatgctagtgcttgctgagtgcatactaagaaagcaattccaaatagatgtatacatctagagagagtggtattagagattcagtgtatgtatttatttacatgagaggaaactggaatataatcccataaattattggaatataatcccataaattatcaccttttatgactggaaaatatttgccaatgaagaaatggtctgtaggtatttgtcttaagatttttggctgtttaataaaaatgtaactttaacggtttcttatagttgcctttataaagtgtattgtctaaaatatttttgtatcatgtgcctttgaaatttgacagctgatttgggtgttggatttctgcccagccatttatcagtattatcattttattcagtagctggcaggtgtattagacaaacgagacttaggtaaggaatggaacctttcctgtggtttgactgcacatcacaccagaagactccagtatccctcattccagaatgaggaaaaagtattctacaaagaacctaatcacctctgtgaaatctatgggatggaaacagtgtggccttaggagtcaaatagtctctgcatggtggggaggatcatgatggaatatgtgaatttctacttctagaagttgtgaaataggtcctgcacttttgcagaatgtccttctttaaacctggcttattccacagctgtagctgataacatgacctggggcttagctgctctagccctgggttcttggagacctcacactgcctggcccctggccatccacctaaggactgcctgctttctggtcacatgtggaccttgatacgactaagcggttacatatgtggttgtgcaaaagctttctgtttaatgcatagtgttaccgatttacatcttggttttcagtggcactatgtctaggaggcaatatccttttaaacagtgctttggctaagatagatacttgtgaatcaaagatagcacagaaatgaactaagtatatcccatttggaattatattttgatactatttaaaatggtttcacctgttaaagggccaacagaactcttggttttacttttgtaattactgtacagaaaatttcaagagtgtttgagtgcttgtcatcaggtgttttccttaataagtagggatatgatcatttacaggaattatatatgaaaaaagtttttgaaatgtatttttgtgatgtgctatgttgaggggaaaccaaatatttatgattttaaaacattcgtatgaaaacattgtacaatgtaatatgctcaactttctcaattttttgctaatttttctaagatacattaaaaatgttttatatttttttttaagtaaaatggacccagtaagaaaattaaaaataccagaacatacactttaaactgtctgatttaataaaacagtggggggta

SEQ ID NO: 64302 - DNA, 4223 bp, Homo sapiens
gtattttcctgttggtctggggcagagttcctccttcagaatattgagaggtcaggcagaaagggttacatgatgaaaaagggccacagacggaaaaactggactgaaagatggtttgtactaaaacccaacataatttcttactatgtgagtgaggatctgaaggataagaaaggagacattctcttggatgaaaattgctgtgtagagtccttgcctgacaaagatggaaagaaatgcctttttctcgtaaaatgttttgataagacttttgaaatcagtgcttcagataagaagaagaaacaggagtggattcaagccattcattctactattcatctgttgaagctgggcagccctccaccacacaaagaagcccgccagcgtcggaaagaactccggaagaagcagctggctgaacaagaggaactggagcgacaaatgaaggaactccaggccgccaatgaaagcaagcagcaggagctggaggccgtgcggaagaaactggaggaagcagcatctcgtgcagcagaagaggaaaagaaacgccttcagactcaagtggaacttcaggccaggttcagcacagagctggaaagagagaagcttatcagacagcagatggaagaacaggttgctcaaaagtcctctgaactggaacagtatttacagcgagtacgggagctggaagacatgtacctaaagctgcaggaggctcttgaagatgagagacaggcccggcaagatgaagagacagtgcggaagcttcaggccaggttgttggaggaagagtcttccaagagggctgaactagaaaagtggcacttggagcagcagcaggccattcagacaaccgaggcggagaagcaggagttggagaatcagcgtgtcctgaaggaacaggccctgcaggaggccatggagcagctggaggagcttgagttagaacggaagcaagcacttgagcagtacgaggaagttaaaaagaagctggagatggcaactaataagaccaagagctggaaggacaaagtggcccatcatgaaggattaattcgactgatagaaccaggttcaaagaaccctcacctgatcactaactggggacctgcagctttcactgaggcagaacttgaagagagagagaagaactggaaagagaaaaagaccacggagtgactgagcttgctggcagtcacgtcagttatgtagatactgcatggcaggagagctttacgctaaagacaaaagaaacagctttgggggccgggcgtggtggctcacgcctgtaatcccagcactttgggaggccgaggcgggtggatcacctgaggtcaggagttcaagaccagcctggccaacctggtgaaaccctgtctctactaaaaatacaaaaaaaattagctgagcgtggtggcgggcgcctgtaatcccagctacttgggaggctgaggcaggagaatcacttgaacgtgggaggcggaggttgcagcgagctgagatcatgccgttgtactccagcttgggcaacagagtgagactccatctcaaaacaaaacaaaacaaaacaaaacaaaaaaacccggctttgctgcttttaactcttcttccttctgtgcctctctaagtgggtcagtatcctaaggaagccttcttatttatcttcctgcaaacaagggttacctgaaaagaaaaaaaaagtcaacattgtcaagctgtttgtttactctttctttgaaaacatcaccttctgaaatttgtcttttagctctctcagattcttccccaaatgaggcagggtgcagacagcacagtcagctctgcagagtttggaggggctcactgccactgggtactcagaacctctgtggactggatgtcagctctttcctttggcagcgtgtttccttttccgagtatgtgctgttaaactagattggccggttcgctttccatttcctgacacttgacatggaatgcctttgaccattggtgctctgacagagaagtcatggagtcattgccatttcctggttgcccttttggaatgtgatcctgttagtagaggttttctagcttctactaagatatttctttccctaaccatcatacacttggcatgtttcattcccatctcctttcccctcaccttaaaggagactacccctttgccccatattgtcaacctaattttctctcgtactctctctagtgaatgatgtgctaccaagtatatgccaggctgtgagaggattatactgagtagtagaaagaagctaatttgaaataaaaattatttgtataattaagaaagcagattagatgcacatggtcaacaggaagttgactgtatgtctgctagttagattcaaaacatcataaagatgatagcatgtcaatatattagcctagccattatgttagcctttgttaggtgggcagcttttctgctttttcccttcctctgtggtgacaacggaggaaatatccaacagaaatacgtctaacagggaaattgggatcatagtttatatgcatctgatttgaaaggagtattgaggaaggttttcatatatgatctatctttggattaaaaagaacatttatgaaatcaagccttctaacactagttataattgagaagcaacagtaactccgtggacagcaatcaagcttaaaattgtaaataaatatggggataattcagttgttgcaaaaaaagggcagaattcagtagaataaagtccttttctcttacaggtattaaatgaggacagagaacctcaggtgttcttatgctagtgcttgctgagtgcatactaagaaagcaattccaaatagatgtatacatctagagagagtggtattagagattcagtgtatgtatttatttacatgagaggaaactggaatataatcccataaattattggaatataatcccataaattatcaccttttatgactggaaaatatttgccaatgaagaaatggtctgtaggtatttgtcttaagatttttggctgtttaataaaaatgtaactttaacggtttcttatagttgcctttataaagtgtattgtctaaaatatttttgtatcatgtgcctttgaaatttgacagctgatttgggtgttggatttctgcccagccatttatcagtattatcattttattcagtagctggcaggtgtattagacaaacgagacttaggtaaggaatggaacctttcctgtggtttgactgcacatcacaccagaagactccagtatccctcattccagaatgaggaaaaagtattctacaaagaacctaatcacctctgtgaaatctatgggatggaaacagtgtggccttaggagtcaaatagtctctgcatggtggggaggatcatgatggaatatgtgaatttctacttctagaagttgtgaaataggtcctgcacttttgcagaatgtccttctttaaacctggcttattccacagctgtagctgataacatgacctggggcttagctgctctagccctgggttcttggagacctcacactgcctggcccctggccatccacctaaggactgcctgctttctggtcacatgtggaccttgatacgactaagcggttacatatgtggttgtgcaaaagctttctgtttaatgcatagtgttaccgatttacatcttggttttcagtggcactatgtctaggaggcaatatccttttaaacagtgctttggctaagatagatacttgtgaatcaaagatagcacagaaatgaactaagtatatcccatttggaattatattttgatactatttaaaatggtttcacctgttaaagggccaacagaactcttggttttacttttgtaattactgtacagaaaatttcaagagtgtttgagtgcttgtcatcaggtgttttccttaataagtagggatatgatcatttacaggaattatatatgaaaaaagtttttgaaatgtatttttgtgatgtgctatgttgaggggaaaccaaatatttatgattttaaaacattcgtatgaaaacattgtacaatgtaatatgctcaactttctcaattttttgctaatttttctaagatacattaaaaatgttttatatttttttttaagtaaaatggacccagtaagaaaattaaaaataccagaacatacactttaaactgtctgatttaataaaacagtggggggta

SEQ ID NO: 64303 - DNA, 4184 bp, Homo sapiens
  misc_feature (21)..(21): n is a, c, g, or t
aggtgacggcgcggcgggctntggctgcggaggttgaggggcgtccgaggcgcggaggggctggctgggcaggaggggttggcggggcagcagggccgcggccatggggagcttgaaggaggagctgctcaaagccatctggcacgccttcaccgcactcgaccaggaccacagcggcaaggtctccaagtcccagctcaaggtcctttcccataacctgtgcacggtgctgaaggttcctcatgacccagttgcccttgaagagcacttcagggatgatgatgagggtccagtgtccaaccagggctacatgccttatttaaacaggttcattttggaaaaggtccaagacaactttgacaagattgaattcaataggatgtgttggaccctctgtgtcaaaaaaaacctcacaaagaatcccctgctcattacagaagaagatgcatttaaaatatgggttattttcaactttttatctgaggacaagtatccattaattattgtgtcagaagagattgaatacctgcttaagaagcttacagaagctatgggaggaggttggcagcaagaacaatttgaacattataaaatcaactttgatgacagtaaaaatggcctttctgcatgggaacttattgagcttattggaaatggacagtttagcaaaggcatggaccggcagactgtgtctatggcaattaatgaagtctttaatgaacttatattagatgtgttaaagcagggttacatgatgaaaaagggccacagacggaaaaactggactgaaagatggtttgtactaaaacccaacataatttcttactatgtgagtgaggatctgaaggataagaaaggagacattctcttggatgaaaattgctgtgtagagtccttgcctgacaaagatggaaagaaatgcctttttctcgtaaaatgttttgataagacttttgaaatcagtgcttcagataagaagaagaaacaggagtggattcaagccattcattctactattcatctgttgaagctgggcagccctccaccacacaaagaagcccgccagcgtcggaaagaactccggaagaagcagctggctgaacaagaggaactggagcgacaaatgaaggaactccaggccgccaatgaaagcaagcagcaggagctggaggccgtgcggaagaaactggaggaagcagcatctcgtgcagcagaagaggaaaagaaacgccttcagactcaagtggaacttcaggccaggttcagcacagagctggaaagagagaagcttatcagacagcagatggaagaacaggttgctcaaaagtcctctgaactggaacagtatttacagcgagtacgggagctggaagacatgtacctaaagctgcaggaggctcttgaagatgagagacaggcccggcaagatgaagagacagtgcggaggttgcagcgagctgagatcatgccgttgtactccagcttgggcaacagagtgagactccatctcaaaacaaaacaaaacaaaacaaaacaaaaaaacccggctttgctgcttttaactcttcttccttctgtgcctctctaagtgggtcagtatcctaaggaagccttcttatttatcttcctgcaaacaagggttacctgaaaagaaaaaaaaagtcaacattgtcaagctgtttgtttactctttctttgaaaacatcaccttctgaaatttgtcttttagctctctcagattcttccccaaatgaggcagggtgcagacagcacagtcagctctgcagagtttggaggggctcactgccactgggtactcagaacctctgtggactggatgtcagctctttcctttggcagcgtgtttccttttccgagtatgtgctgttaaactagattggccggttcgctttccatttcctgacacttgacatggaatgcctttgaccattggtgctctgacagagaagtcatggagtcattgccatttcctggttgcccttttggaatgtgatcctgttagtagaggttttctagcttctactaagatatttctttccctaaccatcatacacttggcatgtttcattcccatctcctttcccctcaccttaaaggagactacccctttgccccatattgtcaacctaattttctctcgtactctctctagtgaatgatgtgctaccaagtatatgccaggctgtgagaggattatactgagtagtagaaagaagctaatttgaaataaaaattatttgtataattaagaaagcagattagatgcacatggtcaacaggaagttgactgtatgtctgctagttagattcaaaacatcataaagatgatagcatgtcaatatattagcctagccattatgttagcctttgttaggtgggcagcttttctgctttttcccttcctctgtggtgacaacggaggaaatatccaacagaaatacgtctaacagggaaattgggatcatagtttatatgcatctgatttgaaaggagtattgaggaaggttttcatatatgatctatctttggattaaaaagaacatttatgaaatcaagccttctaacactagttataattgagaagcaacagtaactccgtggacagcaatcaagcttaaaattgtaaataaatatggggataattcagttgttgcaaaaaaagggcagaattcagtagaataaagtccttttctcttacaggtattaaatgaggacagagaacctcaggtgttcttatgctagtgcttgctgagtgcatactaagaaagcaattccaaatagatgtatacatctagagagagtggtattagagattcagtgtatgtatttatttacatgagaggaaactggaatataatcccataaattattggaatataatcccataaattatcaccttttatgactggaaaatatttgccaatgaagaaatggtctgtaggtatttgtcttaagatttttggctgtttaataaaaatgtaactttaacggtttcttatagttgcctttataaagtgtattgtctaaaatatttttgtatcatgtgcctttgaaatttgacagctgatttgggtgttggatttctgcccagccatttatcagtattatcattttattcagtagctggcaggtgtattagacaaacgagacttaggtaaggaatggaacctttcctgtggtttgactgcacatcacaccagaagactccagtatccctcattccagaatgaggaaaaagtattctacaaagaacctaatcacctctgtgaaatctatgggatggaaacagtgtggccttaggagtcaaatagtctctgcatggtggggaggatcatgatggaatatgtgaatttctacttctagaagttgtgaaataggtcctgcacttttgcagaatgtccttctttaaacctggcttattccacagctgtagctgataacatgacctggggcttagctgctctagccctgggttcttggagacctcacactgcctggcccctggccatccacctaaggactgcctgctttctggtcacatgtggaccttgatacgactaagcggttacatatgtggttgtgcaaaagctttctgtttaatgcatagtgttaccgatttacatcttggttttcagtggcactatgtctaggaggcaatatccttttaaacagtgctttggctaagatagatacttgtgaatcaaagatagcacagaaatgaactaagtatatcccatttggaattatattttgatactatttaaaatggtttcacctgttaaagggccaacagaactcttggttttacttttgtaattactgtacagaaaatttcaagagtgtttgagtgcttgtcatcaggtgttttccttaataagtagggatatgatcatttacaggaattatatatgaaaaaagtttttgaaatgtatttttgtgatgtgctatgttgaggggaaaccaaatatttatgattttaaaacattcgtatgaaaacattgtacaatgtaatatgctcaactttctcaattttttgctaatttttctaagatacattaaaaatgttttatatttttttttaagtaaaatggacccagtaagaaaattaaaaataccagaacatacactttaaactgtctgatttaataaaacagtggggggta

SEQ ID NO: 64304 - DNA, 3701 bp, Homo sapiens
gaatcgagctcggtacctccagactgccttcagactcaagtggaacttcaggccaggttcagcacagagctggaaagagagaagcttatcagacagcagatggaagaacaggttgctcaaaagtcctctgaactggaacagtatttacagcgagtacgggagctggaagacatgtacctaaagctgcaggaggctcttgaagatgagagacaggcccggcaagatgaagagacagtgcggaagcttcaggccaggttgttggaggaagagtcttccaagagggctgaactagaaaagtggcacttggagcagcagcaggccattcagacaaccgaggcggagaagcaggagttggagaatcagcgtgtcctgaaggaacaggccctgcaggaggccatggagcagctggaggagcttgagttagaacggaagcaagcacttgagcagtacgaggaagttaaaaagaagctggagatggcaactaataagaccaagagctggaaggacaaagtggcccatcatgaaggattaattcgactgatagaaccaggttcaaagaaccctcacctgatcactaactggggacctgcagctttcactgaggcagaacttgaagagagagagaagaactggaaagagaaaaagaccacggagtgactgagcttgctggcagtcacgtcagttatgtagatactgcatggcaggagagctttacgctaaagacaaaagaaacagctttgggggccgggcgtggtggctcacgcctgtaatcccagcactttgggaggccgaggcgggtggatcacctgaggtcaggagttcaagaccagcctggccaacctggtgaaaccctgtctctactaaaaatacaaaaaaaattagctgagcgtggtggcgggcgcctgtaatcccagctacttgggaggctgaggcaggagaatcacttgaacgtgggaggcggaggttgcagcgagctgagatcatgccgttgtactccagcttgggcaacagagtgagactccatctcaaaacaaaacaaaacaaaacaaaacaaaaaaacccggctttgctgcttttaactcttcttccttctgtgcctctctaagtgggtcagtatcctaaggaagccttcttatttatcttcctgcaaacaagggttacctgaaaagaaaaaaaaagtcaacattgtcaagctgtttgtttactctttctttgaaaacatcaccttctgaaatttgtcttttagctctctcagattcttccccaaatgaggcagggtgcagacagcacagtcagctctgcagagtttggaggggctcactgccactgggtactcagaacctctgtggactggatgtcagctctttcctttggcagcgtgtttccttttccgagtatgtgctgttaaactagattggccggttcgctttccatttcctgacacttgacatggaatgcctttgaccattggtgctctgacagagaagtcatggagtcattgccatttcctggttgcccttttggaatgtgatcctgttagtagaggttttctagcttctactaagatatttctttccctaaccatcatacacttggcatgtttcattcccatctcctttcccctcaccttaaaggagactacccctttgccccatattgtcaacctaattttctctcgtactctctctagtgaatgatgtgctaccaagtatatgccaggctgtgagaggattatactgagtagtagaaagaagctaatttgaaataaaaattatttgtataattaagaaagcagattagatgcacatggtcaacaggaagttgactgtatgtctgctagttagattcaaaacatcataaagatgatagcatgtcaatatattagcctagccattatgttagcctttgttaggtgggcagcttttctgctttttcccttcctctgtggtgacaacggaggaaatatccaacagaaatacgtctaacagggaaattgggatcatagtttatatgcatctgatttgaaaggagtattgaggaaggttttcatatatgatctatctttggattaaaaagaacatttatgaaatcaagccttctaacactagttataattgagaagcaacagtaactccgtggacagcaatcaagcttaaaattgtaaataaatatggggataattcagttgttgcaaaaaaagggcagaattcagtagaataaagtccttttctcttacaggtattaaatgaggacagagaacctcaggtgttcttatgctagtgcttgctgagtgcatactaagaaagcaattccaaatagatgtatacatctagagagagtggtattagagattcagtgtatgtatttatttacatgagaggaaactggaatataatcccataaattattggaatataatcccataaattatcaccttttatgactggaaaatatttgccaatgaagaaatggtctgtaggtatttgtcttaagatttttggctgtttaataaaaatgtaactttaacggtttcttatagttgcctttataaagtgtattgtctaaaatatttttgtatcatgtgcctttgaaatttgacagctgatttgggtgttggatttctgcccagccatttatcagtattatcattttattcagtagctggcaggtgtattagacaaacgagacttaggtaaggaatggaacctttcctgtggtttgactgcacatcacaccagaagactccagtatccctcattccagaatgaggaaaaagtattctacaaagaacctaatcacctctgtgaaatctatgggatggaaacagtgtggccttaggagtcaaatagtctctgcatggtggggaggatcatgatggaatatgtgaatttctacttctagaagttgtgaaataggtcctgcacttttgcagaatgtccttctttaaacctggcttattccacagctgtagctgataacatgacctggggcttagctgctctagccctgggttcttggagacctcacactgcctggcccctggccatccacctaaggactgcctgctttctggtcacatgtggaccttgatacgactaagcggttacatatgtggttgtgcaaaagctttctgtttaatgcatagtgttaccgatttacatcttggttttcagtggcactatgtctaggaggcaatatccttttaaacagtgctttggctaagatagatacttgtgaatcaaagatagcacagaaatgaactaagtatatcccatttggaattatattttgatactatttaaaatggtttcacctgttaaagggccaacagaactcttggttttacttttgtaattactgtacagaaaatttcaagagtgtttgagtgcttgtcatcaggtgttttccttaataagtagggatatgatcatttacaggaattatatatgaaaaaagtttttgaaatgtatttttgtgatgtgctatgttgaggggaaaccaaatatttatgattttaaaacattcgtatgaaaacattgtacaatgtaatatgctcaactttctcaattttttgctaatttttctaagatacattaaaaatgttttatatttttttttaagtaaaatggacccagtaagaaaattaaaaataccagaacatacactttaaactgtctgatttaataaaacagtggggggta

SEQ ID NO: 64305 - DNA, 3480 bp, Homo sapiens
ggtacctgctacaacgctcctgcttcaggccaggttgttggaggaagagtcttccaagagggctgaactagaaaagtggcacttggagcagcagcaggccattcagacaaccgaggcggagaagcaggagttggagaatcagcgtgtcctgaaggaacaggccctgcaggaggccatggagcagctggaggagcttgagttagaacggaagcaagcacttgagcagtacgaggaagttaaaaagaagctggagatggcaactaataagaccaagagctggaaggacaaagtggcccatcatgaaggattaattcgactgatagaaccaggttcaaagaaccctcacctgatcactaactggggacctgcagctttcactgaggcagaacttgaagagagagagaagaactggaaagagaaaaagaccacggagtgactgagcttgctggcagtcacgtcagttatgtagatactgcatggcaggagagctttacgctaaagacaaaagaaacagctttgggggccgggcgtggtggctcacgcctgtaatcccagcactttgggaggccgaggcgggtggatcacctgaggtcaggagttcaagaccagcctggccaacctggtgaaaccctgtctctactaaaaatacaaaaaaaattagctgagcgtggtggcgggcgcctgtaatcccagctacttgggaggctgaggcaggagaatcacttgaacgtgggaggcggaggttgcagcgagctgagatcatgccgttgtactccagcttgggcaacagagtgagactccatctcaaaacaaaacaaaacaaaacaaaacaaaaaaacccggctttgctgcttttaactcttcttccttctgtgcctctctaagtgggtcagtatcctaaggaagccttcttatttatcttcctgcaaacaagggttacctgaaaagaaaaaaaaagtcaacattgtcaagctgtttgtttactctttctttgaaaacatcaccttctgaaatttgtcttttagctctctcagattcttccccaaatgaggcagggtgcagacagcacagtcagctctgcagagtttggaggggctcactgccactgggtactcagaacctctgtggactggatgtcagctctttcctttggcagcgtgtttccttttccgagtatgtgctgttaaactagattggccggttcgctttccatttcctgacacttgacatggaatgcctttgaccattggtgctctgacagagaagtcatggagtcattgccatttcctggttgcccttttggaatgtgatcctgttagtagaggttttctagcttctactaagatatttctttccctaaccatcatacacttggcatgtttcattcccatctcctttcccctcaccttaaaggagactacccctttgccccatattgtcaacctaattttctctcgtactctctctagtgaatgatgtgctaccaagtatatgccaggctgtgagaggattatactgagtagtagaaagaagctaatttgaaataaaaattatttgtataattaagaaagcagattagatgcacatggtcaacaggaagttgactgtatgtctgctagttagattcaaaacatcataaagatgatagcatgtcaatatattagcctagccattatgttagcctttgttaggtgggcagcttttctgctttttcccttcctctgtggtgacaacggaggaaatatccaacagaaatacgtctaacagggaaattgggatcatagtttatatgcatctgatttgaaaggagtattgaggaaggttttcatatatgatctatctttggattaaaaagaacatttatgaaatcaagccttctaacactagttataattgagaagcaacagtaactccgtggacagcaatcaagcttaaaattgtaaataaatatggggataattcagttgttgcaaaaaaagggcagaattcagtagaataaagtccttttctcttacaggtattaaatgaggacagagaacctcaggtgttcttatgctagtgcttgctgagtgcatactaagaaagcaattccaaatagatgtatacatctagagagagtggtattagagattcagtgtatgtatttatttacatgagaggaaactggaatataatcccataaattattggaatataatcccataaattatcaccttttatgactggaaaatatttgccaatgaagaaatggtctgtaggtatttgtcttaagatttttggctgtttaataaaaatgtaactttaacggtttcttatagttgcctttataaagtgtattgtctaaaatatttttgtatcatgtgcctttgaaatttgacagctgatttgggtgttggatttctgcccagccatttatcagtattatcattttattcagtagctggcaggtgtattagacaaacgagacttaggtaaggaatggaacctttcctgtggtttgactgcacatcacaccagaagactccagtatccctcattccagaatgaggaaaaagtattctacaaagaacctaatcacctctgtgaaatctatgggatggaaacagtgtggccttaggagtcaaatagtctctgcatggtggggaggatcatgatggaatatgtgaatttctacttctagaagttgtgaaataggtcctgcacttttgcagaatgtccttctttaaacctggcttattccacagctgtagctgataacatgacctggggcttagctgctctagccctgggttcttggagacctcacactgcctggcccctggccatccacctaaggactgcctgctttctggtcacatgtggaccttgatacgactaagcggttacatatgtggttgtgcaaaagctttctgtttaatgcatagtgttaccgatttacatcttggttttcagtggcactatgtctaggaggcaatatccttttaaacagtgctttggctaagatagatacttgtgaatcaaagatagcacagaaatgaactaagtatatcccatttggaattatattttgatactatttaaaatggtttcacctgttaaagggccaacagaactcttggttttacttttgtaattactgtacagaaaatttcaagagtgtttgagtgcttgtcatcaggtgttttccttaataagtagggatatgatcatttacaggaattatatatgaaaaaagtttttgaaatgtatttttgtgatgtgctatgttgaggggaaaccaaatatttatgattttaaaacattcgtatgaaaacattgtacaatgtaatatgctcaactttctcaattttttgctaatttttctaagatacattaaaaatgttttatatttttttttaagtaaaatggacccagtaagaaaattaaaaataccagaacatacactttaaactgtctgatttaataaaacagtggggggta

SEQ ID NO: 64306 - DNA, 2803 bp, Homo sapiens
gactggctgctctagggatccccggatgctgaggcaggagaatcacttgaacgtgggaggcggaggttgcagcgagctgagatcatgccgttgtactccagcttgggcaacagagtgagactccatctcaaaacaaaacaaaacaaaacaaaacaaaaaaacccggctttgctgcttttaactcttcttccttctgtgcctctctaagtgggtcagtatcctaaggaagccttcttatttatcttcctgcaaacaagggttacctgaaaagaaaaaaaaagtcaacattgtcaagctgtttgtttactctttctttgaaaacatcaccttctgaaatttgtcttttagctctctcagattcttccccaaatgaggcagggtgcagacagcacagtcagctctgcagagtttggaggggctcactgccactgggtactcagaacctctgtggactggatgtcagctctttcctttggcagcgtgtttccttttccgagtatgtgctgttaaactagattggccggttcgctttccatttcctgacacttgacatggaatgcctttgaccattggtgctctgacagagaagtcatggagtcattgccatttcctggttgcccttttggaatgtgatcctgttagtagaggttttctagcttctactaagatatttctttccctaaccatcatacacttggcatgtttcattcccatctcctttcccctcaccttaaaggagactacccctttgccccatattgtcaacctaattttctctcgtactctctctagtgaatgatgtgctaccaagtatatgccaggctgtgagaggattatactgagtagtagaaagaagctaatttgaaataaaaattatttgtataattaagaaagcagattagatgcacatggtcaacaggaagttgactgtatgtctgctagttagattcaaaacatcataaagatgatagcatgtcaatatattagcctagccattatgttagcctttgttaggtgggcagcttttctgctttttcccttcctctgtggtgacaacggaggaaatatccaacagaaatacgtctaacagggaaattgggatcatagtttatatgcatctgatttgaaaggagtattgaggaaggttttcatatatgatctatctttggattaaaaagaacatttatgaaatcaagccttctaacactagttataattgagaagcaacagtaactccgtggacagcaatcaagcttaaaattgtaaataaatatggggataattcagttgttgcaaaaaaagggcagaattcagtagaataaagtccttttctcttacaggtattaaatgaggacagagaacctcaggtgttcttatgctagtgcttgctgagtgcatactaagaaagcaattccaaatagatgtatacatctagagagagtggtattagagattcagtgtatgtatttatttacatgagaggaaactggaatataatcccataaattattggaatataatcccataaattatcaccttttatgactggaaaatatttgccaatgaagaaatggtctgtaggtatttgtcttaagatttttggctgtttaataaaaatgtaactttaacggtttcttatagttgcctttataaagtgtattgtctaaaatatttttgtatcatgtgcctttgaaatttgacagctgatttgggtgttggatttctgcccagccatttatcagtattatcattttattcagtagctggcaggtgtattagacaaacgagacttaggtaaggaatggaacctttcctgtggtttgactgcacatcacaccagaagactccagtatccctcattccagaatgaggaaaaagtattctacaaagaacctaatcacctctgtgaaatctatgggatggaaacagtgtggccttaggagtcaaatagtctctgcatggtggggaggatcatgatggaatatgtgaatttctacttctagaagttgtgaaataggtcctgcacttttgcagaatgtccttctttaaacctggcttattccacagctgtagctgataacatgacctggggcttagctgctctagccctgggttcttggagacctcacactgcctggcccctggccatccacctaaggactgcctgctttctggtcacatgtggaccttgatacgactaagcggttacatatgtggttgtgcaaaagctttctgtttaatgcatagtgttaccgatttacatcttggttttcagtggcactatgtctaggaggcaatatccttttaaacagtgctttggctaagatagatacttgtgaatcaaagatagcacagaaatgaactaagtatatcccatttggaattatattttgatactatttaaaatggtttcacctgttaaagggccaacagaactcttggttttacttttgtaattactgtacagaaaatttcaagagtgtttgagtgcttgtcatcaggtgttttccttaataagtagggatatgatcatttacaggaattatatatgaaaaaagtttttgaaatgtatttttgtgatgtgctatgttgaggggaaaccaaatatttatgattttaaaacattcgtatgaaaacattgtacaatgtaatatgctcaactttctcaattttttgctaatttttctaagatacattaaaaatgttttatatttttttttaagtaaaatggacccagtaagaaaattaaaaataccagaacatacactttaaactgtctgatttaataaaacagtggggggta

SEQ ID NO: 64307 - DNA, 2881 bp, Homo sapiens
agttaaggtgtagagttcttactagttttctttttgcttgtttttttatacaaatagtgttgttatcagtttaaaataatgggttataatatagtgtttgcaagcctcatggtaacctcaagccaaaaaaaacatataatagatacacaaaaaataaaaagcaagaaactaaattgttattattattattatttgagactccatctcaaaacaaaacaaaacaaaacaaaacaaaaaaacccggctttgctgcttttaactcttcttccttctgtgcctctctaagtgggtcagtatcctaaggaagccttcttatttatcttcctgcaaacaagggttacctgaaaagaaaaaaaaagtcaacattgtcaagctgtttgtttactctttctttgaaaacatcaccttctgaaatttgtcttttagctctctcagattcttccccaaatgaggcagggtgcagacagcacagtcagctctgcagagtttggaggggctcactgccactgggtactcagaacctctgtggactggatgtcagctctttcctttggcagcgtgtttccttttccgagtatgtgctgttaaactagattggccggttcgctttccatttcctgacacttgacatggaatgcctttgaccattggtgctctgacagagaagtcatggagtcattgccatttcctggttgcccttttggaatgtgatcctgttagtagaggttttctagcttctactaagatatttctttccctaaccatcatacacttggcatgtttcattcccatctcctttcccctcaccttaaaggagactacccctttgccccatattgtcaacctaattttctctcgtactctctctagtgaatgatgtgctaccaagtatatgccaggctgtgagaggattatactgagtagtagaaagaagctaatttgaaataaaaattatttgtataattaagaaagcagattagatgcacatggtcaacaggaagttgactgtatgtctgctagttagattcaaaacatcataaagatgatagcatgtcaatatattagcctagccattatgttagcctttgttaggtgggcagcttttctgctttttcccttcctctgtggtgacaacggaggaaatatccaacagaaatacgtctaacagggaaattgggatcatagtttatatgcatctgatttgaaaggagtattgaggaaggttttcatatatgatctatctttggattaaaaagaacatttatgaaatcaagccttctaacactagttataattgagaagcaacagtaactccgtggacagcaatcaagcttaaaattgtaaataaatatggggataattcagttgttgcaaaaaaagggcagaattcagtagaataaagtccttttctcttacaggtattaaatgaggacagagaacctcaggtgttcttatgctagtgcttgctgagtgcatactaagaaagcaattccaaatagatgtatacatctagagagagtggtattagagattcagtgtatgtatttatttacatgagaggaaactggaatataatcccataaattattggaatataatcccataaattatcaccttttatgactggaaaatatttgccaatgaagaaatggtctgtaggtatttgtcttaagatttttggctgtttaataaaaatgtaactttaacggtttcttatagttgcctttataaagtgtattgtctaaaatatttttgtatcatgtgcctttgaaatttgacagctgatttgggtgttggatttctgcccagccatttatcagtattatcattttattcagtagctggcaggtgtattagacaaacgagacttaggtaaggaatggaacctttcctgtggtttgactgcacatcacaccagaagactccagtatccctcattccagaatgaggaaaaagtattctacaaagaacctaatcacctctgtgaaatctatgggatggaaacagtgtggccttaggagtcaaatagtctctgcatggtggggaggatcatgatggaatatgtgaatttctacttctagaagttgtgaaataggtcctgcacttttgcagaatgtccttctttaaacctggcttattccacagctgtagctgataacatgacctggggcttagctgctctagccctgggttcttggagacctcacactgcctggcccctggccatccacctaaggactgcctgctttctggtcacatgtggaccttgatacgactaagcggttacatatgtggttgtgcaaaagctttctgtttaatgcatagtgttaccgatttacatcttggttttcagtggcactatgtctaggaggcaatatccttttaaacagtgctttggctaagatagatacttgtgaatcaaagatagcacagaaatgaactaagtatatcccatttggaattatattttgatactatttaaaatggtttcacctgttaaagggccaacagaactcttggttttacttttgtaattactgtacagaaaatttcaagagtgtttgagtgcttgtcatcaggtgttttccttaataagtagggatatgatcatttacaggaattatatatgaaaaaagtttttgaaatgtatttttgtgatgtgctatgttgaggggaaaccaaatatttatgattttaaaacattcgtatgaaaacattgtacaatgtaatatgctcaactttctcaattttttgctaatttttctaagatacattaaaaatgttttatatttttttttaagtaaaatggacccagtaagaaaattaaaaataccagaacatacactttaaactgtctgatttaataaaacagtggggggta

SEQ ID NO: 64308 - DNA, 366 bp, Homo sapiens
ggagtgatatggacagatgttggttcagtgtcatgctaaatgtaacatcttaattgagccactgaaagtgtaatacctaaagcaaatatgtaggatatggctgttggttaattggattgattaaaatgggagccaaaggaggctttgtctttctattttacttgccttagatactgcttatatcggactgatttgttggagtttttccttattcctttttaggtccaagacaactttgacaagattgaattcaataggatgtgttggaccctctgtgtcaaaaaaaacctcacaaagaatcccctgctcattacagaagaagatgcatttaaaatatgggttattttcaactttttatctgaggac

SEQ ID NO: 64309 - DNA, 425 bp, Homo sapiens
attctattatctttattgaatgttaagaatgtttggcttttcctgtacttaagtatgactgtctctctctctttaatgtacttctactctaacacctgcttttctgtggatgggtttttgattggctagaaactggaggaagcagcatctcgtgcagcagaagaggaaaagaaacgccttcagactcaagtggaacttcaggccaggttcagcacagagctggaaagagagaagcttgtgagtatcacatggctggagaaagcagctgcagtagctcagcctgggtcggtgggaacagggaagggctggaggctacagtgaggcatgtcatcagcttggctttgctactgacctggaatgggctgtaggggaagttgcatgtttgttcattcattaattatctgtttattgaacaccttctatgt

SEQ ID NO: 64310 - DNA, 4905 bp, Homo sapiens
  misc_feature (21)..(21): n is a, c, g, or t
aggtgacggcgcggcgggctntggctgcggaggttgaggggcgtccgaggcgcggaggggctggctgggcaggaggggttggcggggcagcagggccgcggccatggggagcttgaaggaggagctgctcaaagccatctggcacgccttcaccgcactcgaccaggaccacagcggcaaggtctccaagtcccagctcaaggtcctttcccataacctgtgcacggtgctgaaggttcctcatgacccagttgcccttgaagagcacttcagggatgatgatgagggtccagtgtccaaccagggctacatgccttatttaaacaggttcattttggaaaaggtccaagacaactttgacaagattgaattcaataggatgtgttggaccctctgtgtcaaaaaaaacctcacaaagaatcccctgctcattacagaagaagatgcatttaaaatatgggttattttcaactttttatctgaggacaagtatccattaattattgtgtcagaagagattgaatacctgcttaagaagcttacagaagctatgggaggaggttggcagcaagaacaatttgaacattataaaatcaactttgatgacagtaaaaatggcctttctgcatgggaacttattgagcttattggaaatggacagtttagcaaaggcatggaccggcagactgtgtctatggcaattaatgaagtctttaatgaacttatattagatgtgttaaagcagggttacatgatgaaaaagggccacagacggaaaaactggactgaaagatggtttgtactaaaacccaacataatttcttactatgtgagtgaggatctgaaggataagaaaggagacattctcttggatgaaaattgctgtgtagagtccttgcctgacaaagatggaaagaaatgcctttttctcgtaaaatgttttgataagacttttgaaatcagtgcttcagataagaagaagaaacaggagtggattcaagccattcattctactattcatctgttgaagctgggcagccctccaccacacaaagaagcccgccagcgtcggaaagaactccggaagaagcagctggctgaacaagaggaactggagcgacaaatgaaggaactccaggccgccaatgaaagcaagcagcaggagctggaggccgtgcggaagaaactggaggaagcagcatctcgtgcagcagaagaggaaaagaaacgccttcagactcaagtggaacttcaggccaggttcagcacagagctggaaagagagaagcttatcagacagcagatggaagaacaggttgctcaaaagtcctctgaactggaacagtatttacagcgagtacgggagctggaagacatgtacctaaagctgcaggaggctcttgaagatgagagacaggcccggcaagatgaagagacagtgcggaagcttcaggccaggttgttggaggaagagtcttccaagagggctgaactagaaaagtggcacttggagcagcagcaggccattcagacaaccgaggcggagaagcaggagttggagaatcagcgtgtcctgaaggaacaggccctgcaggaggccatggagcagctggaggagcttgagttagaacggaagcaagcacttgagcagtacgaggaagttaaaaagaagctggagatggcaactaataagaccaagagctggaaggacaaagtggcccatcatgaaggattaattcgactgatagaaccaggttcaaagaaccctcacctgatcactaactggggacctgcagctttcactgaggcagaacttgaagagagagagaagaactggaaagagaaaaagaccacggagtgactgagcttgctggcagtcacgtcagttatgtagatactgcatggcaggagagctttacgctaaagacaaaagaaacagctttgggggccgggcgtggtggctcacgcctgtaatcccagcactttgggaggccgaggcgggtggatcacctgaggtcaggagttcaagaccagcctggccaacctggtgaaaccctgtctctactaaaaatacaaaaaaaattagctgagcgtggtggcgggcgcctgtaatcccagctacttgggaggctgaggcaggagaatcacttgaacgtgggaggcggaggttgcagcgagctgagatcatgccgttgtactccagcttgggcaacagagtgagactccatctcaaaacaaaacaaaacaaaacaaaacaaaaaaacccggctttgctgcttttaactcttcttccttctgtgcctctctaagtgggtcagtatcctaaggaagccttcttatttatcttcctgcaaacaagggttacctgaaaagaaaaaaaaagtcaacattgtcaagctgtttgtttactctttctttgaaaacatcaccttctgaaatttgtcttttagctctctcagattcttccccaaatgaggcagggtgcagacagcacagtcagctctgcagagtttggaggggctcactgccactgggtactcagaacctctgtggactggatgtcagctctttcctttggcagcgtgtttccttttccgagtatgtgctgttaaactagattggccggttcgctttccatttcctgacacttgacatggaatgcctttgaccattggtgctctgacagagaagtcatggagtcattgccatttcctggttgcccttttggaatgtgatcctgttagtagaggttttctagcttctactaagatatttctttccctaaccatcatacacttggcatgtttcattcccatctcctttcccctcaccttaaaggagactacccctttgccccatattgtcaacctaattttctctcgtactctctctagtgaatgatgtgctaccaagtatatgccaggctgtgagaggattatactgagtagtagaaagaagctaatttgaaataaaaattatttgtataattaagaaagcagattagatgcacatggtcaacaggaagttgactgtatgtctgctagttagattcaaaacatcataaagatgatagcatgtcaatatattagcctagccattatgttagcctttgttaggtgggcagcttttctgctttttcccttcctctgtggtgacaacggaggaaatatccaacagaaatacgtctaacagggaaattgggatcatagtttatatgcatctgatttgaaaggagtattgaggaaggttttcatatatgatctatctttggattaaaaagaacatttatgaaatcaagccttctaacactagttataattgagaagcaacagtaactccgtggacagcaatcaagcttaaaattgtaaataaatatggggataattcagttgttgcaaaaaaagggcagaattcagtagaataaagtccttttctcttacaggtattaaatgaggacagagaacctcaggtgttcttatgctagtgcttgctgagtgcatactaagaaagcaattccaaatagatgtatacatctagagagagtggtattagagattcagtgtatgtatttatttacatgagaggaaactggaatataatcccataaattattggaatataatcccataaattatcaccttttatgactggaaaatatttgccaatgaagaaatggtctgtaggtatttgtcttaagatttttggctgtttaataaaaatgtaactttaacggtttcttatagttgcctttataaagtgtattgtctaaaatatttttgtatcatgtgcctttgaaatttgacagctgatttgggtgttggatttctgcccagccatttatcagtattatcattttattcagtagctggcaggtgtattagacaaacgagacttaggtaaggaatggaacctttcctgtggtttgactgcacatcacaccagaagactccagtatccctcattccagaatgaggaaaaagtattctacaaagaacctaatcacctctgtgaaatctatgggatggaaacagtgtggccttaggagtcaaatagtctctgcatggtggggaggatcatgatggaatatgtgaatttctacttctagaagttgtgaaataggtcctgcacttttgcagaatgtccttctttaaacctggcttattccacagctgtagctgataacatgacctggggcttagctgctctagccctgggttcttggagacctcacactgcctggcccctggccatccacctaaggactgcctgctttctggtcacatgtggaccttgatacgactaagcggttacatatgtggttgtgcaaaagctttctgtttaatgcatagtgttaccgatttacatcttggttttcagtggcactatgtctaggaggcaatatccttttaaacagtgctttggctaagatagatacttgtgaatcaaagatagcacagaaatgaactaagtatatcccatttggaattatattttgatactatttaaaatggtttcacctgttaaagggccaacagaactcttggttttacttttgtaattactgtacagaaaatttcaagagtgtttgagtgcttgtcatcaggtgttttccttaataagtagggatatgatcatttacaggaattatatatgaaaaaagtttttgaaatgtatttttgtgatgtgctatgttgaggggaaaccaaatatttatgattttaaaacattcgtatgaaaacattgtacaatgtaatatgctcaactttctcaattttttgctaatttttctaagatacattaaaaatgttttatatttttttttaagtaaaatggacccagtaagaaaattaaaaataccagaacatacactttaaactgtctgatttaataaaacagtggggggta

SEQ ID NO: 64311 - DNA, 1031 bp, Homo sapiens
  misc_feature (21)..(21): n is a, c, g, or t
aggtgacggcgcggcgggctntggctgcggaggttgaggggcgtccgaggcgcggaggggctggctgggcaggaggggttggcggggcagcagggccgcggccatggggagcttgaaggaggagctgctcaaagccatctggcacgccttcaccgcactcgaccaggaccacagcggcaaggtctccaagtcccagctcaaggtcctttcccataacctgtgcacggtgctgaaggttcctcatgacccagttgcccttgaagagcacttcagggatgatgatgagggtccagtgtccaaccagggctacatgccttatttaaacaggttcattttggaaaagattgaatacctgcttaagaagcttacagaagctatgggaggaggttggcagcaagaacaatttgaacattataaaatcaactttgatgacagtaaaaatggcctttctgcatgggaacttattgagcttattggaaatggacagtttagcaaaggcatggaccggcagactgtgtctatggcaattaatgaagtctttaatgaacttatattagatgtgttaaagcagggttacatgatgaaaaagggccacagacggaaaaactggactgaaagatggtttgtactaaaacccaacataatttcttactatgtgagtgaggatctgaaggataagaaaggagacattctcttggatgaaaattgctgtgtagagtccttggcctgacaaagatggaagaaactggcttttctcgtacactgtctgatcagacttggactcaggcttccgataagaggagaaccgggtggttcaagccattcattctactatcatctgtgagcgggcgcctccacacaaaagagccgcacgtcgagatcggagagcgtggggacaaggacgggggcaggggccgggccgagacgggcgcccgggaaggggcggctcggcaagagacccaccggccgcaccggagagacacacgggggccacgcaaggggaacaccaccgccggcgtcaagcacggcgc

SEQ ID NO: 64312 - DNA, 4863 bp, Homo sapiens
  misc_feature (21)..(21): n is a, c, g, or t
aggtgacggcgcggcgggctntggctgcggaggttgaggggcgtccgaggcgcggaggggctggctgggcaggaggggttggcggggcagcagggccgcggccatggggagcttgaaggaggagctgctcaaagccatctggcacgccttcaccgcactcgaccaggaccacagcggcaaggtctccaagtcccagctcaaggtcctttcccataacctgtgcacggtgctgaaggttcctcatgacccagttgcccttgaagagcacttcagggatgatgatgagggtccagtgtccaaccagggctacatgccttatttaaacaggttcattttggaaaaggtccaagacaactttgacaagattgaattcaataggatgtgttggaccctctgtgtcaaaaaaaacctcacaaagaatcccctgctcattacagaagaagatgcatttaaaatatgggttattttcaactttttatctgaggacaagtatccattaattattgtgtcagaagagattgaatacctgcttaagaagcttacagaagctatgggaggaggttggcagcaagaacaatttgaacattataaaatcaactttgatgacagtaaaaatggcctttctgcatgggaacttattgagcttattggaaatggacagtttagcaaaggcatggaccggcagactgtgtctatggcaattaatgaagtctttaatgaacttatattagatgtgttaaagcagggttacatgatgaaaaagggccacagacggaaaaactggactgaaagatggtttgtactaaaacccaacataatttcttactatgtgagtgaggatctgaaggataagaaaggagacattctcttggatgaaaattgctgtgtagagtccttgcctgacaaagatggaaagaaatgcctttttctcgtaaaatgttttgataagacttttgaaatcagtgcttcagataagaagaagaaacaggagtggattcaagccattcattctactattcatctgttgaagctgggcagccctccaccacacaaagaagcccgccagcgtcggaaagaactccggaagaagcagctggctgaacaagaggaactggagcgacaaatgaaggaactccaggccgccaatgaaagcaagcagcaggagctggaggccgtgcggaagaaactggaggaagcagcatctcgtgcagcagaagaggaaaagaaacgccttcagactcaagtggaacttcaggccaggttcagcacagagctggaaagagagaagcttatcagacagcagatggaagaacaggttgctcaaaagtcctctgaactggaacagtatttacagcgagtacgggagctggaagacatgtacctaaagctgcaggaggctcttgaagatgagagacaggcccggcaagatgaagagacagtgcggaagcttcaggccaggttgttggaggaagagtcttccaagagggctgaactagaaaagtggcacttggagcagcagcaggccattcagacaaccgaggcggagaagcaggagttggagaatcagcgtgtcctgaaggaacaggccctgcaggaggccatggagcagctggaggagcttgagttagaacggaagcaagcacttgagcagtacgaggaagttaaaaagaagctggagatggcaactaataagaccaagagctggaaggacaaagtggcccatcatgaaggattaattcgactgatagaaccaggttcaaagaaccctcacctgatcactaactggggacctgcagctttcactgaggcagaacttgaagagagagagaagaactggaaagagaaaaagaccacggagtgactgagcttgctggcagtcacgtcagttatgtagatactgcatggcaggagagctttacgctaaagacaaaagaaacagctttgggggccgggcgtggtggctcacgcctgtaatcccagcactttgggaggccgaggcgggtggatcacctgaggtcaggagttcaagaccagcctggccaacctggtgaaaccctgtctctactaaaaatacaaaaaaaattagctgagcgtggtggcgggcgcctgtaatcccagctacttgggaggctgaggcaggagaatcacttgaacgtgggaggcggaggttgcagcgagctgagatcatgccgttgtactccagcttgggcaacagagtgagactccatctcaaaacaaaacaaaacaaaacaaaacaaaaaaacccggctttgctgcttttaactcttcttccttctgtgcctctctaagtgggtcagtatcctaaggaagccttcttatttatcttcctgcaaacaagggttacctgaaaagaaaaaaaaagtcaacattgtcaagctgtttgtttactctttctttgaaaacatcaccttctgaaatttgtcttttagctctctcagattcttccccaaatgaggcagggtgcagacagcacagtcagctctgcagagtttggaggggctcactgccactgggtactcagaacctctgtggactggatgtcagctctttcctttggcagcgtgtttccttttccgagtatgtgctgttaaactagattggccggttcgctttccatttcctgacacttgacatggaatgcctttgaccattggtgctctgacagagaagtcatggagtcattgccatttcctggttgcccttttggaatgtgatcctgttagtagaggttttctagcttctactaagatatttctttccctaaccatcatacacttggcatgtttcattcccatctcctttcccctcaccttaaaggagactacccctttgccccatattgtcaacctaattttctctcgtactctctctagtgaatgatgtgctaccaagtatatgccaggctgtgagaggattatactgagtagtagaaagaagctaatttgaaataaaaattatttgtataattaagaaagcagattagatgcacatggtcaacaggaagttgactgtatgtctgctagttagattcaaaacatcataaagatgatagcatgtcaatatattagcctagccattatgttagcctttgttaggtgggcagcttttctgctttttcccttcctctgtggtgacaacggaggaaatatccaacagaaatacgtctaacagggaaattgggatcatagtttatatgcatctgatttgaaaggagtattgaggaaggttttcatatatgatctatctttggattaaaaagaacatttatgaaatcaagccttctaacactagttataattgagaagcaacagtaactccgtggacagcaatcaagcttaaaattgtaaataaatatggggataattcagttgttgcaaaaaaagggcagaattcagtagaataaagtccttttctcttacaggtattaaatgaggacagagaacctcaggtgttcttatgctagtgcttgctgagtgcatactaagaaagcaattccaaatagatgtatacatctagagagagtggtattagagattcagtgtatgtatttatttacatgagaggaaactggaatataatcccataaattattggaatataatcccataaattatcaccttttatgactggaaaatatttgccaatgaagaaatggtctgtaggtatttgtcttaagatttttggctgtttaataaaaatgtaactttaacggtttcttatagttgcctttataaagtgtattgtctaaaatatttttgtatcatgtgcctttgaaatttgacagctgatttgggtgttggatttctgcccagccatttatcagtattatcattttattcagtagctggcaggtgtattagacaaacgagacttaggtaaggaatggaacctttcctgtggtttgactgcacatcacaccagaagactccagtatccctcattccagaatgaggaaaaagtattctacaaagaacctaatcacctctgtgaaatctatgggatggaaacagtgtggccttaggagtcaaatagtctctgcatggtggggaggatcatgatggaatatgtgaatttctacttctagaagttgtgaaataggtcctgcacttttgcagaatgtccttctttaaacctggcttattccacagctgtagctgataacatgacctggggcttagctgctctagccctgggttcttggagacctcacactgcctggcccctggccatccacctaaggactgcctgctttctggtcacatgtggaccttgatacgactaagcggttacatatgtggttgtgcaaaagctttctgtttaatgcatagtgttaccgatttacatcttggttttcagtggcactatgtctaggaggcaatatccttttaaacagtgctttggctaagatagatacttgtgaatcaaagatagcacagaaatgaactaagtatatcccatttggaattatattttgatactatttaaaatggtttcacctgttaaagggccaacagaactcttggttttacttttgtaattactgtacagaaaatttcaagagtgtttgagtgcttgtcatcaggtgttttccttaataagtagggatatgatcatttacaggaattatatatgaaaaaagtttttgaaatgtatttttgtgatgtgctatgttgaggggaaaccaaatatttatgattttaaaacattcgtatgaaaacattgtacaatgtaatatgctcaactttctcaattttttgctaatttttctaagatacattaaaaatgttttatatttttttttaagtaaaatggacccagtaagaaaattaaaaataccagaac

SEQ ID NO: 64313 - DNA, 4731 bp, Homo sapiens
  misc_feature (21)..(21): n is a, c, g, or t
aggtgacggcgcggcgggctntggctgcggaggttgaggggcgtccgaggcgcggaggggctggctgggcaggaggggttggcggggcagcagggccgcggccatggggagcttgaaggaggagctgctcaaagccatctggcacgccttcaccgcactcgaccaggaccacagcggcaaggtctccaagtcccagctcaaggtcctttcccataacctgtgcacggtgctgaaggttcctcatgacccagttgcccttgaagagcacttcagggatgatgatgagggtccagtgtccaaccagggctacatgccttatttaaacaggttcattttggaaaagattgaatacctgcttaagaagcttacagaagctatgggaggaggttggcagcaagaacaatttgaacattataaaatcaactttgatgacagtaaaaatggcctttctgcatgggaacttattgagcttattggaaatggacagtttagcaaaggcatggaccggcagactgtgtctatggcaattaatgaagtctttaatgaacttatattagatgtgttaaagcagggttacatgatgaaaaagggccacagacggaaaaactggactgaaagatggtttgtactaaaacccaacataatttcttactatgtgagtgaggatctgaaggataagaaaggagacattctcttggatgaaaattgctgtgtagagtccttgcctgacaaagatggaaagaaatgcctttttctcgtaaaatgttttgataagacttttgaaatcagtgcttcagataagaagaagaaacaggagtggattcaagccattcattctactattcatctgttgaagctgggcagccctccaccacacaaagaagcccgccagcgtcggaaagaactccggaagaagcagctggctgaacaagaggaactggagcgacaaatgaaggaactccaggccgccaatgaaagcaagcagcaggagctggaggccgtgcggaagaaactggaggaagcagcatctcgtgcagcagaagaggaaaagaaacgccttcagactcaagtggaacttcaggccaggttcagcacagagctggaaagagagaagcttatcagacagcagatggaagaacaggttgctcaaaagtcctctgaactggaacagtatttacagcgagtacgggagctggaagacatgtacctaaagctgcaggaggctcttgaagatgagagacaggcccggcaagatgaagagacagtgcggaagcttcaggccaggttgttggaggaagagtcttccaagagggctgaactagaaaagtggcacttggagcagcagcaggccattcagacaaccgaggcggagaagcaggagttggagaatcagcgtgtcctgaaggaacaggccctgcaggaggccatggagcagctggaggagcttgagttagaacggaagcaagcacttgagcagtacgaggaagttaaaaagaagctggagatggcaactaataagaccaagagctggaaggacaaagtggcccatcatgaaggattaattcgactgatagaaccaggttcaaagaaccctcacctgatcactaactggggacctgcagctttcactgaggcagaacttgaagagagagagaagaactggaaagagaaaaagaccacggagtgactgagcttgctggcagtcacgtcagttatgtagatactgcatggcaggagagctttacgctaaagacaaaagaaacagctttgggggccgggcgtggtggctcacgcctgtaatcccagcactttgggaggccgaggcgggtggatcacctgaggtcaggagttcaagaccagcctggccaacctggtgaaaccctgtctctactaaaaatacaaaaaaaattagctgagcgtggtggcgggcgcctgtaatcccagctacttgggaggctgaggcaggagaatcacttgaacgtgggaggcggaggttgcagcgagctgagatcatgccgttgtactccagcttgggcaacagagtgagactccatctcaaaacaaaacaaaacaaaacaaaacaaaaaaacccggctttgctgcttttaactcttcttccttctgtgcctctctaagtgggtcagtatcctaaggaagccttcttatttatcttcctgcaaacaagggttacctgaaaagaaaaaaaaagtcaacattgtcaagctgtttgtttactctttctttgaaaacatcaccttctgaaatttgtcttttagctctctcagattcttccccaaatgaggcagggtgcagacagcacagtcagctctgcagagtttggaggggctcactgccactgggtactcagaacctctgtggactggatgtcagctctttcctttggcagcgtgtttccttttccgagtatgtgctgttaaactagattggccggttcgctttccatttcctgacacttgacatggaatgcctttgaccattggtgctctgacagagaagtcatggagtcattgccatttcctggttgcccttttggaatgtgatcctgttagtagaggttttctagcttctactaagatatttctttccctaaccatcatacacttggcatgtttcattcccatctcctttcccctcaccttaaaggagactacccctttgccccatattgtcaacctaattttctctcgtactctctctagtgaatgatgtgctaccaagtatatgccaggctgtgagaggattatactgagtagtagaaagaagctaatttgaaataaaaattatttgtataattaagaaagcagattagatgcacatggtcaacaggaagttgactgtatgtctgctagttagattcaaaacatcataaagatgatagcatgtcaatatattagcctagccattatgttagcctttgttaggtgggcagcttttctgctttttcccttcctctgtggtgacaacggaggaaatatccaacagaaatacgtctaacagggaaattgggatcatagtttatatgcatctgatttgaaaggagtattgaggaaggttttcatatatgatctatctttggattaaaaagaacatttatgaaatcaagccttctaacactagttataattgagaagcaacagtaactccgtggacagcaatcaagcttaaaattgtaaataaatatggggataattcagttgttgcaaaaaaagggcagaattcagtagaataaagtccttttctcttacaggtattaaatgaggacagagaacctcaggtgttcttatgctagtgcttgctgagtgcatactaagaaagcaattccaaatagatgtatacatctagagagagtggtattagagattcagtgtatgtatttatttacatgagaggaaactggaatataatcccataaattattggaatataatcccataaattatcaccttttatgactggaaaatatttgccaatgaagaaatggtctgtaggtatttgtcttaagatttttggctgtttaataaaaatgtaactttaacggtttcttatagttgcctttataaagtgtattgtctaaaatatttttgtatcatgtgcctttgaaatttgacagctgatttgggtgttggatttctgcccagccatttatcagtattatcattttattcagtagctggcaggtgtattagacaaacgagacttaggtaaggaatggaacctttcctgtggtttgactgcacatcacaccagaagactccagtatccctcattccagaatgaggaaaaagtattctacaaagaacctaatcacctctgtgaaatctatgggatggaaacagtgtggccttaggagtcaaatagtctctgcatggtggggaggatcatgatggaatatgtgaatttctacttctagaagttgtgaaataggtcctgcacttttgcagaatgtccttctttaaacctggcttattccacagctgtagctgataacatgacctggggcttagctgctctagccctgggttcttggagacctcacactgcctggcccctggccatccacctaaggactgcctgctttctggtcacatgtggaccttgatacgactaagcggttacatatgtggttgtgcaaaagctttctgtttaatgcatagtgttaccgatttacatcttggttttcagtggcactatgtctaggaggcaatatccttttaaacagtgctttggctaagatagatacttgtgaatcaaagatagcacagaaatgaactaagtatatcccatttggaattatattttgatactatttaaaatggtttcacctgttaaagggccaacagaactcttggttttacttttgtaattactgtacagaaaatttcaagagtgtttgagtgcttgtcatcaggtgttttccttaataagtagggatatgatcatttacaggaattatatatgaaaaaagtttttgaaatgtatttttgtgatgtgctatgttgaggggaaaccaaatatttatgattttaaaacattcgtatgaaaacattgtacaatgtaatatgctcaactttctcaattttttgctaatttttctaagatacattaaaaatgttttatatttttttttaagtaaaatggacccagtaagaaaattaaaaataccagaacatacactttaaactgtctgatttaataaaacagtggggggta

SEQ ID NO: 64314 - DNA, 4613 bp, Homo sapiens
aagaacatttaaatacctgaaatctcacacataaactataatgtattttagtgaataataatgtcttgagatgtgtgatgcccatgaaggagtctgcttagatttaactaaacatggagatctacaaggttaccaaaggccagtttactcataaacatataggacagaaaccacgggttgccagccacaacattccaagtgcaagaagagaaagccacattaagcagatgtaggaatcaccctggcttaggtgcttcatatcccataggagttaatacctcttgtaacatcatcacagatgtaccttccaggattcctgcaagggaggtgctcaggataagagctgctatactcaggaaatcccaatgcatggcatcctatcaggtgtttatagttttaccagtctagatgtagtataccaactggggtcatttttaccataagtaatgtgcttaggaaacagcatttgtaaatcagtaatatgaatttataggtatttttcattgacattaagtttcagctcatttttataaataattcaaattgaatttcatttaaatacttaaaattttgaggaactaatttggctttctgttttagtccttgcctgacaaagatggaaagaaatgcctttttctcgtaaaatgttttgataagacttttgaaatcagtgcttcagataagaagaagaaacaggagtggattcaagccattcattctactattcatctgttgaagctgggcagccctccaccacacaaagaagcccgccagcgtcggaaagaactccggaagaagcagctggctgaacaagaggaactggagcgacaaatgaaggaactccaggccgccaatgaaagcaagcagcaggagctggaggccgtgcggaagaaactggaggaagcagcatctcgtgcagcagaagaggaaaagaaacgccttcagactcaagtggaacttcaggccaggttcagcacagagctggaaagagagaagcttatcagacagcagatggaagaacaggttgctcaaaagtcctctgaactggaacagtatttacagcgagtacgggagctggaagacatgtacctaaagctgcaggaggctcttgaagatgagagacaggcccggcaagatgaagagacagtgcggaagcttcaggccaggttgttggaggaagagtcttccaagagggctgaactagaaaagtggcacttggagcagcagcaggccattcagacaaccgaggcggagaagcaggagttggagaatcagcgtgtcctgaaggaacaggccctgcaggaggccatggagcagctggaggagcttgagttagaacggaagcaagcacttgagcagtacgaggaagttaaaaagaagctggagatggcaactaataagaccaagagctggaaggacaaagtggcccatcatgaaggattaattcgactgatagaaccaggttcaaagaaccctcacctgatcactaactggggacctgcagctttcactgaggcagaacttgaagagagagagaagaactggaaagagaaaaagaccacggagtgactgagcttgctggcagtcacgtcagttatgtagatactgcatggcaggagagctttacgctaaagacaaaagaaacagctttgggggccgggcgtggtggctcacgcctgtaatcccagcactttgggaggccgaggcgggtggatcacctgaggtcaggagttcaagaccagcctggccaacctggtgaaaccctgtctctactaaaaatacaaaaaaaattagctgagcgtggtggcgggcgcctgtaatcccagctacttgggaggctgaggcaggagaatcacttgaacgtgggaggcggaggttgcagcgagctgagatcatgccgttgtactccagcttgggcaacagagtgagactccatctcaaaacaaaacaaaacaaaacaaaacaaaaaaacccggctttgctgcttttaactcttcttccttctgtgcctctctaagtgggtcagtatcctaaggaagccttcttatttatcttcctgcaaacaagggttacctgaaaagaaaaaaaaagtcaacattgtcaagctgtttgtttactctttctttgaaaacatcaccttctgaaatttgtcttttagctctctcagattcttccccaaatgaggcagggtgcagacagcacagtcagctctgcagagtttggaggggctcactgccactgggtactcagaacctctgtggactggatgtcagctctttcctttggcagcgtgtttccttttccgagtatgtgctgttaaactagattggccggttcgctttccatttcctgacacttgacatggaatgcctttgaccattggtgctctgacagagaagtcatggagtcattgccatttcctggttgcccttttggaatgtgatcctgttagtagaggttttctagcttctactaagatatttctttccctaaccatcatacacttggcatgtttcattcccatctcctttcccctcaccttaaaggagactacccctttgccccatattgtcaacctaattttctctcgtactctctctagtgaatgatgtgctaccaagtatatgccaggctgtgagaggattatactgagtagtagaaagaagctaatttgaaataaaaattatttgtataattaagaaagcagattagatgcacatggtcaacaggaagttgactgtatgtctgctagttagattcaaaacatcataaagatgatagcatgtcaatatattagcctagccattatgttagcctttgttaggtgggcagcttttctgctttttcccttcctctgtggtgacaacggaggaaatatccaacagaaatacgtctaacagggaaattgggatcatagtttatatgcatctgatttgaaaggagtattgaggaaggttttcatatatgatctatctttggattaaaaagaacatttatgaaatcaagccttctaacactagttataattgagaagcaacagtaactccgtggacagcaatcaagcttaaaattgtaaataaatatggggataattcagttgttgcaaaaaaagggcagaattcagtagaataaagtccttttctcttacaggtattaaatgaggacagagaacctcaggtgttcttatgctagtgcttgctgagtgcatactaagaaagcaattccaaatagatgtatacatctagagagagtggtattagagattcagtgtatgtatttatttacatgagaggaaactggaatataatcccataaattattggaatataatcccataaattatcaccttttatgactggaaaatatttgccaatgaagaaatggtctgtaggtatttgtcttaagatttttggctgtttaataaaaatgtaactttaacggtttcttatagttgcctttataaagtgtattgtctaaaatatttttgtatcatgtgcctttgaaatttgacagctgatttgggtgttggatttctgcccagccatttatcagtattatcattttattcagtagctggcaggtgtattagacaaacgagacttaggtaaggaatggaacctttcctgtggtttgactgcacatcacaccagaagactccagtatccctcattccagaatgaggaaaaagtattctacaaagaacctaatcacctctgtgaaatctatgggatggaaacagtgtggccttaggagtcaaatagtctctgcatggtggggaggatcatgatggaatatgtgaatttctacttctagaagttgtgaaataggtcctgcacttttgcagaatgtccttctttaaacctggcttattccacagctgtagctgataacatgacctggggcttagctgctctagccctgggttcttggagacctcacactgcctggcccctggccatccacctaaggactgcctgctttctggtcacatgtggaccttgatacgactaagcggttacatatgtggttgtgcaaaagctttctgtttaatgcatagtgttaccgatttacatcttggttttcagtggcactatgtctaggaggcaatatccttttaaacagtgctttggctaagatagatacttgtgaatcaaagatagcacagaaatgaactaagtatatcccatttggaattatattttgatactatttaaaatggtttcacctgttaaagggccaacagaactcttggttttacttttgtaattactgtacagaaaatttcaagagtgtttgagtgcttgtcatcaggtgttttccttaataagtagggatatgatcatttacaggaattatatatgaaaaaagtttttgaaatgtatttttgtgatgtgctatgttgaggggaaaccaaatatttatgattttaaaacattcgtatgaaaacattgtacaatgtaatatgctcaactttctcaattttttgctaatttttctaagatacattaaaaatgttttatatttttttttaagtaaaatggacccagtaagaaaattaaaaataccagaacatacactttaaactgtctgatttaataaaacagtggggggta

SEQ ID NO: 64315 - DNA, 3632 bp, Homo sapiens
agataagcttctctgacagcagatgtccagagcacggttgtctgaaagctcctctggaattcgcatacaagtttaactgcgagctatggaagcttggaacaggtcgccgtatgctgcgtcagtgctcttgaagatgagagacaggcccggcaagatgaagagacagtgcggaagcttcaggccaggttgttggaggaagagtcttccaagagggctgaactagaaaagtggcacttggagcagcagcaggccattcagacaaccgaggcggagaagcaggagttggagaatcagcgtgtcctgaaggaacaggccctgcaggaggccatggagcagctggaggagcttgagttagaacggaagcaagcacttgagcagtacgaggaagttaaaaagaagctggagatggcaactaataagaccaagagctggaaggacaaagtggcccatcatgaaggattaattcgactgatagaaccaggttcaaagaaccctcacctgatcactaactggggacctgcagctttcactgaggcagaacttgaagagagagagaagaactggaaagagaaaaagaccacggagtgactgagcttgctggcagtcacgtcagttatgtagatactgcatggcaggagagctttacgctaaagacaaaagaaacagctttgggggccgggcgtggtggctcacgcctgtaatcccagcactttgggaggccgaggcgggtggatcacctgaggtcaggagttcaagaccagcctggccaacctggtgaaaccctgtctctactaaaaatacaaaaaaaattagctgagcgtggtggcgggcgcctgtaatcccagctacttgggaggctgaggcaggagaatcacttgaacgtgggaggcggaggttgcagcgagctgagatcatgccgttgtactccagcttgggcaacagagtgagactccatctcaaaacaaaacaaaacaaaacaaaacaaaaaaacccggctttgctgcttttaactcttcttccttctgtgcctctctaagtgggtcagtatcctaaggaagccttcttatttatcttcctgcaaacaagggttacctgaaaagaaaaaaaaagtcaacattgtcaagctgtttgtttactctttctttgaaaacatcaccttctgaaatttgtcttttagctctctcagattcttccccaaatgaggcagggtgcagacagcacagtcagctctgcagagtttggaggggctcactgccactgggtactcagaacctctgtggactggatgtcagctctttcctttggcagcgtgtttccttttccgagtatgtgctgttaaactagattggccggttcgctttccatttcctgacacttgacatggaatgcctttgaccattggtgctctgacagagaagtcatggagtcattgccatttcctggttgcccttttggaatgtgatcctgttagtagaggttttctagcttctactaagatatttctttccctaaccatcatacacttggcatgtttcattcccatctcctttcccctcaccttaaaggagactacccctttgccccatattgtcaacctaattttctctcgtactctctctagtgaatgatgtgctaccaagtatatgccaggctgtgagaggattatactgagtagtagaaagaagctaatttgaaataaaaattatttgtataattaagaaagcagattagatgcacatggtcaacaggaagttgactgtatgtctgctagttagattcaaaacatcataaagatgatagcatgtcaatatattagcctagccattatgttagcctttgttaggtgggcagcttttctgctttttcccttcctctgtggtgacaacggaggaaatatccaacagaaatacgtctaacagggaaattgggatcatagtttatatgcatctgatttgaaaggagtattgaggaaggttttcatatatgatctatctttggattaaaaagaacatttatgaaatcaagccttctaacactagttataattgagaagcaacagtaactccgtggacagcaatcaagcttaaaattgtaaataaatatggggataattcagttgttgcaaaaaaagggcagaattcagtagaataaagtccttttctcttacaggtattaaatgaggacagagaacctcaggtgttcttatgctagtgcttgctgagtgcatactaagaaagcaattccaaatagatgtatacatctagagagagtggtattagagattcagtgtatgtatttatttacatgagaggaaactggaatataatcccataaattattggaatataatcccataaattatcaccttttatgactggaaaatatttgccaatgaagaaatggtctgtaggtatttgtcttaagatttttggctgtttaataaaaatgtaactttaacggtttcttatagttgcctttataaagtgtattgtctaaaatatttttgtatcatgtgcctttgaaatttgacagctgatttgggtgttggatttctgcccagccatttatcagtattatcattttattcagtagctggcaggtgtattagacaaacgagacttaggtaaggaatggaacctttcctgtggtttgactgcacatcacaccagaagactccagtatccctcattccagaatgaggaaaaagtattctacaaagaacctaatcacctctgtgaaatctatgggatggaaacagtgtggccttaggagtcaaatagtctctgcatggtggggaggatcatgatggaatatgtgaatttctacttctagaagttgtgaaataggtcctgcacttttgcagaatgtccttctttaaacctggcttattccacagctgtagctgataacatgacctggggcttagctgctctagccctgggttcttggagacctcacactgcctggcccctggccatccacctaaggactgcctgctttctggtcacatgtggaccttgatacgactaagcggttacatatgtggttgtgcaaaagctttctgtttaatgcatagtgttaccgatttacatcttggttttcagtggcactatgtctaggaggcaatatccttttaaacagtgctttggctaagatagatacttgtgaatcaaagatagcacagaaatgaactaagtatatcccatttggaattatattttgatactatttaaaatggtttcacctgttaaagggccaacagaactcttggttttacttttgtaattactgtacagaaaatttcaagagtgtttgagtgcttgtcatcaggtgttttccttaataagtagggatatgatcatttacaggaattatatatgaaaaaagtttttgaaatgtatttttgtgatgtgctatgttgaggggaaaccaaatatttatgattttaaaacattcgtatgaaaacattgtacaatgtaatatgctcaactttctcaattttttgctaatttttctaagatacattaaaaatgttttatatttttttttaagtaaaatggacccagtaagaaaattaaaaataccagaacatacactttaaactgtctgatttaataaaacagtggggggta

SEQ ID NO: 64316 - DNA, 3657 bp, Homo sapiens
gaaatagagataagcgttctcacacacccgatagagaagacaggttgcatcgagtaggcttgcgttatcggtcattaaatattcatagtcagtaccccatctgcgttacttgtgactcatcttgctagtggctctttagtattataccttcgtgcctgtcgaccagtagaataggatggatgcagatgcttcatcggcaggtgtgtggtgaggaatcatctgcacagagatctgtgagctatcatggaggtggcattctgtctacagtcgaactgcatgccgtacaaccgaggcggagaagcaggagttggagaatcagcgtgtcctgaaggaacaggccctgcaggaggccatggagcagctggaggagcttgagttagaacggaagcaagcacttgagcagtacgaggaagttaaaaagaagctggagatggcaactaataagaccaagagctggaaggacaaagtggcccatcatgaaggattaattcgactgatagaaccaggttcaaagaaccctcacctgatcactaactggggacctgcagctttcactgaggcagaacttgaagagagagagaagaactggaaagagaaaaagaccacggagtgactgagcttgctggcagtcacgtcagttatgtagatactgcatggcaggagagctttacgctaaagacaaaagaaacagctttgggggccgggcgtggtggctcacgcctgtaatcccagcactttgggaggccgaggcgggtggatcacctgaggtcaggagttcaagaccagcctggccaacctggtgaaaccctgtctctactaaaaatacaaaaaaaattagctgagcgtggtggcgggcgcctgtaatcccagctacttgggaggctgaggcaggagaatcacttgaacgtgggaggcggaggttgcagcgagctgagatcatgccgttgtactccagcttgggcaacagagtgagactccatctcaaaacaaaacaaaacaaaacaaaacaaaaaaacccggctttgctgcttttaactcttcttccttctgtgcctctctaagtgggtcagtatcctaaggaagccttcttatttatcttcctgcaaacaagggttacctgaaaagaaaaaaaaagtcaacattgtcaagctgtttgtttactctttctttgaaaacatcaccttctgaaatttgtcttttagctctctcagattcttccccaaatgaggcagggtgcagacagcacagtcagctctgcagagtttggaggggctcactgccactgggtactcagaacctctgtggactggatgtcagctctttcctttggcagcgtgtttccttttccgagtatgtgctgttaaactagattggccggttcgctttccatttcctgacacttgacatggaatgcctttgaccattggtgctctgacagagaagtcatggagtcattgccatttcctggttgcccttttggaatgtgatcctgttagtagaggttttctagcttctactaagatatttctttccctaaccatcatacacttggcatgtttcattcccatctcctttcccctcaccttaaaggagactacccctttgccccatattgtcaacctaattttctctcgtactctctctagtgaatgatgtgctaccaagtatatgccaggctgtgagaggattatactgagtagtagaaagaagctaatttgaaataaaaattatttgtataattaagaaagcagattagatgcacatggtcaacaggaagttgactgtatgtctgctagttagattcaaaacatcataaagatgatagcatgtcaatatattagcctagccattatgttagcctttgttaggtgggcagcttttctgctttttcccttcctctgtggtgacaacggaggaaatatccaacagaaatacgtctaacagggaaattgggatcatagtttatatgcatctgatttgaaaggagtattgaggaaggttttcatatatgatctatctttggattaaaaagaacatttatgaaatcaagccttctaacactagttataattgagaagcaacagtaactccgtggacagcaatcaagcttaaaattgtaaataaatatggggataattcagttgttgcaaaaaaagggcagaattcagtagaataaagtccttttctcttacaggtattaaatgaggacagagaacctcaggtgttcttatgctagtgcttgctgagtgcatactaagaaagcaattccaaatagatgtatacatctagagagagtggtattagagattcagtgtatgtatttatttacatgagaggaaactggaatataatcccataaattattggaatataatcccataaattatcaccttttatgactggaaaatatttgccaatgaagaaatggtctgtaggtatttgtcttaagatttttggctgtttaataaaaatgtaactttaacggtttcttatagttgcctttataaagtgtattgtctaaaatatttttgtatcatgtgcctttgaaatttgacagctgatttgggtgttggatttctgcccagccatttatcagtattatcattttattcagtagctggcaggtgtattagacaaacgagacttaggtaaggaatggaacctttcctgtggtttgactgcacatcacaccagaagactccagtatccctcattccagaatgaggaaaaagtattctacaaagaacctaatcacctctgtgaaatctatgggatggaaacagtgtggccttaggagtcaaatagtctctgcatggtggggaggatcatgatggaatatgtgaatttctacttctagaagttgtgaaataggtcctgcacttttgcagaatgtccttctttaaacctggcttattccacagctgtagctgataacatgacctggggcttagctgctctagccctgggttcttggagacctcacactgcctggcccctggccatccacctaaggactgcctgctttctggtcacatgtggaccttgatacgactaagcggttacatatgtggttgtgcaaaagctttctgtttaatgcatagtgttaccgatttacatcttggttttcagtggcactatgtctaggaggcaatatccttttaaacagtgctttggctaagatagatacttgtgaatcaaagatagcacagaaatgaactaagtatatcccatttggaattatattttgatactatttaaaatggtttcacctgttaaagggccaacagaactcttggttttacttttgtaattactgtacagaaaatttcaagagtgtttgagtgcttgtcatcaggtgttttccttaataagtagggatatgatcatttacaggaattatatatgaaaaaagtttttgaaatgtatttttgtgatgtgctatgttgaggggaaaccaaatatttatgattttaaaacattcgtatgaaaacattgtacaatgtaatatgctcaactttctcaattttttgctaatttttctaagatacattaaaaatgttttatatttttttttaagtaaaatggacccagtaagaaaattaaaaataccagaacatacactttaaactgtctgatttaataaaacagtggggggta

SEQ ID NO: 64317 - DNA, 464 bp, Homo sapiens
gcgaccccagcctggccaatcagacacagtgactggtcagcatgtgacctggtgtggccaatgagaaccagcccccaaagaccactgctgcaactccggggaaattggcaaactttctccactggggaggacaggctgctggggtgtaagcctggagctgcaagtctccgctaccttaggaggagaccctgaaaggtaatgaagccaactcggagaaaataaaaagagaccattcatgatgacatcatctgacaactagatgcagccatgccttaagactctaaactcttcaattacatggcccagtaaattccctgttttgttttcccagcttgaattgggcttccatctctcacgactcaaagaaaactgacaaatacctccttcagctactgagaaattgtcaacaatcctccctcatcaacatgataatcaccaaactcccacctctgccatgcaaaggc

SEQ ID NO: 64318 - DNA, 247 bp, Homo sapiens
aattcttcacttaaatctttgcgtctttaagattcgtgaacagagcatattttcttgcccttcaaaggactttatgttagccacttctagtatgccatatcccagtgggacgtgagtctttctgccccttcctttcagccttggtggtgatttacaaggataaacacttgagcactcaacatacttatgtttattagtacacgtaaatggttaattctacactgacaggcacatattaaattggttc

SEQ ID NO: 64319 - DNA, 343 bp, Homo sapiens
ccgtcttagctttctgtatgtcaccatatccatcttatttctttaatttatttttcgaagagatggaatctcactatgttgcttaggctaccaatagatttttaaaagaattttaagcggaaaatttgagttatgtttgaataccattaatttattattttgtccattcatttatgaaactcttgtttgtcaagtactatggtcatgcccaatgctaagcatgcaaaatacaaacataaattacatgctcttcattttctcaaaagactcataatctagcgcaatagtcatgtaaacatactcacttcattttatgaatgtaccacagagttatttattaaaa

SEQ ID NO: 64320 - DNA, 412 bp, Homo sapiens
tactgagctatgcagccagcagtcaacaagccactctcaagagccagggttgtcccaacagagacaggcaaatcagaaatcaacagcccttgaaaagtgtgcggtgcaacaatgagcaatggggcctgcgacatccccaaatcttgcaccccaagaaagctgtatccccagtcagtccccctcagcactggccgaagacatccggtgcctctagccaccatcaccactgtccaaggcactgtcttctttgggaaggtatctgatttggtcagtcacaaattcttttttagccttccctggagaaaaacaagtccccaagaaaaaattcactctatgtagagaaaaaatattttctctcatgttagtaaatgcagaacatttaatattccacaatatatatggttttttattt

SEQ ID NO: 64321 - DNA, 419 bp, Homo sapiens
  misc_feature (27)..(27): n is a, c, g, or t
tgctggactcctgagccaggaggtctnttcactccgtggcccttctgctcattcttcaagtccctgaaattcatgttgaaccataatccacaatgcaacagtatcaagaggtgtggcctttaggagctgattaggccacgaaggctctgcctcatggatgggatcacccttataaaaagacttgatggagtgcattcagtcccttttttgctccttccattccttccaccttgtgggaatacagcatgccctctggaagatgcagcaacacagcaccattttggatgcagagaccacattcttgcaagacaccaaacctgctaatgccttgattttggacttccagcctccagaactataagaaatatatttctgttctttataaatgacccagtctcaggtattttgttactgccata

SEQ ID NO: 64322 - DNA, 758 bp, Homo sapiens
ctgtcacattttattagttaatactagctgtcataactgataatccttggtaactcaaactcagcttaataaaataaaagtacatttcttgctcatgtaaagcccaacttgaagtagattgaatgaccctgctccatacagtcattcagggacccagcctgcagaggttctgccatcttcaacctgtgtcttctttagttaacttactgccaatctccagccaggagacagaggagagggaaggcgtggagggttccaaaagggcctttttggccggagctcattctgttgtctgctacatttagacaactggaggggttggggcaagaaatgtagatccttgctggtctcatcccagcaataattttgcatattgaaaggagtgcacaaatctttgaacagctggccatctctgccttatggacaaaatgccatttgttttctgttcacatgtgggtctttcatgacctgtgagctccttggggtcaaaggctatatattattcaattctgttatccctagttcctagtatagtacagcaggtaaatagatgttttctgaattgaaagtaaaaaaaatcgtttttctgttggatgtcgggcaccataatagatgcttacatttttttttttggataaaggaggtttttttttaaaaaaaggaaagaataaaagaagaagaaaccatttgctataataaagatctgcaaagcatggtaccgggttccaggatggtaggtgttcaagaaacacatattg

SEQ ID NO: 64323 - DNA, 387 bp, Homo sapiens
aaaataattaaaaggtgctacctgataacttttagggagagtaaaacttttgctgactctcttttatcccagtagtatattagtaactatatttatctcccctattagctttgagaagtctatcgagtctttatgctcgaagagtgtaatttaggaggtatgctgcatgaacttgcggtaaaaagaagtaagggaacttcaggaatgccatagttctctcttacattcctgaaaattaaagttttgtatactgctcctaatggtaaaatcctcgacctggtctgatacaggcttagtctcccaaaagtgtaaatgtgtttgcccgtgcaccactggagaacaaatccttcaggtaagtgagtgtcttccgtgaaagcaaagtgctac

SEQ ID NO: 64324 - DNA, 106 bp, Homo sapiens
tttgagggtcccacataatgattttaattattttttgttaatttattccaacatttaaaattcatgataattcacataaaaacccagattatcatcctcttgaaaa

SEQ ID NO: 64325 - DNA, 454 bp, Homo sapiens
caatgaacgccaaacgaacttgagaagtggttgctgaaaggcgctgatgtttccacgtgagatttctgggtcaccctcctggtgactcttgtgcctctgacttctatctgatcctaagtccctgtgcattaaaatacaagcaattggctggatgcggtggctcatgcctgtaaccccagcactttgggaggcccaggcgagtggattacctgaggtcaggagtttgagaccagcctggccaacatggtgaaactctgtctctactaaaaatacaaaaattaactgggcgtggtggcaggtgcctgtaatctcagctactcgggaggctgaggcaggagaattgctggaccccaggaggcggaggttgcagtgagccaagatcatgccattgcactccagctcggtgacaatagccagaccccgtctcaacaacaacaacaacagcaacaacaat

SEQ ID NO: 64326 - DNA, 1656 bp, Homo sapiens
ttcagactcctgcagaaggaggccgggtgccatcaggagtccccgtttggtgtggccgccttctctttggtgtgagtgtcgtcctctctggctgggttcttattttctacatgtagctcaggcgtaagctggtgcccacccgtgttaagtgtcaggctggtcctgaagcagcccagtgcctacagtgaggaaggacctgccgggcaaagcagggcgctcatcaggccagggtttctagaaccatatcccaggctgctgagaatgggtgtgtgggttgtgtgatgcagaattctaggagatgtcatttccatcatagtctagggaaacactcgagcctcgtggagggagatggttctggagggaggcttctgtagcatccaagcccaaggtgagcaggagccccctgagccgagctgctgggactgaagaggaaaaggagagagtgggagtgagatgctaggaggcagcgctgatggcgcttggggacttgactgagaggagtgggacatggagtgggtttccgggtgggtgctcctgtgactcctctagatgggggagacaggagaaaatgtggaaggggtaaggaaagagtgtacagggatgggctgaaggccacagcccttctcggcccctggggagatgttgggaggtgactggatacacccagtgactggtctgaagcttgggaacaagttagggctggaaaaacagacttgggcatcaccgctgtatttggagctggaaataggcccagattaggaacctgggcttgtgaggactggattcccagcgaaggtggaattgggcctgccagccatttgtatacttttctgaagagcatggaattaaatagcattgggcaggttggcactgggggaaagaagaaccgggcgaggttaggacgtggccttgctggcatgataaaaagcatgaggaaacgctttttacctcagaccacacgtgaattgcaagcagctgccctgatggtgccatcaggggcggtggagatacaggccgctctcctcagccatttcctttagaccaagagagcttttattgtgtagcagatgaaagacccgatgagaatttgaggtgtatagtataatgtaaagtttggaaataatgattgtacttgttaattctgtattggtctttggaatcaagggtttctgaacctgagataagcagcttttttgtttcataaaagctctagtcatttttctgtgttgaaagtggaccacagtaatgttcatggatttgttggctgaagcacttccatgtggcttagaagcttagcagacacggcacctccgcctttgtgaactgtcattggccactctgcaaatcctggtggtgcagtagtttagaactgtgtagaaaagatctggttgtagaggacaggaggctgatccagaggcgtctagtcacttgcctgaatcacagctaaaaagcagcagacagaatgaggactcacagctcctgatttattttttccttttgtttaaagcccagtgtattgaactgggcagtcagcatggtatttactgttttatattgtccaggtaagaaacctggagcttattgggagcagaattacaaatataagcaatgccaaccttccctgcaccttagcattacctttaatagtgtcaaaaa

SEQ ID NO: 64327 - DNA, 294 bp, Homo sapiens
aaaattataatgttacagtaatcaaaacagtgttgaattggtatagacaaaccgatgatggaacaaacagagaactcagaaacaggcccacacgtatatgaacaactgatttttgacaattgtacaaaggtaatttaggtggagaaaaaagagtcttctcaaaaaagggttctagaaccatttctacatgcaagaagcttatatccagaatactaaaatataaaataaaaatgcactaccaaaactcaataagaaagcaactcaattaactaatgaagcaaagatttcaagaga

SEQ ID NO: 64328 - DNA, 811 bp, Homo sapiens
cgaacaaggcctcaggtacatggcatgtggccatgatctgataatgcagtcttttccattgcaactagaaaacagtattggaaacagtttgtattcatatggacagacagcaagattaatgtacagtactgcctcaaggttacattacttcacccaccctctgttatgatatccaaataacatctggaccacctcacagcgtgttacactgatccacttcatttgattgtgtcatggtgaatggacaggtggagcaagcattagctaggagactgaagatgctccagaggatgggagatagattgcaggaatattcagtaaaggttttagtggtcaagttcaggagtcttgacaggatactccttccaaaatgtcacctgcatcttgcatcacctaccataaagtaggtagcatggcacctggatggcctctttgacttctaaaatcaagacattccacatctaggaatattgttccagatatattgtcacccggtgacacagaaagctgacatctctgagtaaggctcacaacaaaaagggcatggcagcaggcataaggcacagtacaatcatccctgacactacagctgggtgaccagcagatcctgtggagttggaagcgtcagtgatgggaaaaagtggaaaaagggaaaagctataggaaaaggaatatggagcttgtggcaaatccaagtggagaaatcacaatgcaaacccccaggattctgaaggaaagccattccattcacagcaagataattttgtgcccttttaaaatcagctcttgacttactggactctaatagcat

SEQ ID NO: 64329 - DNA, 228 bp, Homo sapiens
caaagctgaggcgttgcaacagagatcatatggcccataaaaagtaaacagctatttactatctgggccttaacagaaaaagtttctgccagcctctgatttagatgcttgaagaaattcagttttaaaatagggctgggcacagtggctcacacctgtaatcccagcattttgggaggccaaggccaaggtgggtggatcacctgaggtcaagagttcaggaccagc

SEQ ID NO: 64330 - DNA, 468 bp, Homo sapiens
gtgtttttaaaattgctttaaaaattcagcatattgtagacctcttttatgccagtaaaaaaataacttctcaaagtaactacatagaattctgttttatggattaatcatactttatttggccaatttcccaataatgaatttttttcctccagtttttccttataaattgtgctgtgatggccaggcgaagtggctcatgcctgtgatcccagcactttgggaggctgaggtgggcggatcatgaggtcaggaggttgagaccatcctggctaacatggtgacaccctgtctctgctaaaaatacaaaaaattggctgggtgtggtggcacgctgctgtagtcccagctactcaggaggctgaggcaggagaatcgcttgaacccggggaggtggaagttgcagtgagccgcgatcacgccactgcactctagcctgggtgacagagcaagactctgtttcaaaaa

SEQ ID NO: 64331 - DNA, 350 bp, Homo sapiens
gtcaaataaggggactatttaacagagctgtgggcaggattaaagaacaaccaaagatagtgacgcaccagaaactagcaacatcagaaagcctttcctatgcttaagtctgaaggagaaattcgaggaaacggttgttaaatcaggtaccagaacgtttatgttttagaataactcagggagtacaatgggaatgtccatggcacaaagaaatgatgagtgcttgaggtgatgagccccatttatcctggtgtgattattatatgcttgtatcaaaatatctcatgtgccccataaatatatacacctactatgtatccataaaaattcaaaattaaaacaattttaaa

SEQ ID NO: 64332 - DNA, 285 bp, Homo sapiens
tttgtggtttcctgccactgttttggcatgcttgttgttgagattgagaaatagtagtgtatattatatttggcaattatgcttataatctgaaagtgtttgtgtaagcttaggaggtgtaaactttttacttcgcaaacagggaaacagagatccaggcagggccaggggtgttttgggtgagatcaccaaaggcccagaaataaagagtagaatccatgacatctcaactccagaagtactttccgtgcctctgaaacatgatgcttcacttacttaggtttt

SEQ ID NO: 64333 - DNA, 310 bp, Homo sapiens
agtcattaaagaagatggtactcaatcactaattattgtccctgccacacccagtgattctggggaatggactgtggttgcccaaaacagggcaggcagatcttcaatttcagtgattttaactgtggaagctgtggaacatcaggtaaaaccgatgtttgtagaaaaactgaaaaatgtcaatataaaggaaggttcccgacttgaaatgaaagtcagagctacgggtaaccccaaccctgacattgtatggttgaaaaacagtgacatcattgtgcctcataaatatcccaaaatcaggtaagtatgg

SEQ ID NO: 64334 - DNA, 1333 bp, Homo sapiens
gcctctgggactcaattcgcctctaaaaccctgccaggttctagataccagctccagaccacagccccagacagctctggtattcaactggactttgggaagcagagcagttctgaaagtcagcttagctttggaactcagcccagctctgggacccagataagctcaagaattcaagccagctctggaagtcagcttagttcgggaacccagctgatttccggagcccaacccagctccagaactcagactagttctggaaaccagctcagctccgggacccagaccactgcaagaattcagctcagccctggagctcatcttagctccagaacccagtccagtcctgagaccaggctcagctctgaggctcagtccagctctggaacccagttcagttctgggattcagtttggctctgaaacccagaccggctcaagaattcagcccgactctggagcccaacttagttccagaacccagtccagctctgagaccgggctcagctctgaaacccagaccggctcaagaattcagcccagccctggagcccaccttagttctggaacccagcctgtttctggaacccaatccagttccagaactcacaccagttcaagaatctggctgagccctggaaatggaatctgcccacagacccctggccttgaccctagaatccagcttgaggcccctgccccagcccaacctcagcccccaggcccatcccccagagaccccaccccagcccctagcaaagacccccagcctctgcctcagccccatgatcaggtatgtggcatccaggccagccttggccccatcccaggcttaccccaagcctcctacctggccccacagtcacaggtctcctcaaccccccagaagccagccgtctctcccaagccccgggtgggaccccagaagtccaccccacccaccatatctgtcactcctagtcctgcccctagggcagccctcctgagttcccagctgtctgagtccccagctttggcgccagccctttgccccactctgggggagccaggagcccgcccttaccgcggggggccgtagcttggctgtgacttagccctggttcatgtggttctcgtcctctcctgtcccttccagcctggggcccccagaagcagcaagtgaccttatttctccagcaggcggtggtagggagtgtgcggtggtgaaaacaggggcttcaccggtcctggctcagatccaggtccttggagggaaaaggagggcaggagacgggttgcaccgcatgtaccctgagggctcatggtgaataaaggcaccttccatctctgcagcc

SEQ ID NO: 64335 - DNA, 633 bp, Homo sapiens
taatatagatccggcaagagcttagctgtgatcactcctagctgctcagcaaaccactgaggttcctgggaaaaaaaaaaaaatatctcaagggtgtgttaacttgggacactcgttaactgggggaccttcttgaggcttttttccttctttttaaaaatcatctttgattattcttcttttctagtaaaataatatttagaaaaaataatgtcagagcacagcagaaattcagatcaagaagaacttctcgatgaggagattaatgaagatgaaatcttggccaacttgtctgctgaagaactgaaagaactgcagtcggaaatggaagtcatggcccctgaccccagccttcccgtgggaatgattcagaaagatcaaactgacaagccaccgacaggaaacttcaatcataaatctcttgttgattatatgtattgggaaaaggcatccaggcgcatgctggaagaggaacgagttcctgtcacctttgtgaaatccgaggaaaagactcaagaagagcatgaagaaatagaaaaacgtaataaaaatatggcccagtatttaaaagaaaagctcaataatgaaatagttgcaaataaaagagaatcaaagggcagcagcaatatccaa

SEQ ID NO: 64336 - DNA, 789 bp, Homo sapiens
taatatagatccggcaagagcttagctgtgatcactcctagctgctcagcaaaccactgaggttcctgggaaaaaaaaaaaaatatctcaaggtaaaataatatttagaaaaaataatgtcagagcacagcagaaattcagatcaagaagaacttctcgatgaggagattaatgaagatgaaatcttggccaacttgtctgctgaagaactgaaagaactgcagtcggaaatggaagtcatggcccctgaccccagccttcccgtgggaatgattcagaaagatcaaactgacaagccaccgacaggaaacttcaatcataaatctcttgttgattatatgtattgggaaaaggcatccaggcgcatgctggaagaggaacgagttcctgtcacctttgtgaaatccgaggaaaagactcaagaggacgcttgaggaattagaaaccggtattacaattttggcccagttttttaaaagaaagcgctcaatatgaattagtggccattacaggaggactccccagagggccagccaggcattatccccaagaaaaccgtttgaccacagatgcacgaaaagaacgaagatgctgcatgattgaccgcccgaaagggagaagatgctggctgacgaaggttgacgaccgccaccggaacgaggaaggcacagcgcaggacacaacttgaactggtgcggcaccctcgccccggtgatggcccaacattcaggaacggggacgaccgggccagaaaaaaaaaatttctcgggaagttttcacaatggtcgc

SEQ ID NO: 64337 - DNA, 791 bp, Homo sapiens
  misc_feature (446)..(446): n is a, c, g, or t
  misc_feature (460)..(460): n is a, c, g, or t
accacgccctccacgtgttccactgcctcttctcttctcgcttgggaactccagtctcacctcggcttgcaatggaccccaactgctcctgcgaggctggtggctcctgcgcctgcgccggctcctgcaagtgcaaaaagtgcaaatgcacctcctgcaagaagagctgctgctcctgttgccccctgggctgtgccaagtgtgcccagggctgcatctgcaaaggggcgtcagagaagtgcagctgctgtgcctgatgtcgggacagccctgctgtcagatgaaaacagaatgacacgtaaaatccaggattttttttttctacaactccgactcatttgctacattcctttttttctgtgaaatatgtgaataataattaaacacttagacttgaaaaaaaaaaaacaaaaacaaaaaaaaaaacaaaaaaaaagaacaaaaanaaaaaaaggggggngggccctgagctccaacaatgaatatcattcccatctcccgataaggggaagcggtgggaccacccgcaccatcatggataaccgaacgtctgcatcgccacaaacgtgatattatcccttagtctgacaagacaccaaagagggggcgcgcccacctatgatatgagtattgggcggcggacgcctaaattatagtaaatcaaatgacaacaaggcgtgaagcgcgcaggcgcagaaggacatatcaaaagaaagagtaaggattcgaggaccaccgcttatattggcagaaaaacagaaacggcaaagataagcaatgcgcaacggaac

SEQ ID NO: 64338 - DNA, 1710 bp, Homo sapiens
  misc_feature (1365)..(1365): n is a, c, g, or t
  misc_feature (1379)..(1379): n is a, c, g, or t
accacgccctccacgtgttccactgcctcttctcttctcgcttgggaactccagtctcacctcggcttgcaatggaccccaactgctcctgcgaggctggtaaggaacgcccgggttctgtgccttaggatgccaaattcccagacaccatagagagtgtccctgggtttgaggaggtcatattttgcgatctgagctgaagaggacttctttacttcctccgctgctttcctcttggccaagctcctgagagcatgtccctcttccctgtgcctctatgtcagagttgagggtcctaaggctcaaggctgtcctgctccacatcaccccgttggtcacgaggctgctggctgagccccaattctctaaccaggctctgagcagccggattggatgggaggcattggataggtggggacattgcctcttcagggttcagcacagaaagtcgaagtcgcagtcttcccgggctgtgcctggagcctgggacttacctttggaatacaaacggagggtgcttggttttcccagcatgaatggagaggagatgggtcttctcttcttctgctgagtgggaaaggagctctgacggctggccctgaacagagaagggggaagtggacactcattgacccactgctgtaacttctgcatctcactcacaacacactggctttttctattccttgcaggtggctcctgcgcctgcgccggctcctgcaagtgcaaaaagtgcaaatgcacctcctgcaagaagagtgagtgcggggccatctccaggaatctggggctgtggctaaggttgggagggaacccaaggctggccctgagtgcctgcttcctttgtccccctaggccgtcactgcctttccagtcttctgctctgtccagggctcctgtggggctgggcagtctctcataggaagactcaccccaatatccaccagtcgtctcctgaaaaagctgtgccatcctgaactaaggatcctctggggctggagtctgagcttgagccaggcctgctgttgggagagggagctccctggtcaagtctgctgtgacttctctctccctttttccccaggctgctgctcctgttgccccctgggctgtgccaagtgtgcccagggctgcatctgcaaaggggcgtcagagaagtgcagctgctgtgcctgatgtcgggacagccctgctgtcagatgaaaacagaatgacacgtaaaatccaggattttttttttctacaactccgactcatttgctacattcctttttttctgtgaaatatgtgaataataattaaacacttagacttgaaaaaaaaaaaacaaaaacaaaaaaaaaaacaaaaaaaaagaacaaaaanaaaaaaaggggggngggccctgagctccaacaatgaatatcattcccatctcccgataaggggaagcggtgggaccacccgcaccatcatggataaccgaacgtctgcatcgccacaaacgtgatattatcccttagtctgacaagacaccaaagagggggcgcgcccacctatgatatgagtattgggcggcggacgcctaaattatagtaaatcaaatgacaacaaggcgtgaagcgcgcaggcgcagaaggacatatcaaaagaaagagtaaggattcgaggaccaccgcttatattggcagaaaaacagaaacggcaaagataagcaatgcgcaacggaac

SEQ ID NO: 64339 - DNA, 1117 bp, Homo sapiens
  misc_feature (772)..(772): n is a, c, g, or t
  misc_feature (786)..(786): n is a, c, g, or t
accacgccctccacgtgttccactgcctcttctcttctcgcttgggaactccagtctcacctcggcttgcaatggaccccaactgctcctgcgaggctggtggctcctgcgcctgcgccggctcctgcaagtgcaaaaagtgcaaatgcacctcctgcaagaagagtgagtgcggggccatctccaggaatctggggctgtggctaaggttgggagggaacccaaggctggccctgagtgcctgcttcctttgtccccctaggccgtcactgcctttccagtcttctgctctgtccagggctcctgtggggctgggcagtctctcataggaagactcaccccaatatccaccagtcgtctcctgaaaaagctgtgccatcctgaactaaggatcctctggggctggagtctgagcttgagccaggcctgctgttgggagagggagctccctggtcaagtctgctgtgacttctctctccctttttccccaggctgctgctcctgttgccccctgggctgtgccaagtgtgcccagggctgcatctgcaaaggggcgtcagagaagtgcagctgctgtgcctgatgtcgggacagccctgctgtcagatgaaaacagaatgacacgtaaaatccaggattttttttttctacaactccgactcatttgctacattcctttttttctgtgaaatatgtgaataataattaaacacttagacttgaaaaaaaaaaaacaaaaacaaaaaaaaaaacaaaaaaaaagaacaaaaanaaaaaaaggggggngggccctgagctccaacaatgaatatcattcccatctcccgataaggggaagcggtgggaccacccgcaccatcatggataaccgaacgtctgcatcgccacaaacgtgatattatcccttagtctgacaagacaccaaagagggggcgcgcccacctatgatatgagtattgggcggcggacgcctaaattatagtaaatcaaatgacaacaaggcgtgaagcgcgcaggcgcagaaggacatatcaaaagaaagagtaaggattcgaggaccaccgcttatattggcagaaaaacagaaacggcaaagataagcaatgcgcaacggaac

SEQ ID NO: 64340 - DNA, 451 bp, Homo sapiens
gcttgaacccaggaggtggaagtggccgtaagccaagatcgtgccattgcattccagcttgggcgacaagagtgaaactccatctaaaaaacaacaacaacaaaattaaatggggagccgggcccggtggttcacacctataatctcagcacttcgggaggctgaggcaggcagatcccttgagtccaggagtttgagaccagcctgggcaatgtggcgaaaccccgtctctacaaaaaatatgaaaattagccaaatgtggtgacatgcacttgtagtcccagctactcaggaggctgaggtgggaggatcacttgagcctgggaagtcaaggctgcagtgagccatgagcgtgcaaccgtatgtactccagcatgggtgacagagcgagaccctgtctcataaaaataactaaataaatacatgcaaacaaaatttttaacatacccca

SEQ ID NO: 64341 - DNA, 398 bp, Homo sapiens
tctaatggaatctagatctttgtattcctgcatgtaaatggatattaaaatacatactctatgcacactagtagtagctatcacacatatgcatttatattaaaaatactaataacggtcgggcgtggtggctcacgcctgtaatcccagcactttgggaggccaaggcagatggatcacttgaggtcaggagttcaagaccagcctagccaacatagtgaaaccccatctctactaaaaatacaaaaattagccaggcgtgatggtgcacgcctgaaatcccagctactcaggagtctgaggcgcaagaatcacttgcagctgggaggcggaggaggcagtgagccagtatcacatactgtactccaccctgggcgacagacggcgactccatctcg

SEQ ID NO: 64342 - DNA, 424 bp, Homo sapiens
tgcaaaggtgaacagtatgacttaaggtaagttgaaattcactagtgtctgtggaggttgacccgaaattttggtgcttaatttatttatccatttcatgagcagaagtgacacattttcttatttcattttaatgccattgtacatctttaaaagacagtttctcggcacagcatcaataatacaagttataatgattttttttcttaaagtatcttcaagataatatataggttgccagagttgtcacatctcacatactgagccaggctatatttagtatttcatctgagacgtaataaaattttcttctatcttaatcatagaaaaaatatattgtatcatcaactatatgattagctagttgccttttggacatatttaggatgaaataaatgttcatgaaattttatttgttgaattt

SEQ ID NO: 64343 - DNA, 534 bp, Homo sapiens
gtagactcaaagaagtgaagaatttaaaaagattggtaaaatatggtgattaggccagctgtgcctgttagctgacactgtgactggggaatagataccctatttttcctgatggttacatttttaaaggaatggctttcaggtccttgagaaagacactcctgagttgtaggagtacagctcaaagggacagaggaaggattcacagttgtaagccctttttagtaaatgatctaagaggatagttagggcctatcttcagatgctggctagaacaaacagtagattctttggcagccttgagctttaagaggcagacaatttgagagaggctagggtcatcctagggaggtaaccttgagctgttagaaatgttagtatttaaaattagctggatgtggtggtgtgcacctgtagtcccagctactccggaggctgaggcaggagaattgcttgaacctgggaggcagaggtgcagtgagctgagattgcgccactgcactccatcctggtaacagagtgagactccgtctc

SEQ ID NO: 64344 - DNA, 192 bp, Homo sapiens
cttatgcacgtagtctgaaggtaattttacttttcccttggagatgctgaataaactgcattgtgcacctgcattttgactgcaacctgtcacatgaagttgggtatggaatcttctacttttgacatcatgtcagggctcaaaaagttttggattttggagcattttggatttgggatttttgaattagga

SEQ ID NO: 64345 - DNA, 275 bp, Homo sapiens
gggagaaccgggtggttcagttctctgtccccggggagctgtcctgctggggcaggtgatggaatctgccacattttcagtgtttttgccgcgtgtctgtaaccagcatctaagtgtgcaggggttactttggaaccctgagaattgtatttagctccaggcctcaggattttgctataactttgtagtagctgcattacacatcccacaaattcttttggcctataaaatatataattatagatcctgaggaacttggcttaatatattattga

SEQ ID NO: 64346 - DNA, 712 bp, Homo sapiens
gacccatccagttctctgagggggctcttgtgtgttctacaaggttgttcatggtgtatattacatggttaacatcaaaaggctgcctaataggcacctcttcaatataatagtcttttaattagtgaaaattttacacagttcatcattgcttgcttgccttcctcccttctgtccgctcttactccctccttcttttattttctacttacttttccaaaatcatttaacccctttttgtaccattaataagttatcttgtttttgttgttgttttccttttaacaatatgcactgaataattcatctttgtgccaatcgtaaatattttgatataacaaagacttctgtcataaatagatttcctgtgagtaatcttgcaaatattttagaacctgtttggttaagaataaattaaaataaatagacaaatttttaaagacatacaacctatcaaaactgaaccaccaagaaataaaaaatctgggctgggaaaaaaaaaaccaaaacaaaaaacaaacatttggtcggcgccggcctttgggcccttgaaaaagaggttttctataacccattccggttgggcggcgccggggcgcgcattatgggtacgtgtaaccacttgggccataacgcgtggtccctaaggagaaactccggcgcacaaagacatacgtccgctgggtttctccccaaattaaaaaacgccgag

SEQ ID NO: 64347 - DNA, 2138 bp, Homo sapiens
taactgcagaatgtacgctgtcttcagttaaggctgagagtgggaaggagttcctaatcagagatgacatggagatcccttaaagagaaccagattcatacacaaaatgtaagataatttattggctataaaatataaatgatggtatttctgaaaggttagcaatgcatgcctgtctcgtttccctctttctctctctctctctgatagtcacttcaatcaaatggaaccaggaaatgatacacaaatttcagaatttcttcttctgggattttcacaagaacctggactgcaacccttcctctttgggctgttcctgtccatgtacctggtcactgtgctcgggaacctgctcatcatcctggccacaatctcagactcccacctccacacccccatgtacttcttcctctccaacctgtcctttgctgacatttgtgttacttccaccaccattccaaaaatgctgatgaacatccagacacagaacaaagtcatcacctacatagcctgcctcatgcagatgtattttttcatactctttgctggatttgaaaacttcctcctgtccgtgatggcctatgaccggtttgtggccatctgtcaccccctgcactacatggtcattatgaaccctcacctctgtggactgctggttctagcatcctggaccatgagtgctctgtattccttgctacaaatcttaatggtagtacggctgtccttctgcacagccttagaaatcccccactttttctgtgaacttaatcaggtcatccaacttgcttgttctgatagctttcttaatcacatggtgatatattttacagttgcgctgctgggtggaggtcccctgactgggatcctttactcttactctaagataatttcttccatacatgcaatctcatcagctcaggggaagtacaaggcattttccacctgtgcatctcacctctcagttgtctccttattttatggtgcaatcctaggggtgtaccttagttctgctgccacccgcaactcacactcaagtgcaacagcctcagtgatgtacactgtggtcacccccatgctgaacccctttatctatagtctgaggaataaagacataaagagggctctgggaatacatttgttgtggggaacaatgaaagggcaatttttcaagaagtgcccatgattgcagggctctaagcttcagaggtagtaactgtcattcttcaatcagatagtggaaatagaacttgctccttctattaatacttattatatttctgggagtttcaatttgttgtgatttcaactggtcttgtagaatttaagcaactccttttattaagctttctgctctctgatatccaacagttttttctctttgttgttttcctactttctcaaggttatttccgactttggatcagaaacactttggagatttccatttgtctcatacagggaagagttgtatgtctcctgtggcatagactacacttggcaattggggtaattgatgtaaatttatagtggaatatgacctgagaccacaatttgttcacttttgtattcttcagtcctatgtctgtctctaccttcaatgctcctcctgataatgtagacctgaacatacttgtgtattttgcagctggtcatgagattgtgttgtcctcattaggacatcatgtctttgtcagtgccatgtccacagtatctgccatactccctggcatagtacggtaaggcaaaaattgtttatcaaaaatatgttccgagtgcaatgcccactgaaagacaaacttgcatatgttgattaacttaatatggacttacagtcagagatgaccttaaatatgatggagtaaaattgtcaatcatacattgaattgctatggaagacttgtttttatgatgtgcatggactcattgaagtatggaagcttagtgcccatatataagtttatttattggagtgatggatttggtgccatggtctataatgtttcatgcatccatacttctgtttttgcttcaaaatttttagtgctccctacaaatacgaatccttctatcccactaaccaaaatacctccttcattataaaattttgtcgtaaacattaaagtgcaggtcagtgaaca

SEQ ID NO: 64348 - DNA, 569 bp, Homo sapiens
gtccatatctctcgtaatcacctaaatttcaaacctcagtggcaaagataataaattggtggccagtaaaccaaatctcacccataaatgttttgcttggcctacataatttaaaagttggagccaaaattatttttaaatacaagaaaaacatttctggtgtctcatgaaatattgaaagctgagccttcatttctacatggcaataatcagagctgaatatcaggctgagtatcataccatttgacaaatatgggttcttcatttctctaagtcagtgtatatctatctatttagatcagtttagttttgatcattttacttactgctgcccttgtaaggcatttaagtttttagtcctcactgtaaatgtttgttttttttcctgtttatcgagtatggccaagtagattgttaaatgagatacgttcttgctagctaagccatgacagtctaattttactaattcattttctgtttatatcaacaaaacacttctgtgtcttgatagggattttgattataagagtaagctttatcaaaatgtattaaactgtgctttatactta

SEQ ID NO: 64349 - DNA, 378 bp, Homo sapiens
ctgctccaccctcactcccgccaaaccactcaccccgtcactctctctaaattagccaattggaattagtttagcctgtgcggtctaacactagccaataggggaacgacacagcagcaggggccacgtgtgtcaggaataagaaccccttcccctcccttgtccaagtgtgtgctcaccattgctccatatgtaagggtgcacccttctatagaagtatattgccttgctaagaattaaaaagaaaattttatatttgagtgctatttcttttgcggcaccgaaactataacagtacccaatcacctagtctctaagggagaaatggacaaatgcataatcatggtaggagatttaacacacctcttaaaaaaaaaa

SEQ ID NO: 64350 - DNA, 386 bp, Homo sapiens
cagggcagctccttggtgcagctcctgctgcactgctggccccggtctggctctcttggtggctgtggccacccgtgccattgcatggtcctaacagtctctgtgtatattcagcttgcttcctgctgtggggccccactcctgctgcagaactcagcccctggttcaatgctgacctttgtaccccagtcccttaactacgcaggcatcttcctgtgtgtgtggtgttttgtaggtatacatctctctttcagcagctagctgaagtatgatttgcatacaacaagccgcatttatctaaagtgttatcagttgatatgttttgccttttgcaaatgacaccaaaagcatcaccacaatcgagataataaacagacccccccaaa

SEQ ID NO: 64351 - DNA, 527 bp, Homo sapiens
attgtcttaggccacacataaaatacactaacactaatgatagccgatgagcttaaaaaaaaaaaaatctgctgatgcacccatgagaggggagacagcactgtcgtctctcgcagttttcccttaacactcccttatctgcagacttaaactaggagcccctggcagagtcctacctccagaatcacaaaagtgtagaaggaaagtgagagacattgattgactttatatctgacttactagtttcctaaggcagagattttttagaaaactgcctggcctggcccagcccaggatagatagggatgggtaagaagcccttgagatgtggcagtatgtggcttgacttcagacttgtcagattaggggttttatagggtttttttagctcttgttttgattaagcttgtttgacttgcagggtgtctcctacctgtgttccagccacccgatttccttcctcaagaaaactgtttacttacactattcaaattagttattctcagggctatttttatgactttgta

SEQ ID NO: 64352 - DNA, 511 bp, Homo sapiens
tgaactttggtctcagaaaattgttaaactcctccagacacacagacggcccgagtcagtgacaagggatttcagtaacatcttagctacccctttgctatacagtggggaaactgaggcccagagaggagcagcacacaccttcaattgctgggcagctccagagcccttaaggagccattttctttgtcatttagggaccctcagctcctctgccatgcagaagtagctgcagttctggtacaaacctgcatttcctgccaagaaagccaactcaggtgggcggtaccaggaggctaaggctgagtcagggagcagtcaagcagtcatatttataacaaggccaccacaggaatcccactgctccaggccggaagggatcctgggggcaactcctcccacccccagcccgcctccctgtgcttgagtcctctaatgtgatttcaacctcccccgccatcccccaatagcctaaccctactctgtcaggttgagacttggactagtgggt

SEQ ID NO: 64353 - DNA, 4445 bp, Homo sapiens
  misc_feature (64)..(64): n is a, c, g, or t
  misc_feature (66)..(66): n is a, c, g, or t
cccgctgtccctttaaccccgccgccgggcgcacgtgagcggctccgggtggcacccggcgccncngccgccgaggcagttgtatttcgaacgtgcctctggctagcagccaggcgccttggctcgcggtccgcctggcctccctcctcctcatacttttcttcctgcgcaaccccctcccctttatccgcccacgattagaggtgggcactccccccaccaccaccccctccccaacgcaagcgcgtgcacgcacacacaccacacacactcacactcacacacactcacacacactcatcccacttgaatcttggggcaggaactcagaaaacttccagcccgggcagcgcgcgcttggtgcaagactcaggagctagcagcccgtccccctccgactctccggtgccgccgctgcctgctcccgccaccctaggaggcgcggtgccacccactactctgtcctctgcctgtgctccgtgcccgaccctatcccggcggagtctccccatcctcctttgctttccgactgcccaaggcactttcaatctcaatctcttctctctctctctctctctctctgtctctctctctctctctctctctctctctctcgcagggtggggggaagaggaggaggaattctttccccgcctaacatttcaagggacacaattcactccaagtctcttccctttccaagccgcttccgaagtgctcccggtgcccgcaactcctgatcccaacccgcgagaggagcctctgcgacctcaaagcctctcttccttctccctcgcttccctcctcctcttgctacctccacctccaccgccacctccacctccggcacccacccaccgccgccgccgccaccggcagcgcctcctcctctcctcctcctcctcccctcttctctttttggcagccgctggacgtccggtgttgatggtggcagcggcggcagcctaagcaacagcagccctcgcagcccgccagctcgcgctcgccccgccggcgtccccagccctatcacctcatctcccgaaaggtgctgggcagctccggggcggtcgaggcgaagcggctgcagcggcggtagcggcggcgggaggcaggatgagcgcacgcggtgagggcgcggggcagccgtccacttcagcccagggacaacctgccgccccagcgcctcagaagagaggacgcggccgccccaggaagcagcagcaagaaccaaccggtgagccctctcctaagagacccaggggaagacccaaaggcagcaaaaacaagagtccctctaaagcagctcaaaagaaagcagaagccactggagaaaaacggccaagaggcagacctaggaaatggccacaacaagttgttcagaagaagcctgctcaggaggaaactgaagagacatcctcacaagagtctgccgaagaggactagggggcgccaacgttcgatttctacctcagcagcagttggatcttttgaagggagaagacactgcagtgaccacttattctgtattgccatggtctttccactttcatctggggtggggtggggtggggtgggggaggggggggtggggtggggagaaatcacataaccttaaaaaggactatattaatcaccttctttgtaatcccttcacagtcccaggtttagtgaaaaactgctgtaaacacaggggacacagcttaacaatgcaacttttaattactgttttcttttttcttaacctactaatagtttgttgatctgataagcaagagtgggcgggtgagaaaaaccgaattgggtttagtcaatcactgcactgcatgcaaacaagaaacgtgtcacacttgtgacgtcgggcattcatataggaagaacgcggtgtgtaacactgtgtacacctcaaataccaccccaacccactccctgtagtgaatcctctgtttagaacaccaaagataaggactagatactactttctctttttcgtataatcttgtagacacttacttgatgatttttaactttttatttctaaatgagacgaaatgctgatgtatcctttcattcagctaacaaactagaaaaggttatgttcatttttcaaaaagggaagtaagcaaacaaatattgccaactcttctatttatggatatcacacatatcagcaggagtaataaatttactcacagcacttgttttcaggacaacacttcattttcaggaaatctacttcctacagagccaaaatgccatttagcaataaataacacttgtcagcctcagagcatttaaggaaactagacaagtaaaattatcctctttgtaatttaatgaaaaggtacaacagaataatgcatgatgaactcacctaattatgaggtgggaggagcgaaatctaaatttcttttgctatagttatacatcaatttaaaaagcaaaaaaaaaaaggggggggcaatctctctctgtgtctttctctctctctctccctctccctctctcttttcatgtgtatcagtttccatgaaagacctgaataccacttacctcaaattaagcatatgtgttacttcaagtaatacgttttgacataagatggttgaccaaggtgcttttcttcggcttgagttcaccatctcttcattcaaactgcacttttagccagagatgcaatatatccccactactcaatactacctctgaatgttacaacgaatttacagtctagtacttattacatgctgctatacacaagcaatgcaagaaaaaaacttactgggtaggtgattctaatcatctgcagttctttttgtacacttaattacagttaaagaagcaatctccttactgtgtttcagcatgactatgtatttttctatgtttttttaattaaaaatttttaaaatacttgtttcagcttctctgctagatttctacattaacttgaaaattttttaaccaagtcgctcctaggttcttaaggataattttcctcaatcacactacacatcacacaagatttgactgtaatatttaaatattaccctccaagtctgtacctcaaatgaattctttaaggagatggactaattgacttgcaaagacctacctccagacttcaaaaggaatgaacttgttacttgcagcattcatttgttttttcaatgtttgaaatagttcaaactgcagctaaccctagtcaaaactatttttgtaaaagacatttgatagaaaggaacacgtttttacatacttttgcaaaataagtaaataataaataaaataaagccaaccttcaaagaacttgaagctttgtaggtgagatgcaacaagccctgcttttgcataatgcaatcaaaaatatgtgtttttaagattagttgaatataagaaaatgcttgacaaatattttcatgtattttacacaaatgtgatttttgtaatatgtctcaaccagatttattttaaacgcttcttatgtagagtttttatgcctttctctcctagtgagtgtgctgactttttaacatggtattatcaactgggccaggaggtagtttctcatgacggcttttgtcagtatggcttttagtactgaagccaaatgaaactcaaaaccatctctcttccagctgcttcagggaggtagtttcaaaggccacatacctctctgagactggcagatcgctcactgttgtgaatcaccaaaggagctatggagagaattaaaactcaacattactgttaactgtgcgttaaataagcaaataaacagtggctcataaaaataaaagtcgcattccatatctttggatgggccttttagaaacctcattggccagctcataaaatggaagcaattgctcatgttggccaaacatggtgcaccgagtgatttccatctctggtaaagttacacttttatttcctgtatgttgtacaatcaaaacacactactacctcttaagtcccagtatacctcatttttcatactgaaaaaaaaagcttgtggccaatggaacagtaagaacatcataaaatttttatatatatagtttatttttgtgggagataaattttataggactgttctttgctgttgttggtcgcagctacataagactggacatttaacttttctaccatttctgcaagttaggtatgtttgcaggagaaaagtatcaagacgtttaactgcagttgactttctccctgttcctttgagtgtcttctaactttattctttgttctttatgtagaattgctgtctatgattgtactttgaatcgcttgcttgttgaaaatatttctctagtgtattatcactgtctgttctgcacaataaacataacagcctctgtgatccccatgtgttttgattcctgctctttgttacagttccattaaatgagtaataaagtttggtcaaaatagatcaa

SEQ ID NO: 64354 - DNA, 1591 bp, Homo sapiens
  misc_feature (64)..(64): n is a, c, g, or t
  misc_feature (66)..(66): n is a, c, g, or t
  misc_feature (1569)..(1569): n is a, c, g, or t
cccgctgtccctttaaccccgccgccgggcgcacgtgagcggctccgggtggcacccggcgccncngccgccgaggcagttgtatttcgaacgtgcctctggctagcagccaggcgccttggctcgcggtccgcctggcctccctcctcctcatacttttcttcctgcgcaaccccctcccctttatccgcccacgattagaggtgggcactccccccaccaccaccccctccccaacgcaagcgcgtgcacgcacacacaccacacacactcacactcacacacactcacacacactcatcccacttgaatcttggggcaggaactcagaaaacttccagcccgggcagcgcgcgcttggtgcaagactcaggagctagcagcccgtccccctccgactctccggtgccgccgctgcctgctcccgccaccctaggaggcgcggtgccacccactactctgtcctctgcctgtgctccgtgcccgaccctatcccggcggagtctccccatcctcctttgctttccgactgcccaaggcactttcaatctcaatctcttctctctctctctctctctctctgtctctctctctctctctctctctctctctctcgcagggtggggggaagaggaggaggaattctttccccgcctaacatttcaagggacacaattcactccaagtctcttccctttccaagccgcttccgaagtgctcccggtgcccgcaactcctgatcccaacccgcgagaggagcctctgcgacctcaaagcctctcttccttctccctcgcttccctcctcctcttgctacctccacctccaccgccacctccacctccggcacccacccaccgccgccgccgccaccggcagcgcctcctcctctcctcctcctcctcccctcttctctttttggcagccgctggacgtccggtgttgatggtggcagcggcggcagcctaagcaacagcagccctcgcagcccgccagctcgcgctcgccccgccggcgtccccagccctatcacctcatctcccgaaaggtgctgggcagctccggggcggtcgaggcgaagcggctgcagcggcggtagcggcggcgggaggcaggatgagcgcacgcggtgagggcgcggggcagccgtccacttcagcccagggacaacctgccgccccagcgcctcagaagagaggacgcggccgccccaggaagcagcagcaagaaccaaccggtgagccctctcctaagagacccaggggaagacccaaaggcagcaaaaacaagagtccctctaaagcagctcaaaagaaagcagaagccactggagaaaaacggccaagaggcagacctaggaaatggcacagtcaaagtgcctcagaagaactcataagaatcatgcaagcttcctccctcagccattgatggaaagttcagcaagatcagcaacaaaaccaagaaaaatgatccttgcgtgctgaatatctgaaaagagaaatttttcctacaaaatctcttgggtcaagaaagttctagaatttgaattgataaacatggtgggttggntgagggtaagagtatatgagga

SEQ ID NO: 64355 - DNA, 4593 bp, Homo sapiens
  misc_feature (64)..(64): n is a, c, g, or t
  misc_feature (66)..(66): n is a, c, g, or t
cccgctgtccctttaaccccgccgccgggcgcacgtgagcggctccgggtggcacccggcgccncngccgccgaggcagttgtatttcgaacgtgcctctggctagcagccaggcgccttggctcgcggtccgcctggcctccctcctcctcatacttttcttcctgcgcaaccccctcccctttatccgcccacgattagaggtgggcactccccccaccaccaccccctccccaacgcaagcgcgtgcacgcacacacaccacacacactcacactcacacacactcacacacactcatcccacttgaatcttggggcaggaactcagaaaacttccagcccgggcagcgcgcgcttggtgcaagactcaggagctagcagcccgtccccctccgactctccggtgccgccgctgcctgctcccgccaccctaggaggcgcggtgccacccactactctgtcctctgcctgtgctccgtgcccgaccctatcccggcggagtctccccatcctcctttgctttccgactgcccaaggcactttcaatctcaatctcttctctctctctctctctctctctgtctctctctctctctctctctctctctctctcgcagggtggggggaagaggaggaggaattctttccccgcctaacatttcaagggacacaattcactccaagtctcttccctttccaagccgcttccgaagtgctcccggtgcccgcaactcctgatcccaacccgcgagaggagcctctgcgacctcaaagcctctcttccttctccctcgcttccctcctcctcttgctacctccacctccaccgccacctccacctccggcacccacccaccgccgccgccgccaccggcagcgcctcctcctctcctcctcctcctcccctcttctctttttggcagccgctggacgtccggtgttgatggtggcagcggcggcagcctaagcaacagcagccctcgcagcccgccagctcgcgctcgccccgccggcgtccccagccctatcacctcatctcccgaaaggtgctgggcagctccggggcggtcgaggcgaagcggctgcagcggcggtagcggcggcgggaggcaggatgagcgcacgcggtgagggcgcggggcagccgtccacttcagcccagggacaacctgccgccccagcgcctcagaagagaggacgcggccgccccaggaagcagcagcaagaaccaaccggtgagccctctcctaagagacccaggggaagacccaaaggcagcaaaaacaagagtccctctaaagcagctcaaaagaaagcagaagccactggagaaaaacggccaagaggcagacctaggaaatggtggttgctaatgaagagcccgtgctggtgaaggaagcctgctgatcccggaactggccttgcgcgcaagtggtgggatgacagacacattcccttccttgaactgcactcttttcccttgcactcagaggtggcccgagagagccccgccacaacaagttgttcagaagaagcctgctcaggaggaaactgaagagacatcctcacaagagtctgccgaagaggactagggggcgccaacgttcgatttctacctcagcagcagttggatcttttgaagggagaagacactgcagtgaccacttattctgtattgccatggtctttccactttcatctggggtggggtggggtggggtgggggaggggggggtggggtggggagaaatcacataaccttaaaaaggactatattaatcaccttctttgtaatcccttcacagtcccaggtttagtgaaaaactgctgtaaacacaggggacacagcttaacaatgcaacttttaattactgttttcttttttcttaacctactaatagtttgttgatctgataagcaagagtgggcgggtgagaaaaaccgaattgggtttagtcaatcactgcactgcatgcaaacaagaaacgtgtcacacttgtgacgtcgggcattcatataggaagaacgcggtgtgtaacactgtgtacacctcaaataccaccccaacccactccctgtagtgaatcctctgtttagaacaccaaagataaggactagatactactttctctttttcgtataatcttgtagacacttacttgatgatttttaactttttatttctaaatgagacgaaatgctgatgtatcctttcattcagctaacaaactagaaaaggttatgttcatttttcaaaaagggaagtaagcaaacaaatattgccaactcttctatttatggatatcacacatatcagcaggagtaataaatttactcacagcacttgttttcaggacaacacttcattttcaggaaatctacttcctacagagccaaaatgccatttagcaataaataacacttgtcagcctcagagcatttaaggaaactagacaagtaaaattatcctctttgtaatttaatgaaaaggtacaacagaataatgcatgatgaactcacctaattatgaggtgggaggagcgaaatctaaatttcttttgctatagttatacatcaatttaaaaagcaaaaaaaaaaaggggggggcaatctctctctgtgtctttctctctctctctccctctccctctctcttttcatgtgtatcagtttccatgaaagacctgaataccacttacctcaaattaagcatatgtgttacttcaagtaatacgttttgacataagatggttgaccaaggtgcttttcttcggcttgagttcaccatctcttcattcaaactgcacttttagccagagatgcaatatatccccactactcaatactacctctgaatgttacaacgaatttacagtctagtacttattacatgctgctatacacaagcaatgcaagaaaaaaacttactgggtaggtgattctaatcatctgcagttctttttgtacacttaattacagttaaagaagcaatctccttactgtgtttcagcatgactatgtatttttctatgtttttttaattaaaaatttttaaaatacttgtttcagcttctctgctagatttctacattaacttgaaaattttttaaccaagtcgctcctaggttcttaaggataattttcctcaatcacactacacatcacacaagatttgactgtaatatttaaatattaccctccaagtctgtacctcaaatgaattctttaaggagatggactaattgacttgcaaagacctacctccagacttcaaaaggaatgaacttgttacttgcagcattcatttgttttttcaatgtttgaaatagttcaaactgcagctaaccctagtcaaaactatttttgtaaaagacatttgatagaaaggaacacgtttttacatacttttgcaaaataagtaaataataaataaaataaagccaaccttcaaagaacttgaagctttgtaggtgagatgcaacaagccctgcttttgcataatgcaatcaaaaatatgtgtttttaagattagttgaatataagaaaatgcttgacaaatattttcatgtattttacacaaatgtgatttttgtaatatgtctcaaccagatttattttaaacgcttcttatgtagagtttttatgcctttctctcctagtgagtgtgctgactttttaacatggtattatcaactgggccaggaggtagtttctcatgacggcttttgtcagtatggcttttagtactgaagccaaatgaaactcaaaaccatctctcttccagctgcttcagggaggtagtttcaaaggccacatacctctctgagactggcagatcgctcactgttgtgaatcaccaaaggagctatggagagaattaaaactcaacattactgttaactgtgcgttaaataagcaaataaacagtggctcataaaaataaaagtcgcattccatatctttggatgggccttttagaaacctcattggccagctcataaaatggaagcaattgctcatgttggccaaacatggtgcaccgagtgatttccatctctggtaaagttacacttttatttcctgtatgttgtacaatcaaaacacactactacctcttaagtcccagtatacctcatttttcatactgaaaaaaaaagcttgtggccaatggaacagtaagaacatcataaaatttttatatatatagtttatttttgtgggagataaattttataggactgttctttgctgttgttggtcgcagctacataagactggacatttaacttttctaccatttctgcaagttaggtatgtttgcaggagaaaagtatcaagacgtttaactgcagttgactttctccctgttcctttgagtgtcttctaactttattctttgttctttatgtagaattgctgtctatgattgtactttgaatcgcttgcttgttgaaaatatttctctagtgtattatcactgtctgttctgcacaataaacataacagcctctgtgatccccatgtgttttgattcctgctctttgttacagttccattaaatgagtaataaagtttggtcaaaatagatcaa

SEQ ID NO: 64356 - DNA, 3118 bp, Homo sapiens
gcgcgggcggcaggcaacggctgaggcggcggcggcggcggcggcggcgtgggttgggctcgagcgggcggcggcgcctcagactccccggaacgggagcccacgcgggcgggcgcctgaaacaaagggaagcgggcgtccgggcgccgcgggtgggcggtcagtcggtcagcgcggagccagccagcgggtgcccgcgcaagccccgagcgcggccggccggcgcggcctcagggcgggaagatgccgcgcgtcgtgcccgaccagagaagcaagttcgagaacgaggagttttttaggaagctgagccgcgagtgtgagattaagtacacgggcttcagggaccggccccacgaggaacgccaggcacgcttccagaacgcctgccgcgacggccgctcggaaatcgcttttgtggccacaggaaccaatctgtctctccagttttttccggccagctggcagggagaacagcgacaaacacctagccgagagtatgtcgacttagaaagagaagcaggcaaggtatatttgaaggctcccatgattctgaatggagtctgtgttatctggaaaggctggattgatctccaaagactggatggtatgggctgtctggagtttgatgaggagcgagcccagcaggaggatgcattagcacaacaggcctttgaagaggctcggagaaggacacgcgaatttgaagatagagacaggtctcatcgggaggaaatggaggtgagagtttcacagctgctggcagtaactggcaagaagacaacaagaccctagtcctggttccaatttaggtggtggtgatgacctcaaacttcgttaattaatagcacagcagatgtgtgctgcccatctttacatacacattgcttctagttggcagaaataattgattaaaagaccagaaactgtgataactggaggtactacggtctatttctcaaccttaggcagtaatagacatcacaaactgccatggttttgcactatgattataatacctgcatttctaattttttaagcatgtagccagtaataatttgaagttttttttctatgcaagcttaccttgttggcattattttagggagttgaaactatcaactgtaaagctccttttcttccactttaatttaaaagttcatgtcatttaaaaacaagtcaagaaattaaaattgtatcagagggttttctctaatcattttttctatttttttttttgtacttctagatgttttggttatacagcttcattttagatgagcattcttattttttgttttgtttgccccatttccttttgtgtttttatagtctatagcattttaaaactgctgatgttgtttgcattatttacaggctaaaaacttagtagcatagagctgtctgccacagccttctgacaaagtttacagttattaaagttgcagtatccttttaaatgctagtaatcagcactctttcttttttttttttttaatagagacagggtctcgcagtgttgcccaggctggtctcgaactcctggcatcaagcgatcctcctgccttagcctcccagagtactgggattacaggctctttctttttaaacataaaagttttaaattggtattaactctgtactctgccctagattgttttagcttctgttctgtaatcatgagtttggttggagatattctccatagatgatcttctactgaaatgcctaaagaagtcacaggctggcttctgttttattcagggatttttttaaaaagtcaatcagaaaagggatactggagcttcttcatgtatgtaacagcatattaaactggagacagtgatgaatcagctacaaaggtaatattgtattaaaatcatgtttaagatagctgcttttatgtgtattttatattgcatgcttttgtaaaaacatgctgggtgatgaaagattagttttagagagaaaatgttcatctgtgcagaggatgcattttcttccattaattctggaaaaaacgttcacagttatatatatggtattttgcaaaaggactattaatagaaccttttgagatgaattaatgtaagaatattttttaaataggcttactgtcaaattgcaactttttttttagatacagagtggaaaacagtgctaagtcatttggcacctccttacaaatatttttcatggtcacatttattaaatgttactacatttctgaatttttgaaaaatgtattttatcattaaatggcattattttaaagggtgaaaaactgacacagtcaattcagaaaatggactgaagtctgaataaggtcattgcatttaaaaagcatataactgtacttgactgatgagggaggtgttactttcattgtatataggtcttatttcataaacagatatcctgtatcaaataaaagtatttgttatatatttgaagttatgcatggaaaggagtgtgtttaaattgttacaaacaataatgcgtcattaaaggccatgctgatcttgcataactataagtactatgaatgaatttggttggttttggtgttgtacagctcacatgtttacacactcagtgccctaatttcccctgagggaatcgctttttaagtgatccttacagtggtgttttatgttactttattacagagctccttggttttttacttctgcacttaaatttttttaaataacatgatgatggtacattttcctctattgtctagctaagggctttcggtccaccagtaaataagatcaaatgctcttaaatgttcctgttaccatcctaatgtaaatactggatttttctgtcatttagcaccatgctgcttctgtctgtcttaatgctggcattaagatcatgagccctttttctccagtagtacaggctttgaaaactacttctattaagttattgatgcaatttgatattttttcataatctatatttaaacaaaattacatcattgcatcatcttttctaaattcatctccattaaaacttgccttaagctaccagattgcttttgccaccattggccatactgtgtgtttgtttgtttaatttactttcacaataaacttctgtgtagtaaaaa

SEQ ID NO: 64357 - DNA, 1045 bp, Homo sapiens
gcgcgggcggcaggcaacggctgaggcggcggcggcggcggcggcggcgtgggttgggctcgagcgggcggcggcgcctcagactccccggaacgggagcccacgcgggcgggcgcctgaaacaaagggaagcgggcgtccgggcgccgcgggtgggcggtcagtcggtcagcgcggagccagccagcgggtgcccgcgcaagccccgagcgcggccggccggcgcggcctcagggcgggaagatgccgcgcgtcgtgcccgaccagagaagcaagttcgagaacgaggagttttttaggaagctgagccgcgagtgtgagattaagtacacgggcttcagggaccggccccacgaggaacgccaggcacgcttccagaacgcctgccgcgacggccgctcggaaatcgcttttgtggccacaggaaccaatctgtctctccagttttttccggccagctggcagggagaacagcgacaaacacctagccgagagtatgtcgacttagaaagagaagcaggcaaggtatatttgaaggctcccatgattctgaatggagtctgtgttatctggaaaggctggattgatctccaaagactggatggtatgggctgtctggagtttgatgaggagcgagcccaggtagggtaacatcaggctttattgagcatggtccctttagtccctaatcttgcctttgcctggggacctattttacccaatttttaagagtaagtatagaaagtattgtgttgaagcaatattgaggaatcctgaaaatgttgatactcaaattctgatcctgattttgggaaagttttttcttcagcagttctaaatttcatgggttattcgtatctgctcagtgggtgcttcaaagtccagcaagtagctctttaaaatatttattcttgatctttagaacactatgaatagggaaaaaagaaaaaactgttcaaaataaaatgtaggagccgtgcttttggaatgcttgagtgaggagctcaacaagtcctctcccaagaaagcaatgataaaacttgac

SEQ ID NO: 64358 - DNA, 296 bp, Homo sapiens
ccacgcgtccgggctttgaaaactaacttctatcaaattgcatcaataacttaatagaagtagttttcaaagcctgtactactggagaaaaagggctcattctattaagttattgatgcaatttgatattttttcataatctatatttaaacaaaattacatcattgcatcatcttttctaaattcatctccattaaaacttgccttaagctaccagattgcttttgccaccattggccatactgtgtgtttgtttgtttaatttactttcacaataaacttctgtgtagtaaaaa

SEQ ID NO: 64359 - DNA, 382 bp, Homo sapiens
cctaggcgtcggtgaagaatccaccacctcccgtagccaccatgtgttctaattgttcaactcccacttatgagtgtgagcatgcagtgtttggttttctgttgctgtgttagttctctgagaatgatggcttccagcttcatccatgtccctgcaaaggacatgaactcattcttttttatggctgctttttaacctttttaatgagtttggggaaagtgcattcctttctctcatgttgagacttaaaatttgtgctttgtgtctcctccagacttagcaatagggagaactagcagtgactaaggaggctgacattaatgccaattgtaagttaaaggctcatcttttccataggtctgattctgtgttctgactctgc

SEQ ID NO: 64360 - DNA, 2574 bp, Homo sapiens
agtgctgagattacaggcgtgagcccctgcgcccggccactgtttcagggaaaaaaaaaacacaaaacccaaatattgtattttttttataaatccaaactaaaataggtatttcatgtattctgacagcaggaggatgcattagcacaacaggcctttgaagaggctcggagaaggacacgcgaatttgaagatagagacaggtctcatcgggaggaaatggaggcaagaagacaacaagaccctagtcctggttccaatttaggtggtggtgatgacctcaaacttcgttaattaatagcacagcagatgtgtgctgcccatctttacatacacattgcttctagttggcagaaataattgattaaaagaccagaaactgtgataactggaggtactacggtctatttctcaaccttaggcagtaatagacatcacaaactgccatggttttgcactatgattataatacctgcatttctaattttttaagcatgtagccagtaataatttgaagttttttttctatgcaagcttaccttgttggcattattttagggagttgaaactatcaactgtaaagctccttttcttccactttaatttaaaagttcatgtcatttaaaaacaagtcaagaaattaaaattgtatcagagggttttctctaatcattttttctatttttttttttgtacttctagatgttttggttatacagcttcattttagatgagcattcttattttttgttttgtttgccccatttccttttgtgtttttatagtctatagcattttaaaactgctgatgttgtttgcattatttacaggctaaaaacttagtagcatagagctgtctgccacagccttctgacaaagtttacagttattaaagttgcagtatccttttaaatgctagtaatcagcactctttcttttttttttttttaatagagacagggtctcgcagtgttgcccaggctggtctcgaactcctggcatcaagcgatcctcctgccttagcctcccagagtactgggattacaggctctttctttttaaacataaaagttttaaattggtattaactctgtactctgccctagattgttttagcttctgttctgtaatcatgagtttggttggagatattctccatagatgatcttctactgaaatgcctaaagaagtcacaggctggcttctgttttattcagggatttttttaaaaagtcaatcagaaaagggatactggagcttcttcatgtatgtaacagcatattaaactggagacagtgatgaatcagctacaaaggtaatattgtattaaaatcatgtttaagatagctgcttttatgtgtattttatattgcatgcttttgtaaaaacatgctgggtgatgaaagattagttttagagagaaaatgttcatctgtgcagaggatgcattttcttccattaattctggaaaaaacgttcacagttatatatatggtattttgcaaaaggactattaatagaaccttttgagatgaattaatgtaagaatattttttaaataggcttactgtcaaattgcaactttttttttagatacagagtggaaaacagtgctaagtcatttggcacctccttacaaatatttttcatggtcacatttattaaatgttactacatttctgaatttttgaaaaatgtattttatcattaaatggcattattttaaagggtgaaaaactgacacagtcaattcagaaaatggactgaagtctgaataaggtcattgcatttaaaaagcatataactgtacttgactgatgagggaggtgttactttcattgtatataggtcttatttcataaacagatatcctgtatcaaataaaagtatttgttatatatttgaagttatgcatggaaaggagtgtgtttaaattgttacaaacaataatgcgtcattaaaggccatgctgatcttgcataactataagtactatgaatgaatttggttggttttggtgttgtacagctcacatgtttacacactcagtgccctaatttcccctgagggaatcgctttttaagtgatccttacagtggtgttttatgttactttattacagagctccttggttttttacttctgcacttaaatttttttaaataacatgatgatggtacattttcctctattgtctagctaagggctttcggtccaccagtaaataagatcaaatgctcttaaatgttcctgttaccatcctaatgtaaatactggatttttctgtcatttagcaccatgctgcttctgtctgtcttaatgctggcattaagatcatgagccctttttctccagtagtacaggctttgaaaactacttctattaagttattgatgcaatttgatattttttcataatctatatttaaacaaaattacatcattgcatcatcttttctaaattcatctccattaaaacttgccttaagctaccagattgcttttgccaccattggccatactgtgtgtttgtttgtttaatttactttcacaataaacttctgtgtagtaaaaa

SEQ ID NO: 64361 - DNA, 3770 bp, Homo sapiens
gcgcgggcggcaggcaacggctgaggcggcggcggcggcggcggcggcgtgggttgggctcgagcgggcggcggcgcctcagactccccggaacgggagcccacgcgggcgggcgcctgaaacaaagggaagcgggcgtccgggcgccgcgggtgggcggtcagtcggtcagcgcggagccagccagcgggtgcccgcgcaagccccgagcgcggccggccggcgcggcctcagggcgggaagatgccgcgcgtcgtgcccgaccagagaagcaagttcgagaacgaggagttttttaggaagctgagccgcgagtgtgagattaagtacacgggcttcagggaccggccccacgaggaacgccaggcacgcttccagaacgcctgccgcgacggccgctcggaaatcgcttttgtggccacaggaaccaatctgtctctccagttttttccggccagctggcagggagaacagcgacaaacacctagccgagagtatgtcgacttagaaagagaagcaggcaaggtatatttgaaggctcccatgattctgaatggagtctgtgttatctggaaaggctggattgatctccaaagactggatggtatgggctgtctggagtttgatgaggagcgagcccagcaggaggatgcattagcacaacaggcctttgaagaggctcggagaaggacacgcgaatttgaagatagagacaggtctcatcgggaggaaatggaggcaagaagacaacaagaccctagtcctggttccaatttaggtggtggtgatgacctcaaacttcgttaattaatagcacagcagatgtgtgctgcccatctttacatacacattgcttctagttggcagaaataattgattaaaagaccagaaactgtgataactggaggtactacggtctatttctcaaccttaggcagtaatagacatcacaaactgccatggttttgcactatgattataatacctgcatttctaattttttaagcatgtagccagtaataatttgaagttttttttctatgcaagcttaccttgttggcattattttagggagttgaaactatcaactgtaaagctccttttcttccactttaatttaaaagttcatgtcatttaaaaacaagtcaagaaattaaaattgtatcagagggttttctctaatcattttttctatttttttttttgtacttctagatgttttggttatacagcttcattttagatgagcattcttattttttgttttgtttgccccatttccttttgtgtttttatagtctatagcattttaaaactgctgatgttgtttgcattatttacaggctaaaaacttagtagcatagagctgtctgccacagccttctgacaaagtttacagttattaaagttgcagtatccttttaaatgctagtaatcagcactctttcttttttttttttttaatagagacagggtctcgcagtgttgcccaggctggtctcgaactcctggcatcaagcgatcctcctgccttagcctcccagagtactgggattacaggctctttctttttaaacataaaagttttaaattggtattaactctgtactctgccctagattgttttagcttctgttctgtaatcatgagtttggttggagatattctccatagatgatcttctactgaaatgcctaaagaagtcacaggctggcttctgttttattcagggatttttttaaaaagtcaatcagaaaagggatactggagcttcttcatgtatgtaacagcatattaaactggagacagtgatgaatcagctacaaaggtaatattgtattaaaatcatgtttaagatagctgcttttatgtgtattttatattgcatgcttttgtaaaaacatgctgggtgatgaaagattagttttagagagaaaatgttcatctgtgcagaggatgcattttcttccattaattctggaaaaaacgttcacagttatatatatggtattttgcaaaaggactattaatagaaccttttgagatgaattaatgtaagaatattttttaaataggcttactgtcaaattgcaactttttttttagatacagagtggaaaacagtgctaagtcatttggcacctccttacaaatatttttcatggtcacatttattaaatgttactacatttctgaatttttgaaaaatgtattttatcattaaatggcattattttaaagggtgaaaaactgacacagtcaattcagaaaatggactgaagtctgaataaggtcattgcatttaaaaagcatataactgtacttgactgatgagggaggtgttactttcattgtatataggtcttatttcataaacagatatcctgtatcaaataaaagtatttgttatatatttgaagttatgcatggaaaggagtgtgtttaaattgttacaaacaataatgcgtcattaaaggccatgctgatcttgcataactataagtactatgaatgaatttggttggttttggtgttgtacagctcacatgtttacacactcagtgccctaatttcccctgagggaatcgctttttaagtgatccttacagtggtgttttatgttactttattacagagctccttggttttttacttctgcacttaaatttttttaaataacatgatgatggtacattttcctctattgtctagctaagggctttcggtccaccagtaaataagatcaaatgctcttaaatgttcctgttaccatcctaatgtaaatactggatttttctgtcatttagcaccatgctgcttctgtctgtcttaatgctggcattaagatcatgagccctttttctccagtagtacaggctttgaaaactacttctattaagttattgatgcaatttgatattttttcataatctatatttaaacaaaattacatcattgcatcatcttttctaaattcatctccattaaaacttgccttaagctaccagattgcttttgccaccattggccatactgtgtgtttgtttgtttaatttactttcacaataaacttctgtgtagtaaaaaaaaaaaaaaaaagaaaaaaaaaaaaaaaaaaaaaaaaaaaaaaaaacaaaaaaaaaacaacccaaaaaaaaaaaaaaaaacaaaagaaaagagcgagaaacgagacagagagcagacggagacgaaggagagaagggaggaaggagacagtgtgggcgggtggcgctggggcgagcgacgcgagcgaggaggagggacgataggtgggggcgtgagccgagcagagggagctagggagaggagaagagagggagcgagagaggcgacgtgagtgggggagcgcgagagaggggggagccgcagatcgcgggtgaggggaggagagagagagaaaagactagggacaccgaagccgcaaaggcgccgaatacaccgctgacaaagagggaatagcgaagaggatacaagggccgacgacaagaagaagagcgagaggcgagaccacgccgtatacacagagcagtgcaagaagcatgagaagaaagtcggagacgagagaggagagacgagactgaaagagagaacacgacagagtaaccacagagtaagggaaaggcgcagagatcaacgagtagctaagaacggagagacaggacgagacggacagcgagagaaaaaccgaaccagaagaccgggaaggcggagggcacgcgggcagcgaaacgggatgaaaccggcagagg

SEQ ID NO: 64362 - DNA, 3690 bp, Homo sapiens
gcgcgggcggcaggcaacggctgaggcggcggcggcggcggcggcggcgtgggttgggctcgagcgggcggcggcgcctcagactccccggaacgggagcccacgcgggcgggcgcctgaaacaaagggaagcgggcgtccgggcgccgcgggtgggcggtcagtcggtcagcgcggagccagccagcgggtgcccgcgcaagccccgagcgcggccggccggcgcggcctcagggcgggaagatgccgcgcgtcgtgcccgaccagagaagcaagttcgagaacgaggagttttttaggaagctgagccgcgagtgtgagattaagtacacgggcttcagggaccggccccacgaggaacgccaggcacgcttccagaacgcctgccgcgacggccgctcggaaatcgcttttgtggccacaggaaccaatctgtctctccagttttttccggccagctggcagggagaacagcgacaaacacctagccgagagtatgtcgacttagaaagagaagcaggcaaggtatatttgaaggctcccatgattctgaatggagtctgtgttatctggaaaggctggattgatctccaaagactggatggtatgggctgtctggagtttgatgaggagcgagcccagcaggaggatgcattagcacaacaggcctttgaagaggctcggagaaggacacgcgaatttgaagatagagacaggtctcatcgggaggaaatggaggcaagaagacaacaagaccctagtcctggttccaatttaggtggtggtgatgacctcaaacttcgttaattaatagcacagcagatgtgtgctgcccatctttacatacacattgcttctagttggcagaaataattgattaaaagaccagaaactgtgataactggaggtactacggtctatttctcaaccttaggcagtaatagacatcacaaactgccatggttttgcactatgattataatacctgcatttctaattttttaagcatgtagccagtaataatttgaagttttttttctatgcaagcttaccttgttggcattattttagggagttgaaactatcaactgtaaagctccttttcttccactttaatttaaaagttcatgtcatttaaaaacaagtcaagaaattaaaattgtatcagagggttttctctaatcattttttctatttttttttttgtacttctagatgttttggttatacagcttcattttagatgagcattcttattttttgttttgtttgccccatttccttttgtgtttttatagtctatagcattttaaaactgctgatgttgtttgcattatttacaggctaaaaacttagtagcatagagctgtctgccacagccttctgacaaagtttacagttattaaagttgcagtatccttttaaatgctagtaatcagcactctttcttttttttttttttaatagagacagggtctcgcagtgttgcccaggctggtctcgaactcctggcatcaagcgatcctcctgccttagcctcccagagtactgggattacaggctctttctttttaaacataaaagttttaaattggtattaactctgtactctgccctagattgttttagcttctgttctgtaatcatgagtttggttggagatattctccatagatgatcttctactgaaatgcctaaagaagtcacaggctggcttctgttttattcagggatttttttaaaaagtcaatcagaaaagggatactggagcttcttcatgtatgtaacagcatattaaactggagacagtgatgaatcagctacaaaggtaatattgtattaaaatcatgtttaagatagctgcttttatgtgtattttatattgcatgcttttgtaaaaacatgctgggtgatgaaagattagttttagagagaaaatgttcatctgtgcagaggatgcattttcttccattaattctggaaaaaacgttcacagttatatatatggtattttgcaaaaggactattaatagaaccttttgagatgaattaatgtaagaatattttttaaataggcttactgtcaaattgcaactttttttttagatacagagtggaaaacagtgctaagtcatttggcacctccttacaaatatttttcatggtcacatttattaaatgttactacatttctgaatttttgaaaaatgtattttatcattaaatggcattattttaaagggtgaaaaactgacacagtcaattcagaaaatggactgaagtctgaataaggtcattgcatttaaaaagcatataactgtacttgactgatgagggaggtgttactttcattgtatataggtcttatttcataaacagatatcctgtatcaaataaaagtatttgttatatatttgaagttatgcatggaaaggagtgtgtttaaattgttacaaacaataatgcgtcattaaaggccatgctgatcttgcataactataagtactatgaatgaatttggttggttttggtgttgtacagctcacatgtttacacactcagtgccctaatttcccctgagggaatcgctttttaagtgatccttacagtggtgttttatgttactttattacagagctccttggttttttacttctgcacttaaatttttttaaataacatgatgatggtacattttcctctattgtctagctaagggctttcggtccaccagtaaataagatcaaatgctcttaaatgttcctgttaccatcctaatgtaaatactggatttttctgtcatttagcaccatgctgcttctgtctgtcttaatgctggcattaagatcatgagccctttttctccagtagtacaggctttgaaaactacttctattaagttattgatgcaatttgatattttttcataatctatatttaaacaaaattacatcattgcatcatcttttctaaattcatctccattaaaacttgccttaagctaccaaaaaaaaaaaaagaaaaaaaaaaaaaaaaaaaaaaaaaaaaaaaaacaaaaaaaaaacaacccaaaaaaaaaaaaaaaaacaaaagaaaagagcgagaaacgagacagagagcagacggagacgaaggagagaagggaggaaggagacagtgtgggcgggtggcgctggggcgagcgacgcgagcgaggaggagggacgataggtgggggcgtgagccgagcagagggagctagggagaggagaagagagggagcgagagaggcgacgtgagtgggggagcgcgagagaggggggagccgcagatcgcgggtgaggggaggagagagagagaaaagactagggacaccgaagccgcaaaggcgccgaatacaccgctgacaaagagggaatagcgaagaggatacaagggccgacgacaagaagaagagcgagaggcgagaccacgccgtatacacagagcagtgcaagaagcatgagaagaaagtcggagacgagagaggagagacgagactgaaagagagaacacgacagagtaaccacagagtaagggaaaggcgcagagatcaacgagtagctaagaacggagagacaggacgagacggacagcgagagaaaaaccgaaccagaagaccgggaaggcggagggcacgcgggcagcgaaacgggatgaaaccggcagagg

SEQ ID NO: 64363 - DNA, 1440 bp, Homo sapiens
cggcgaccctagaggacccagatatcgggatctgagtagtgaaatgcctaaagaagtcacaggctggcttctgttttattcagggatttttttaaaaagtcaatcagaaaagggatactggagcttcttcatgtatgtaacagcatattaaactggagacagtgatgaatcagctacaaaggtaatattgtattaaaatcatgtttaagatagctgcttttatgtgtattttatattgcatgcttttgtaaaaacatgctgggtgatgaaagattagttttagagagaaaatgttcatctgtgcagaggatgcattttcttccattaattctggaaaaaacgttcacagttatatatatggtattttgcaaaaggactattaatagaaccttttgagatgaattaatgtaagaatattttttaaataggcttactgtcaaattgcaactttttttttagatacagagtggaaaacagtgctaagtcatttggcacctccttacaaatatttttcatggtcacatttattaaatgttactacatttctgaatttttgaaaaatgtattttatcattaaatggcattattttaaagggtgaaaaactgacacagtcaattcagaaaatggactgaagtctgaataaggtcattgcatttaaaaagcatataactgtacttgactgatgagggaggtgttactttcattgtatataggtcttatttcataaacagatatcctgtatcaaataaaagtatttgttatatatttgaagttatgcatggaaaggagtgtgtttaaattgttacaaacaataatgcgtcattaaaggccatgctgatcttgcataactataagtactatgaatgaatttggttggttttggtgttgtacagctcacatgtttacacactcagtgccctaatttcccctgagggaatcgctttttaagtgatccttacagtggtgttttatgttactttattacagagctccttggttttttacttctgcacttaaatttttttaaataacatgatgatggtacattttcctctattgtctagctaagggctttcggtccaccagtaaataagatcaaatgctcttaaatgttcctgttaccatcctaatgtaaatactggatttttctgtcatttagcaccatgctgcttctgtctgtcttaatgctggcattaagatcatgagccctttttctccagtagtacaggctttgaaaactacttctattaagttattgatgcaatttgatattttttcataatctatatttaaacaaaattacatcattgcatcatcttttctaaattcatctccattaaaacttgccttaagctaccagattgcttttgccaccattggccatactgtgtgtttgtttgtttaatttactttcacaataaacttctgtgtagtaaaaa

SEQ ID NO: 64364 - DNA, 1083 bp, Homo sapiens
atagtaacgtaatgagcatcgatataaatgtaagaatattaaagagatgaggcacacgagtcagatagcaccgattatggacggtacagagagtaaggacgtggtatgctcatgagcactacttcctgtacaaatatatatcagggtcgcatttgtcatgtgtaccgacctcgctgacgttattcgatagagaatgttaagtcttgatcactgcacatggcattcatacccacagagggtgaaaaactgacacagtcaattcagaaaatggactgaagtctgaataaggtcattgcatttaaaaagcatataactgtacttgactgatgagggaggtgttactttcattgtatataggtcttatttcataaacagatatcctgtatcaaataaaagtatttgttatatatttgaagttatgcatggaaaggagtgtgtttaaattgttacaaacaataatgcgtcattaaaggccatgctgatcttgcataactataagtactatgaatgaatttggttggttttggtgttgtacagctcacatgtttacacactcagtgccctaatttcccctgagggaatcgctttttaagtgatccttacagtggtgttttatgttactttattacagagctccttggttttttacttctgcacttaaatttttttaaataacatgatgatggtacattttcctctattgtctagctaagggctttcggtccaccagtaaataagatcaaatgctcttaaatgttcctgttaccatcctaatgtaaatactggatttttctgtcatttagcaccatgctgcttctgtctgtcttaatgctggcattaagatcatgagccctttttctccagtagtacaggctttgaaaactacttctattaagttattgatgcaatttgatattttttcataatctatatttaaacaaaattacatcattgcatcatcttttctaaattcatctccattaaaacttgccttaagctaccagattgcttttgccaccattggccatactgtgtgtttgtttgtttaatttactttcacaataaacttctgtgtagtaaaaa

SEQ ID NO: 64365 - DNA, 368 bp, Homo sapiens
gaatggtaacaggaacatttaagagcatttgatcttaaatgttcctgttaccatcctaatgtaaatactggatttttctgtcatttagcaccatgctgcttctgtctgtcttaatgctggcattaagatcatgagccctttttctccagtagtacaggctttgaaaactacttctattaagttattgatgcaatttgatattttttcataatctatatttaaacaaaattacatcattgcatcatcttttctaaattcatctccattaaaacttgccttaagctaccagattgcttttgccaccattggccatactgtgtgtttgtttgtttaatttactttcacaataaacttctgtgtagtaaaaa

SEQ ID NO: 64366 - DNA, 1260 bp, Homo sapiens
  misc_feature (1201)..(1201): n is a, c, g, or t
  misc_feature (1218)..(1218): n is a, c, g, or t
  misc_feature (1225)..(1227): n is a, c, g, or t
  misc_feature (1231)..(1231): n is a, c, g, or t
  misc_feature (1240)..(1240): n is a, c, g, or t
gcgcgggcggcaggcaacggctgaggcggcggcggcggcggcggcggcgtgggttgggctcgagcgggcggcggcgcctcagactccccggaacgggagcccacgcgggcgggcgcctgaaacaaagggaagcgggcgtccgggcgccgcgggtgggcggtcagtcggtcagcgcggagccagccagcgggtgcccgcgcaagccccgagcgcggccggccggcgcggcctcagggcgggaagatgccgcgcgtcgtgcccgaccagagaagcaagttcgagaacgaggagttttttaggaagctgagccgcgagtgtgagattaagtacacgggcttcagggaccggccccacgaggaacgccaggcacgcttccagaacgcctgccgcgacggccgctcggaaatcgcttttgtggccacaggaaccaatctgtctctccagttttttccggccagctggcagggagaacagcgacaaacacctagccgagagtatgtcgacttagaaagagaagcaggcaaggtatatttgaaggctcccatgattctgaatggagtctgtgttatctggaaaggctggattgatctccaaagactggatggtatgggctgtctggagtttgatgaggagcgagcccagcaggaggatgcattagcacaacaggcctttgaagaggctcggagaaggacacgcgaatttgaagatagagacaggtctcatcgggaggaaatggaggtgagagtttcacagctgctggcagtaactggcaagaagacaacaagaccctagtcctggttccaatttaggtggtggtgatgacctcaaacttcgttaattaatagcacagcagatgtgtgctgcccatctttacatacacattgcttctagttggcagaaataattgattaaaagaccagaaactgtgataactggaggtactacggtctatttctcaaccttaggcagtaatagacatcacaaactgccatggttttgcactatgattataatacctgcatttctaattttttaagcatgtagccagtaataatttgaagttttttttctatgcaagcttaccttgttggcattattttagggagttgaaactatcaactgtaaagctccttttcttccactttaatttaaaagttcatgtcatttaaaaacaagtcaagaaattctagaggtttgggtntacagctcattttagangagctcnnnattnttggtttgnttgccccaattccttttggg

SEQ ID NO: 64367 - DNA, 837 bp, Homo sapiens
gcgcgggcggcaggcaacggctgaggcggcggcggcggcggcggcggcgtgggttgggctcgagcgggcggcggcgcctcagactccccggaacgggagcccacgcgggcgggcgcctgaaacaaagggaagcgggcgtccgggcgccgcgggtgggcggtcagtcggtcagcgcggagccagccagcgggtgcccgcgcaagccccgagcgcggccggccggcgcggcctcagggcgggaagatgccgcgcgtcgtgcccgaccagagaagcaagttcgagaacgaggagttttttaggaagctgagccgcgagtgtgagattaagtacacgggcttcagggaccggccccacgaggaacgccaggcacgcttccagaacgcctgccgcgacggccgctcggaaatcgcttttgtggccacaggaaccaatctgtctctccagttttttccggccagctggcagggagaacagcgacaaacacctagccgagagtatgtcgacttagaaagagaagcaggcaaggtatatttgaaggctcccatgattctgaatggagtctgtgttatctggaaaggctggattgatctccaaagactggatggtatgggctgtctggagtttgatgaggagcgagcccagcaggaggatgcattagcacaacaggcctttgaagaggctcggagaaggacacgcgaatttgaagatagagacaggtctcatcgggaggaaatggagacttagcaatagggagaactagcagtgactaaggaggctgacattaatgccaattgccaaggcgaacctagacaagaatgagcagaatgaggagaagag

SEQ ID NO: 64368 - DNA, 3087 bp, Homo sapiens
gcgcgggcggcaggcaacggctgaggcggcggcggcggcggcggcggcgtgggttgggctcgagcgggcggcggcgcctcagactccccggaacgggagcccacgcgggcgggcgcctgaaacaaagggaagcgggcgtccgggcgccgcgggtgggcggtcagtcggtcagcgcggagccagccagcgggtgcccgcgcaagccccgagcgcggccggccggcgcggcctcagggcgggaagatgccgcgcgtcgtgcccgaccagagaagcaagttcgagaacgaggagttttttaggaagctgagccgcgagtgtgagattaagtacacgggcttcagggaccggccccacgaggaacgccaggcacgcttccagaacgcctgccgcgacggccgctcggaaatcgcttttgtggccacaggaaccaatctgtctctccagttttttccggccagctggcagggagaacagcgacaaacacctagccgagagtatgtcgacttagaaagagaagcaggcaaggtatatttgaaggctcccatgattctgaatggagtctgtgttatctggaaaggctggattgatctccaaagactggatggtatgggctgtctggagtttgatgaggagcgagcccagcaggaggatgcattagcacaacaggcctttgaagaggctcggagaaggacacgcgaatttgaagatagagacaggtctcatcgggaggaaatggaggcaagaagacaacaagaccctagtcctggttccaatttaggtggtggtgatgacctcaaacttcgttaattaatagcacagcagatgtgtgctgcccatctttacatacacattgcttctagttggcagaaataattgattaaaagaccagaaactgtgataactggaggtactacggtctatttctcaaccttaggcagtaatagacatcacaaactgccatggttttgcactatgattataatacctgcatttctaattttttaagcatgtagccagtaataatttgaagttttttttctatgcaagcttaccttgttggcattattttagggagttgaaactatcaactgtaaagctccttttcttccactttaatttaaaagttcatgtcatttaaaaacaagtcaagaaattaaaattgtatcagagggttttctctaatcattttttctatttttttttttgtacttctagatgttttggttatacagcttcattttagatgagcattcttattttttgttttgtttgccccatttccttttgtgtttttatagtctatagcattttaaaactgctgatgttgtttgcattatttacaggctaaaaacttagtagcatagagctgtctgccacagccttctgacaaagtttacagttattaaagttgcagtatccttttaaatgctagtaatcagcactctttcttttttttttttttaatagagacagggtctcgcagtgttgcccaggctggtctcgaactcctggcatcaagcgatcctcctgccttagcctcccagagtactgggattacaggctctttctttttaaacataaaagttttaaattggtattaactctgtactctgccctagattgttttagcttctgttctgtaatcatgagtttggttggagatattctccatagatgatcttctactgaaatgcctaaagaagtcacaggctggcttctgttttattcagggatttttttaaaaagtcaatcagaaaagggatactggagcttcttcatgtatgtaacagcatattaaactggagacagtgatgaatcagctacaaaggtaatattgtattaaaatcatgtttaagatagctgcttttatgtgtattttatattgcatgcttttgtaaaaacatgctgggtgatgaaagattagttttagagagaaaatgttcatctgtgcagaggatgcattttcttccattaattctggaaaaaacgttcacagttatatatatggtattttgcaaaaggactattaatagaaccttttgagatgaattaatgtaagaatattttttaaataggcttactgtcaaattgcaactttttttttagatacagagtggaaaacagtgctaagtcatttggcacctccttacaaatatttttcatggtcacatttattaaatgttactacatttctgaatttttgaaaaatgtattttatcattaaatggcattattttaaagggtgaaaaactgacacagtcaattcagaaaatggactgaagtctgaataaggtcattgcatttaaaaagcatataactgtacttgactgatgagggaggtgttactttcattgtatataggtcttatttcataaacagatatcctgtatcaaataaaagtatttgttatatatttgaagttatgcatggaaaggagtgtgtttaaattgttacaaacaataatgcgtcattaaaggccatgctgatcttgcataactataagtactatgaatgaatttggttggttttggtgttgtacagctcacatgtttacacactcagtgccctaatttcccctgagggaatcgctttttaagtgatccttacagtggtgttttatgttactttattacagagctccttggttttttacttctgcacttaaatttttttaaataacatgatgatggtacattttcctctattgtctagctaagggctttcggtccaccagtaaataagatcaaatgctcttaaatgttcctgttaccatcctaatgtaaatactggatttttctgtcatttagcaccatgctgcttctgtctgtcttaatgctggcattaagatcatgagccctttttctccagtagtacaggctttgaaaactacttctattaagttattgatgcaatttgatattttttcataatctatatttaaacaaaattacatcattgcatcatcttttctaaattcatctccattaaaacttgccttaagctaccagattgcttttgccaccattggccatactgtgtgtttgtttgtttaatttactttcacaataaacttctgtgtagtaaaaa

SEQ ID NO: 64369 - DNA, 2870 bp, Homo sapiens
gcgcgggcggcaggcaacggctgaggcggcggcggcggcggcggcggcgtgggttgggctcgagcgggcggcggcgcctcagactccccggaacgggagcccacgcgggcgggcgcctgaaacaaagggaagcgggcgtccgggcgccgcgggtgggcggtcagtcggtcagcgcggagccagccagcgggtgcccgcgcaagccccgagcgcggccggccggcgcggcctcagggcgggaagatgccgcgcgtcgtgcccgaccagagaagcaagttcgagaacgaggagttttttaggaagctgagccgcgagtgtgagattaagtacacgggcttcagggaccggccccacgaggaacgccaggcacgcttccagaacgcctgccgcgacggccgctcggaaatcgcttttgtggccacaggaaccaatctgtctctccagttttttccggccagctggcagggagaacagcgacaaacacctagccgagagtatgtcgacttagaaagagaagcaggcaaggtatatttgaaggctcccatgattctgaatggagtctgtgttatctggaaaggctggattgatctccaaagactggatggtatgggctgtctggagtttgatgaggagcgagcccagcaggaggatgcattagcacaacaggcctttgaagaggctcggagaaggacacgcgaatttgaagatagagacaggtctcatcgggaggaaatggaggcaagaagacaacaagaccctagtcctggttccaatttaggtggtggtgatgacctcaaacttcgttaattaatagcacagcagatgtgtgctgcccatctttacatacacattgcttctagttggcagaaataattgattaaaagaccagaaactgtgataactggaggtactacggtctatttctcaaccttaggcagtaatagacatcacaaactgccatggttttgcactatgattataatacctgcatttctaattttttaagcatgtagccagtaataatttgaagttttttttctatgcaagcttaccttgttggcattattttagggagttgaaactatcaactgtaaagctccttttcttccactttaatttaaaagttcatgtcatttaaaaacaagtcaagaaattaaaattgtatcagagggttttctctaatcattttttctatttttttttttgtacttctagatgttttggttatacagcttcattttagatgagcattcttattttttgttttgtttgccccatttccttttgtgtttttatagtctatagcattttaaaactgctgatgttgtttgcattatttacaggctctttctttttaaacataaaagttttaaattggtattaactctgtactctgccctagattgttttagcttctgttctgtaatcatgagtttggttggagatattctccatagatgatcttctactgaaatgcctaaagaagtcacaggctggcttctgttttattcagggatttttttaaaaagtcaatcagaaaagggatactggagcttcttcatgtatgtaacagcatattaaactggagacagtgatgaatcagctacaaaggtaatattgtattaaaatcatgtttaagatagctgcttttatgtgtattttatattgcatgcttttgtaaaaacatgctgggtgatgaaagattagttttagagagaaaatgttcatctgtgcagaggatgcattttcttccattaattctggaaaaaacgttcacagttatatatatggtattttgcaaaaggactattaatagaaccttttgagatgaattaatgtaagaatattttttaaataggcttactgtcaaattgcaactttttttttagatacagagtggaaaacagtgctaagtcatttggcacctccttacaaatatttttcatggtcacatttattaaatgttactacatttctgaatttttgaaaaatgtattttatcattaaatggcattattttaaagggtgaaaaactgacacagtcaattcagaaaatggactgaagtctgaataaggtcattgcatttaaaaagcatataactgtacttgactgatgagggaggtgttactttcattgtatataggtcttatttcataaacagatatcctgtatcaaataaaagtatttgttatatatttgaagttatgcatggaaaggagtgtgtttaaattgttacaaacaataatgcgtcattaaaggccatgctgatcttgcataactataagtactatgaatgaatttggttggttttggtgttgtacagctcacatgtttacacactcagtgccctaatttcccctgagggaatcgctttttaagtgatccttacagtggtgttttatgttactttattacagagctccttggttttttacttctgcacttaaatttttttaaataacatgatgatggtacattttcctctattgtctagctaagggctttcggtccaccagtaaataagatcaaatgctcttaaatgttcctgttaccatcctaatgtaaatactggatttttctgtcatttagcaccatgctgcttctgtctgtcttaatgctggcattaagatcatgagccctttttctccagtagtacaggctttgaaaactacttctattaagttattgatgcaatttgatattttttcataatctatatttaaacaaaattacatcattgcatcatcttttctaaattcatctccattaaaacttgccttaagctaccagattgcttttgccaccattggccatactgtgtgtttgtttgtttaatttactttcacaataaacttctgtgtagtaaaaa

SEQ ID NO: 64370 - DNA, 3213 bp, Homo sapiens
gcgcgggcggcaggcaacggctgaggcggcggcggcggcggcggcggcgtgggttgggctcgagcgggcggcggcgcctcagactccccggaacgggagcccacgcgggcgggcgcctgaaacaaagggaagcgggcgtccgggcgccgcgggtgggcggtcagtcggtcagcgcggagccagccagcgggtgcccgcgcaagccccgagcgcggccggccggcgcggcctcagggcgggaagatgccgcgcgtcgtgcccgaccagagaagcaagttcgagaacgaggagttttttaggaagctgagccgcgagtgtgagattaagtacacgggcttcagggaccggccccacgaggaacgccaggcacgcttccagaacgcctgccgcgacggccgctcggaaatcgcttttgtggccacaggaaccaatctgtctctccagttttttccggccagctggcagggagaacagcgacaaacacctagccgagagtatgtcgacttagaaagagaagcaggcaaggtatatttgaaggctcccatgattctgaatggagtctgtgttatctggaaaggctggattgatctccaaagactggatggtatgggctgtctggagtttgatgaggagcgagcccagcaggaggatgcattagcacaacaggcctttgaagaggctcggagaaggacacgcgaatttgaagatagagacaggtctcatcgggaggaaatggaggcaagaagacaacaagaccctagtcctggttccaatttaggtggtggtgatgacctcaaacttcgttaattaatagcacagcagatgtgtgctgcccatctttacatacacattgcttctagttggcagaaataattgattaaaagaccagaaactgtgataactggaggtactacggtctatttctcaaccttaggcagtaatagacatcacaaactgccatggttttgcactatgattataatacctgcatttctaattttttaagcatgtagccagtaataatttgaagttttttttctatgcaagcttaccttgttggcattattttagggagttgaaactatcaactgtaaagctccttttcttccactttaatttaaaagttcatgtcatttaaaaacaagtcaagaaattaaaattgtatcagagggttttctctaatcattttttctatttttttttttgtacttctagatgttttggttatacagcttcattttagatgagcattcttattttttgttttgtttgccccatttccttttgtgtttttatagtctatagcattttaaaactgctgatgttgtttgcattatttacaggctaaaaacttagtagcatagagctgtctgccacagccttctgacaaagtttacagttattaaagttgcagtatccttttaaatgctagtaatcagcactctttcttttttttttttttaatagagacagggtctcgcagtgttgcccaggctggtctcgaactcctggcatcaagcgatcctcctgccttagcctcccagagtactgggattacaggctctttctttttaaacataaaagttttaaattggtattaactctgtactctgccctagattgttttagcttctgttctgtaatcatgagtttggttggagatattctccatagatgatcttctactgaaatgcctaaagaagtcacaggctggcttctgttttattcagggatttttttaaaaagtcaatcagaaaagggatactggagcttcttcatgtatgtaacagcatattaaactggagacagtgatgaatcagctacaaaggtaatattgtattaaaatcatgtttaagatagctgcttttatgtgtattttatattgcatgcttttgtaaaaacatgctgggtgatgaaagattagttttagagagaaaatgttcatctgtgcagaggatgcattttcttccattaattctggaaaaaacgttcacagttatatatatggtattttgcaaaaggactattaatagaaccttttgagatgaattaatgtaagaatattttttaaataggcttactgtcaaattgcaactttttttttagatacagagtggaaaacagtgctaagtcatttggcacctccttacaaatatttttcatggtcacatttattaaatgttactacatttctgaatttttgaaaaatgtattttatcattaaatggcattattttaaagggtgaaaaactgacacagtcaattcagaaaatggactgaagtctgaataaggtcattgcatttaaaaagcatataactgtacttgactgatgagggaggtgttactttcattgtatataggtcttatttcataaacagatatcctgtatcaaataaaagtatttgttatatatttgaagttatgcatggaaaggagtgtgtttaaattgttacaaacaataatgcgtcattaaaggccatgctgatcttgcataactataagtactatgaatgaatttggttggttttggtgttgtacagctcacatgtttacacactcagtgccctaatttcccctgagggaatcgctttttaagtgatccttacagtggtgttttatgttactttattacagagctccttggttttttacttctgcacttaaatttttttaaataacatgatgatggtacattttcctctattgtctagctaagggctttcggtccaccagtaaataagatcaaatgctcttaaatgttcctgttaccatcctaatgtaaatactggatttttctgtcatttagcaccatgctgcttctgtctgtcttaatgctggcattaagatcatgagccctttttctccagtagtacaggctttgaaaactacttctattaagttattgatgcaatttgatattttttcataatctatatttaaacaaaattacatcattgcatcatcttttctaaattcatctccattaaaacttgccttaagctaccagattgcttttgccaccattggccatactgtgtgtttgtttgtttaatttactttcacaataaacttctgtgtagtaaaaatcaacacaccacacactcacaaccaccacctacacgccatcagcgacacgaagccagcccgagcacaagcacaccgcgccacagacctacagagacacggccgcgctaaagcaccacgctccgcat

SEQ ID NO: 64371 - DNA, 848 bp, Homo sapiens
gcgcgggcggcaggcaacggctgaggcggcggcggcggcggcggcggcgtgggttgggctcgagcgggcggcggcgcctcagactccccggaacgggagcccacgcgggcgggcgcctgaaacaaagggaagcgggcgtccgggcgccgcgggtgggcggtcagtcggtcagcgcggagccagccagcgggtgcccgcgcaagccccgagcgcggccggccggcgcggcctcagggcgggaagatgccgcgcgtcgtgcccgaccagagaagcaagttcgagaacgaggagttttttaggaagctgagccgcgagtgtgagattaagtacacgggcttcagggaccggccccacgaggaacgccaggcacgcttccagaacgcctgccgcgacggccgctcggaaatcgcttttgtggccacaggaaccaatctgtctctccagttttttccggccagctggcagggagaacagcgacaaacacctagccgagagtatgtcgacttagaaagagaagcaggcaaggtatatttgaaggctcccatgattctgaatggagtctgtgttatctggaaaggctggattgatctccaaagactggatggtatgggctgtctggagtttgatgaggagcgagcccagcaggaggatgcattagcacaacaggcctttgaagaggctcggagaaggacacgcgaatttgaagatagagacaggtctcatcgggaggaaatggagaatgaagttgagagcgtcacagggatgcttaacgaggccgaggggaaggccattaagctggccaaggacgtggcgtccctcagttcccagctccaggacacccaggagtt

SEQ ID NO: 64372 - DNA, 780 bp, Homo sapiens
gcgcgggcggcaggcaacggctgaggcggcggcggcggcggcggcggcgtgggttgggctcgagcgggcggcggcgcctcagactccccggaacgggagcccacgcgggcgggcgcctgaaacaaagggaagcgggcgtccgggcgccgcgggtgggcggtcagtcggtcagcgcggagccagccagcgggtgcccgcgcaagccccgagcgcggccggccggcgcggcctcagggcgggaagatgccgcgcgtcgtgcccgaccagagaagcaagttcgagaacgaggagttttttaggaagctgagccgcgagtgtgagattaagtacacgggcttcagggaccggccccacgaggaacgccaggcacgcttccagaacgcctgccgcgacggccgctcggaaatcgcttttgtggccacaggaaccaatctgtctctccagttttttccggccagctggcagggagaacagcgacaaacacctagccgagagtatgtcgacttagaaagagaagcaggcaaggtatatttgaaggctcccatgattctgaatggagtctgtgttatctggaaaggctggattgatctccaaagactggatggtatgggctgtctggagtttgatgaggagcgagcccagcaggaggatgcattagcacaacaggcctttgaagaggctcggagaaggacacgcgaatttgaagatagagacaggtctcatcgggaggaaatggagagctgcttcaagaagaaacccggcagaagctcaacgtgtcta

SEQ ID NO: 64373 - DNA, 500 bp, Homo sapiens
ctgattaacagaagatgcttctcttaccccattactcagatattgcaagttttatgagttctgtgctaccagggacaaagatcaaatacagtcaaatgctgactaataatgcttccatcaatgaccagctccatatagaacagtggtcacataagattataatggagctgaaaaattcctatcactagtgacaccgtagccaacataacatcattgcacatttactttattttataaataaatttagtataggctaagtgtggtgcttataaagtctacagtagtgtccagtaatgtcctaggccttcgcattcactcaccactccctgcctcatgcagggcaacttccaggcctggaggcttcattcatggtaagggccctatacagatgtactatttttaaaaaaatcttttatagtgtatttttactgtactttttgtatgtttagatatgtttatatctaacactaataatatcataatactatcataaatcctta

SEQ ID NO: 64374 - DNA, 305 bp, Homo sapiens
actacttcctttagccaggggtatccataacttccatgaacatcagtcatgctaattttgatttaagaaatgtcttattagtctcagaattaatgcatctagtaacaatgtaaaaatgttcaagatgacatagtcagaacttgctatcaataaaaagtgggtcttatgtggctgttccttgtgacattatctgattgagaacatttgactgaggacctgactcaatataaaagtcctaaacccttttggctgcctttccctttggctgaaatgggaaaataaagctatttcaacactaattggaa

SEQ ID NO: 64375 - DNA, 468 bp, Homo sapiens
gttgttggttatttcctttgagatttgggtataggctaaggaggcttttgtgatttcagcaattctggttcccatactggctataatgccaagtcccacaaaaaggggagttaaataaatagcttttaaattaatatttgtcctctagaattctagaattctcctgaaaattaaagatgataagctgggagtggtggctcgcgcctgtaatcccagcactttgggaggccgaggtgggtggatcatgaggtcaggagatcgagaccattctggctaacatggtgaaaccccatctctactaaaaatacaaaaaattagctgggcatggtgtcgggcgcctgtagtcccagctactcgggaggctgaggcaggagaatctcttgaacccgggaggcggaggttgcagtgagccgagatcacgccactgcactccagcctgggggttagaagatgtgagactctcatctc

SEQ ID NO: 64376 - DNA, 2551 bp, Homo sapiens
ttctcagtctcttttggtgaattctttttctctactatcttttaaataaataaatgttgatgtgcccaggcttctacactgtatcttctccccagatgatctcatcccacatttatttatttataaatagagatagggtcttgctgtattgcccaggtcttgagctcctgggctcaagcggacctcccacctcagcctcccaaaatgccagaattaacagatgtgagctaccgatcctagcccatccccacactcttgaatttcacaccacccaaatttgagccactaactcagagttctccccatggcttcactatatctagcttcctcctgtgctccatctgaacacatattattcattccctcatataagatatgctgctcttcttgttttccctatcatattagttggtgctactagccaccaagactctcaagccaaaagactgaaaattatcctagtttacactttccctcaccccactcttaatcagtcactttattcttcctctgtgtatctgaatctcatccacttctctccatcctcacagccatcgcccgtttgcccacctggtttcactagactggactctaccctcaaatctcaccatcctccaccctattctcccattccccctgtcagacacttcctcacgttgcataaaaggttagttatcataaatgattcactacaatctgttcccaagctttaccctccagcactgctaagacacttcattttggcatgcaccattttgtaagatactcaaaatccttttcgggacaataaaatatacatacccttgatacctgaagtgtgtttctgaggccctgaagcgtttgcattactgtattaaaaattcacagttgcagtcaggcccggtggctcatgcctgtaactccagcactttgggaggccaagccaggcagatcactggagatcaggagttcgagaccagcttggccaagatagtgaaacctgatgtctgctaaaaatacaaaaaattagcccggtgcggtggtgggttcctgtaattccagctactcaggaggctgaggcaggagaatcgcttgaacccaggaggcagaggttgcagtgagctgagatcatgccactgaactctagcctgggtgacagagcaagactccatcttaaaaaaaaaaaaaaaccagccaggtgtggtggcttatgcctgtaatcgtagcactttgggaggccgaggcaggctgatcacctgaggtcgggagttcaagaccagcctgaccaacatggagaaactctgtttctactaaaattacaaaattagctgggtgtggtggtacatgcctgtaatcccaactactcaggaggctgaggcaggagaatcgcttaaacccgggaatcggaggttgcggtgagccaagatcatgccatttgggcggcaagagcgaaactccatctcaaaaaaaaaaaaaaaaaatccacaactggctgggcacggtggctcatgcctgtaattcttgtttcggaggatgcctgtttgggaggatcgcttgggcccacaagtttgagaccagcctgggcaacatagtgagaccccgcctttacaaaaaatttaaaaattagccaggtacagtggcatgcacctgtggtcccagctattgaggacactgaagtgggagggtcacctgagcccaggaggttgaggctgcagtgagccatgattgtaccactacactccagcttgggtgacagtgagaccctgtgtcaaaaaaaaaaaaaatccaaaatctcacccagaccaatactgtatcagaattatcattttaacaatatctccagatgatttatatgcacattaaagtttgagaagctggccaggtgtggtggctcacaccagcactttgggaggccgaggcagataggttacttgagctcaggaattcgagaccagcctgggcaacatggtgaaaccttgtctctataaaaaatccaaaaattagcccggtgtggtggtgggcacctgtggtcccagctactcaggaggctgaggtgggaggatggcctgaacccaggaggcagagtttgcattgagctgagattacaccactgcattccagcctaggcagcagagcaaaaccctatctcagaaaataaatagtttgagaagcaatctttttttaaatgagtgaagaaatcagacctaaggagaaatctgatgaagccagagctgagttaatattgataaatggatgcagtcaggtggtctatacttaatttttggtgaggggaagggacagtggaggcagtattgattttgaggaagccaaacaggacagcctgatgaattcaagatttccagcatatatacatcttcaccaatcccaccaccttgctccagcctgtcatatcactgtgtctacataaaaaaaaaaaacaaaaaaaaaactccaaggccaaactctctgacctttctttccttctaaagaccaagccctcctcactagccccctgcccctccttagttaactggcaaagagatcaaagggcaggccttctgactggtgatgc

SEQ ID NO: 64377 - DNA, 391 bp, Homo sapiens
gcctccacagtgccagcctgaaccccccacctctttagacaagttttacatcctggtgaacatcttcccagggatctgatcagaagcaattctttggttttccagttttcccaggaggaaggtggcctaccaggttgggacagatagatggcattcaaacaccaaggatgacgagctcgctgccctccaggtcctgtcgcattctggggacctgagtggctggggatgtggagcacacctgcagaacaggagagaacattccaaacccttctctaactggcactgaagaaagtgcgagccattaccagcattctctcttccgatactctccaaagtttttagtatctacaagacttttaatttcatataaaatatttcagaaaaatcgaat

SEQ ID NO: 64378 - DNA, 2219 bp, Homo sapiens
  misc_feature (60)..(60): n is a, c, g, or t
  misc_feature (621)..(621): n is a, c, g, or t
  misc_feature (1207)..(1207): n is a, c, g, or t
atatctgggatcctccaatcacatctgagacctcctaggctctccatctgatatgccctntcagggaccccacaaagactgagttctcatggggatcctacccttcctagtgccactccctatggccatgctgaagaccactctggccacgcgactgattttgggtgatcatggcagctccccacccatgtcatttctaaccagaagtctcaaggtcgtcacccccctgccccccaaccgaggccccggtcgctggtggtggtctctttagtgcactgtagcacttggtggtggaggtgtgagggatccacattaacagcaggccatcagctgggcaacggctcacacctgtaatcccagcactttgggaggcgaggcagggggaatggcttgaacccaggcattcaagaccagcctgggcaacataatgagacctcgtctctacaaaacataacaaaaacaattagccgagcgtgggggtgaacacctgtggtcccagctgctcaggaggctgaggtgggaggatctcttgagcccaggaagtaggaggctgtagtgagctgtaatcgtgccactgcactccagcctgggcgacagagtgagacaccgtcttaaaaacanaaacaaggccgggcacggtggctcatgcctgttgtcccagcactttgggaggccgaggcaggcggatcacgaggtcgagagatcgagaccatcctggccaacatggtgaaaccctgtctctactaaaaatacagaaattagctgggcgtggtggcacgtgcctgtagtcccagctactcgggaggctgaggcaagagaatcgcttgaacgtgggaggcagaggttgcagtgagcctagattgtgccactgcactccagcctgggggacagagcgagactccgtctgaaaataaaaacaacaaaaacagcagaccattcaaaatagggagactttgcataatccagatttctgccttcacttaaaactttggacggtctggagagagtcggccagttttcggtggggggtggggagctggaacaggacagtagcctttcctaatgaggcatttgttctccaatctgccccagtcgctgccatccctggctatctcaccctagcagcttctcaagcctgttggctttagaccactgtataaacccagctggaactgaagcctgggtggactatggagccctggttggnacccccagggagtcaaaggctgcgggccaagaggccagaggtccttgagcctgggtgggcaggtggatctagggtgcatgacttgctgcttcccaaccttagtttgtcccttctgtgaaaaagggagagaaggaggaggaagatctcaaaaagactttccagcccagtgcggtggctcacgcctgtaatcccagcactttgggaggccgatgcaggtggatcacctgaggtaggagttcaagaccagcctgaccaacatagtgaagccccttctctactaaaaatacaaaattagctgggcgtggtggcatgtgcctgtactcccagctacttgggaggctgaggcaggagaatcgcttgaacctgggaggcggaggttgtagtgagctgagatcacaccactgcacaccagcctgggcgacaagagcgaaactccgtctcaaaaaaaaaaaactgttgcagccccgttgagcctttgacaccgcctgaaatccaccccactcccaggaggaggaggaggaaggaatgccaatgacctagagacacgagaagtccatgtggaggcacacagcagctgatggcagagcccaggctgggacctgcccttaagagaatgagtgggaagggggagggaggaagggcaggtaaaacgtcctccccagggccccctgcaacggggaaggtactttttacaaaagctatcattgtcaccctaaatgtggaataaaataagatgcatcgacgtagacaaacctcctgggaccttttgtcagggactgcaatcctgcccctccactgaggccgctggctctcagagacaccgtgacatcacgggtgatgatgagaggagttcaaagagagaattatatgctggcgcggtggctctgtaatcccaacactttggggggccaaggcaggaggatcgcttgagtacaggagtttgaaaccagcctgggcaagatagtgagatccccttcccacccgtctacaaaaaaaataaaaaattagcggg

SEQ ID NO: 64379 - DNA, 1953 bp, Homo sapiens
  misc_feature (60)..(60): n is a, c, g, or t
  misc_feature (621)..(621): n is a, c, g, or t
  misc_feature (1207)..(1207): n is a, c, g, or t
atatctgggatcctccaatcacatctgagacctcctaggctctccatctgatatgccctntcagggaccccacaaagactgagttctcatggggatcctacccttcctagtgccactccctatggccatgctgaagaccactctggccacgcgactgattttgggtgatcatggcagctccccacccatgtcatttctaaccagaagtctcaaggtcgtcacccccctgccccccaaccgaggccccggtcgctggtggtggtctctttagtgcactgtagcacttggtggtggaggtgtgagggatccacattaacagcaggccatcagctgggcaacggctcacacctgtaatcccagcactttgggaggcgaggcagggggaatggcttgaacccaggcattcaagaccagcctgggcaacataatgagacctcgtctctacaaaacataacaaaaacaattagccgagcgtgggggtgaacacctgtggtcccagctgctcaggaggctgaggtgggaggatctcttgagcccaggaagtaggaggctgtagtgagctgtaatcgtgccactgcactccagcctgggcgacagagtgagacaccgtcttaaaaacanaaacaaggccgggcacggtggctcatgcctgttgtcccagcactttgggaggccgaggcaggcggatcacgaggtcgagagatcgagaccatcctggccaacatggtgaaaccctgtctctactaaaaatacagaaattagctgggcgtggtggcacgtgcctgtagtcccagctactcgggaggctgaggcaagagaatcgcttgaacgtgggaggcagaggttgcagtgagcctagattgtgccactgcactccagcctgggggacagagcgagactccgtctgaaaataaaaacaacaaaaacagcagaccattcaaaatagggagactttgcataatccagatttctgccttcacttaaaactttggacggtctggagagagtcggccagttttcggtggggggtggggagctggaacaggacagtagcctttcctaatgaggcatttgttctccaatctgccccagtcgctgccatccctggctatctcaccctagcagcttctcaagcctgttggctttagaccactgtataaacccagctggaactgaagcctgggtggactatggagccctggttggnacccccagggagtcaaaggctgcgggccaagaggccagaggtccttgagcctgggtgggcaggtggatctagggtgcatgacttgctgcttcccaaccttagtttgtcccttctgtgaaaaagggagagaaggaggaggaagatctcaaaaagactttccagcccagtgcggtggctcacgcctgtaatcccagcactttgggaggccgatgcaggtggatcacctgaggtaggagttcaagaccagcctgaccaacatagtgaagccccttctctactaaaaatacaaaattagctgggcgtggtggcatgtgcctgtactcccagctacttgggaggctgaggcaggagaatcgcttgaacctgggaggcggaggttgtagtgagctgagatcacaccactgcacaccagcctgggcgacaagagcgaaactccgtctcaaaaaaaaaaaactgttgcagccccgttgagcctttgacaccgcctgaaatccaccccactcccaggaggaggaggaggaaggaatgccaatgacctagagacacgagaagtccatgtggaggcacacagcagctgatggcagagcccaggctgggacctgcccttaagagaatgagtgggaagggggagggaggaagggcaggtaaaacgtcctccccagggccccctgcaacggggaaggtactttttacaaaagctatcattgtcaccctaaatgtggaataaaataagatgcatcgacgta

SEQ ID NO: 64380 - DNA, 272 bp, Homo sapiens
tctgatacctattaaaattacatttcaagatcatcaaattcataattttcagctattcagatttaacatccctgaaattaaacttaagcataaagataacagggataatccagttcccatacccaggagaataacggtcacctcaagtccactataatacaccaagtctgaaccctggactcaacatgttttcaataaaatgttcactttaaagttttgacaatgacttaataaccagggcactatgtttgatccatgcaaaaagatgtaaa

SEQ ID NO: 64381 - DNA, 327 bp, Homo sapiens
ggatggggtagcctcatgcattccaggcgggagcattgactggcacagccattctcaggagtactccagcattctctggtccaatcagtcatgcacacatcatataaatcctactctcagacataaagcccagaaacattctctcacacaggtccatacggccatgggggagggggatccatgcaatgctgtttgcactgaactggactccacccaggtgtcactcactgggggcctggataataaaatgtggtgttggctcactaacaaatatgatcgaatatgatcaactagaccaggggttcccaaacattctcacttcatgca

SEQ ID NO: 64382 - DNA, 2886 bp, Homo sapiens
ggaatggatgacctaaaagtggactgggatgggggtggcagggctgagtctgtgagggtgggcgggagggaacctagtcccagagtcttctgcagcctggaccagactacttaagcactgctgggtttagactgtcctttaaaataagagccgctagaagtgaacttctcattctgtccgtccctaattctgtccttctctaaaaggaaccttaatctcatctttaaaataaggagaattactgagtgacctgaaggacccttttcagctggaaagtctgaactgaccaacactggatgaatttgaccatttcttaggagactggaatgttaagtttctataaatgaatgaaccagttctctcttgtttggagcaatgctgaaattccaagaggcagctaagtgtgtgagtggatcaacagccatttccacttatccaaagaccttgattgcaagaagatacgtgcttcaacaaaaacttggcagtggaagttttggaactgtctatctggtttcagacaagaaagccaaacgaggagaggaattaaaggtacttaaggaaatatctgttggagaactaaatccaaatgaaactgtacaggccaatttggaagcccaactcctctccaagctggaccacccagccattgtcaagttccatgcaagttttgtggagcaagataatttctgcattatcacggagtactgtgagggccgagatctggacgataaaattcaggaatataaacaagctggaaaaatctttccagaaaatcaaataatagaatggtttatccagctgctgctgggagttgactacatgcatgagaggaggatacttcatcgagacttaaagtcaaagaatgtatttctgaaaaataatctccttaaaattggagattttggagtttctcgacttctaatgggatcctgtgacctggccacaactttaactggaactccccattatatgagtcctgaggctctgaaacaccaaggctatgacacaaagtcggacatctggtcactggcatgcattttgtatgagatgtgctgcatgaatcatgcattcgctggctccaatttcttatccattgttttaaaaattgttgaaggtgacacaccttctctccctgagagatatccaaaagaactaaatgccatcatggaaagcatgttgaacaagaatccttcattaagaccatctgctatcgaaattttaaaaatcccttaccttgatgagcagctacagaacctaatgtgtagatattcagaaatgactctggaagacaaaaatttggattgtcagaaggaggctgctcatataattaatgccatgcaaaaaaggatccacctgcagactctgagggcactgtcagaagtacagaaaatgacgccaagagaaaggatgcggctgaggaagctccaggcggctgatgagaaagccaggaagctgaaaaagattgtggaagaaaaatatgaagaaaatagcaaacgaatgcaagaattgagatctcggaactttcagcagctgagtgttgatgtactccatgaaaaaacacatttaaaaggaatggaagaaaaggaggagcaacctgagggaagactttcttgttcaccccaggacgaggatgaagagaggtggcaaggcagggaagaggaatctgatgaaccaactttagagaacctgcctgagtctcagcctattccttccatggacctccacgaacttgaatcaattgtagaggatgccacatctgaccttggataccatgagatcccagaagacccacttgtggctgaagagtactacgctgatgcatttgattcctattgtgtagagagtgatgaggaggaagaagaaatagcgttagaaagaccagagaaagaaatcaggaatgagggatcccagcctgcttacagaacaaaccaacaggacagtgatatcgaagcgttggccaggtgtttggaaaatgtcctgggttgcacttctctagacacaaagaccatcaccaccatggctgaagacatgtccccaggaccaccaattttcaacagtgtgatggccaggaccaagatgaaacgcatgagggaatcagccatgcagaagctggggacagaagtatttgaagaggtctataattacctcaagagagcaaggcatcagaatgctagcgaagcagagatccgcgagtgtttggaaaaagtggtgcctcaagccagcgactgttttgaagtggaccagctcctgtactttgaagagcagttgctgatcacgatgggaaaagaacctactctccagaaccatctctaggcaactatcaaaaagaagcagaagttcaagtggacaaatttatgtgaaaattcatttaacatataagctgaactctattatggggaatggatacaaaagcagagctcccatcttgactttcaattcctcatcagaagtactggcttctttagagagtagtaagcatggctgcctatgcttggagtcataagtgttatttggactataccctgagataagcttatagatcaagtttggctcccttgaaaagcatttctctcatgtgcgccctcagggcttccagcaggattgagtcaccctgacgatgaccggggagaagccgtgtgctcttcattattttcagctggaggacagagctcagtgcctgactgcctagggtctcatggactgtaggcagcctgccagtgaaggtcactggactctagcctacaacatgctgagctacagcccagaagccagacatgcctgtcttagctgacctgtttttggtccacttttgcccttccatgactaataaggaagatatgtgtgtatttcatacacacacaaggacctggattaaaaatccaaaaa

SEQ ID NO: 64383 - DNA, 2844 bp, Homo sapiens
cagccgtggcccgcggtgtctggcgctcggtgggtgtggttgcccctagtttgaggcctgcccgattacccgcaagacttgggcagccccgggcgccgctccgaccacgacagggaaaggaactgaccaacactggatgaatttgaccatttcttaggagactggaatgttaagtttctataaatgaatgaaccagttctctcttgtttggagcaatgctgaaattccaagaggcagctaagtgtgtgagtggatcaacagccatttccacttatccaaagaccttgattgcaagaagatacgtgcttcaacaaaaacttggcagtggaagttttggaactgtctatctggtttcagacaagaaagccaaacgaggagaggaattaaaggtacttaaggaaatatctgttggagaactaaatccaaatgaaactgtacaggccaatttggaagcccaactcctctccaagctggaccacccagccattgtcaagttccatgcaagttttgtggagcaagataatttctgcattatcacggagtactgtgagggccgagatctggacgataaaattcaggaatataaacaagctggaaaaatctttccagaaaatcaaataatagaatggtttatccagctgctgctgggagttgactacatgcatgagaggaggatacttcatcgagacttaaagtcaaagaatgtatttctgaaaaataatctccttaaaattggagattttggagtttctcgacttctaatgggatcctgtgacctggccacaactttaactggaactccccattatatgagtcctgaggctctgaaacaccaaggctatgacacaaagtcggacatctggtcactggcatgcattttgtatgagatgtgctgcatgaatcatgcattcgctggctccaatttcttatccattgttttaaaaattgttgaaggtgacacaccttctctccctgagagatatccaaaagaactaaatgccatcatggaaagcatgttgaacaagaatccttcattaagaccatctgctatcgaaattttaaaaatcccttaccttgatgagcagctacagaacctaatgtgtagatattcagaaatgactctggaagacaaaaatttggattgtcagaaggaggctgctcatataattaatgccatgcaaaaaaggatccacctgcagactctgagggcactgtcagaagtacagaaaatgacgccaagagaaaggatgcggctgaggaagctccaggcggctgatgagaaagccaggaagctgaaaaagattgtggaagaaaaatatgaagaaaatagcaaacgaatgcaagaattgagatctcggaactttcagcagctgagtgttgatgtactccatgaaaaaacacatttaaaaggaatggaagaaaaggaggagcaacctgagggaagactttcttgttcaccccaggacgaggatgaagagaggtggcaaggcagggaagaggaatctgatgaaccaactttagagaacctgcctgagtctcagcctattccttccatggacctccacgaacttgaatcaattgtagaggatgccacatctgaccttggataccatgagatcccagaagacccacttgtggctgaagagtactacgctgatgcatttgattcctattgtgtagagagtgatgaggaggaagaagaaatagcgttagaaagaccagagaaagaaatcaggaatgagggatcccagcctgcttacagaacaaaccaacaggacagtgatatcgaagcgttggccaggtgtttggaaaatgtcctgggttgcacttctctagacacaaagaccatcaccaccatggctgaagacatgtccccaggaccaccaattttcaacagtgtgatggccaggaccaagatgaaacgcatgagggaatcagccatgcagaagctggggacagaagtatttgaagaggtctataattacctcaagagagcaaggcatcagaatgctagcgaagcagagatccgcgagtgtttggaaaaagtggtgcctcaagccagcgactgttttgaagtggaccagctcctgtactttgaagagcagttgctgatcacgatgggaaaagaacctactctccagaaccatctctaggcaactatcaaaaagaagcagaagttcaagtggacaaatttatgtgaaaattcatttaacatataagctgaactctattatggggaatggatacaaaagcagagctcccatcttgactttcaattcctcatcagaagtactggcttctttagagagtagtaagcatggctgcctatgcttggagtcataagtgttatttggactataccctgagataagcttatagatcaagtttggctcccttgaaaagcatttctctcatgtgcgccctcagggcttccagcaggattgagtcaccctgacgatgaccggggagaagccgtgtgctcttcattattttcagctggaggacagagctcagtgcctgactgcctagggtctcatggactgtaggcagcctgccagtgaaggtcactggactctagcctacaacatgctgagctacagcccagaagccagacatgcctgtcttagctgacctgtttttggtccacttttgcccttccatgactaataaggaagatatgtgtgtatttcatacacacacaaggacctggattaaaaatccaaaaagtgattctcttctatgatttatttcaaactcatccatagataattcaagatttgtattcaaaataaacatagttttcacagttacaaaataaatcacctattttatcttttccttatg

SEQ ID NO: 64384 - DNA, 2880 bp, Homo sapiens
  misc_feature (2823)..(2823): n is a, c, g, or t
  misc_feature (2827)..(2827): n is a, c, g, or t
cagccgtggcccgcggtgtctggcgctcggtgggtgtggttgcccctagtttgaggcctgcccgattacccgcaagacttgggcagccccgggcgccgctccgaccacgacagggaaaggaactgaccaacactggatgaatttgaccatttcttaggagactggaatgttaagtttctataaatgaatgaaccagttctctcttgtttggagcaatgctgaaattccaagaggcagctaagtgtgtgagtggatcaacagccatttccacttatccaaagaccttgattgcaagaagatacgtgcttcaacaaaaacttggcagtggaagttttggaactgtctatctggtttcagacaagaaagccaaacgaggagaggaattaaaggtacttaaggaaatatctgttggagaactaaatccaaatgaaactgtacaggccaatttggaagcccaactcctctccaagctggaccacccagccattgtcaagttccatgcaagttttgtggagcaagataatttctgcattatcacggagtactgtgagggccgagatctggacgataaaattcaggaatataaacaagctggaaaaatctttccagaaaatcaaataatagaatggtttatccagctgctgctgggagttgactacatgcatgagaggaggatacttcatcgagacttaaagtcaaagaatgtatttctgaaaaataatctccttaaaattggagattttggagtttctcgacttctaatgggatcctgtgacctggccacaactttaactggaactccccattatatgagtcctgaggctctgaaacaccaaggctatgacacaaagtcggacatctggtcactggcatgcattttgtatgagatgtgctgcatgaatcatgcattcgctggctccaatttcttatccattgttttaaaaattgttgaaggtgacacaccttctctccctgagagatatccaaaagaactaaatgccatcatggaaagcatgttgaacaagaatccttcattaagaccatctgctatcgaaattttaaaaatcccttaccttgatgagcagctacagaacctaatgtgtagatattcagaaatgactctggaagacaaaaatttggattgtcagaaggaggctgctcatataattaatgccatgcaaaaaaggatccacctgcagactctgagggcactgtcagaagtacagaaaatgacgccaagagaaaggatgcggctgaggaagctccaggcggctgatgagaaagccaggaagctgaaaaagattgtggaagaaaaatatgaagaaaatagcaaacgaatgcaagaattgagatctcggaactttcagcagctgagtgttgatgtactccatgaaaaaacacatttaaaaggaatggaagaaaaggaggagcaacctgagggaagactttcttgttcaccccaggacgaggatgaagagaggtggcaaggcagggaagaggaatctgatgaaccaactttagagaacctgcctgagtctcagcctattccttccatggacctccacgaacttgaatcaattgtagaggatgccacatctgaccttggataccatgagatcccagaagacccacttgtggctgaagagtactacgctgatgcatttgattcctattgtgtagagagtgatgaggaggaagaagaaatagcgttagaaagaccagagaaagaaatcaggaatgagggatcccagcctgcttacagaacaaaccaacaggacagtgatatcgaagcgttggccaggtgtttggaaaatgtcctgggttgcacttctctagacacaaagaccatcaccaccatggctgaagacatgtccccaggaccaccaattttcaacagtgtgatggccaggaccaagatgaaacgcatgagggaatcagccatgcagaagctggggacagaagtatttgaagaggtctataattacctcaagagagcaaggcatcagaatgctagcgaagcagagatccgcgagtgtttggaaaaagtggtgcctcaagccagcgactgttttgaagtggaccagctcctgtactttgaagagcagttgctgatcacgatgggaaaagaacctactctccagaaccatctctaggcaactatcaaaaagaagcagaagttcaagtggacaaatttatgtgaaaattcatttaacatataagctgaactctattatggggaatggatacaaaagcagagctcccatcttgactttcaattcctcatcagaagtactggcttctttagagagtagtaagcatggctgcctatgcttggagtcataagtgttatttggactataccctgagataagcttatagatcaagtttggctcccttgaaaagcatttctctcatgtgcgccctcagggcttccagcaggattgagtcaccctgacgatgaccggggagaagccgtgtgctcttcattattttcagctggaggacagagctcagtgcctgactgcctagggtctcatggactgtaggcagcctgccagtgaaggtcactggactctagcctacaacatgctgagctacagcccagaagccagacatgcctgtcttagctgacctgtttttggtccacttttgcccttccatgactaataaggaagatatgtgtgtatttcatacacacacaaggacctggattaaaaatccaaaaagtgattctcttctatgatttatttcaaactcatccatagataattcaagatttgtattcaaaataaacatagttttcacagttacaaaataaaaaangatncgcccagatttccctttcttcatccaatcccgtacagtaatctatcaattttc

SEQ ID NO: 64385 - DNA, 1040 bp, Homo sapiens
cagccgtggcccgcggtgtctggcgctcggtgggtgtggttgcccctagtttgaggcctgcccgattacccgcaagacttgggcagccccgggcgccgctccgaccacgacagggaaaggaactgaccaacactggatgaatttgaccatttcttaggagactggaatgttaagtttctataaatgaatgaaccagttctctcttgtttggagcaatgctgaaattccaagaggcagctaagtgtgtgagtggatcaacagccatttccacttatccaaagaccttgattgcaagaagatacgtgcttcaacaaaaacttggcagtggaagttttggaactgtctatctggtttcagacaagaaagccaaacgaggagaggaattaaaggtacttaaggaaatatctgttggagaactaaatccaaatgaaactgtacaggccaatttggaagcccaactcctctccaagctggaccacccagccattgtcaagttccatgcaagttttgtggagcaagataatttctgcattatcacggagtactgtgagggccgagatctggacgataaaattcaggaatataaacaagctggaaaaatctttccagaaaatcaaataatagaatggtttatccagctgctgctgggagttgactacatgcatgagaggaggatacttcatcgagacttaaagtcaaagaatgtatttctgaaaaataatctccttaaaattggagattttggagtttctcgacttctaatgggatcctgtgacctggccacaactttaactggaactccccattatatgagtcctgaggctctgaaacaccaaggctatgacacaaagtcggacatctggtcactggcatgcattttgtatgagatgtgctgcatgaatcatgcattcgctggctccaatttcttatccattgttttaaaaattgttgaaggtgacacaccttctctccctgagagatatccaaaagaactaaatgccatcatggaaaggtatagaaataaacatgttgtcacagaa

SEQ ID NO: 64386 - DNA, 2726 bp, Homo sapiens
cagccgtggcccgcggtgtctggcgctcggtgggtgtggttgcccctagtttgaggcctgcccgattacccgcaagacttgggcagccccgggcgccgctccgaccacgacagggaaaggaactgaccaacactggatgaatttgaccatttcttaggagactggaatgttaagtttctataaatgaatgaaccagttctctcttgtttggagcaatgctgaaattccaagaggcagctaagtgtgtgagtggatcaacagccatttccacttatccaaagaccttgattgcaagaagatacgtgcttcaacaaaaacttggcagtggaagttttggaactgtctatctggtttcagacaagaaagccaaacgaggagaggaattaaaggtacttaaggaaatatctgttggagaactaaatccaaatgaaactgtacaggccaatttggaagcccaactcctctccaagctggaccacccagccattgtcaagttccatgcaagttttgtggagcaagataatttctgcattatcacggagtactgtgagggccgagatctggacgataaaattcaggaatataaacaagctggaaaaatctttccagaaaatcaaataatagaatggtttatccagctgctgctgggagttgactacatgcatgagaggaggatacttcatcgagacttaaagtcaaagaatgtatttctgaaaaataatctccttaaaattggagattttggagtttctcgacttctaatgggatcctgtgacctggccacaactttaactggaactccccattatatgagtcctgaggctctgaaacaccaaggctatgacacaaagtcggacatctggtcactggcatgcattttgtatgagatgtgctgcatgaatcatgcattcgctggctccaatttcttatccattgttttaaaaattgttgaaggtgacacaccttctctccctgagagatatccaaaagaactaaatgccatcatggaaagcatgttgaacaagaatccttcattaagaccatctgctatcgaaattttaaaaatcccttaccttgatgagcagctacagaacctaatgtgtagatattcagaaatgactctggaagacaaaaatttggattgtcagaaggaggctgctcatataattaatgccatgcaaaaaaggatccacctgcagactctgagggcactgtcagaagtacagaaaatgacgccaagagaaaggatgcggctgaggaagctccaggcggctgatgagaaagccaggaagctgaaaaagattgtggaagaaaaatatgaagaaaatagcaaacgaatgcaagaattgagatctcggaactttcagcagctgagtgttgatgtactccatgaaaaaacacatttaaaaggaatggaagaaaaggaggagcaacctgagggaagactttcttgttcaccccaggacgaggatgaagagaggtggcaaggcagggaagaggaatctgatgaaccaactttagagaacctgcctgagtctcagcctattccttccatggacctccacgaacttgaatcaattgtagaggatgccacatctgaccttggataccatgagatcccagaagacccacttgtggctgaagagtactacgctgatgcatttgattcctattgtgtagagagtgatgaggaggaagaagaaatagcgttagaaagaccagagaaagaaatcaggaatgagggatcccagcctgcttacagaacaaaccaacaggacagtgatatcgaagcgttggccaggtgtttggaaaatgtcctgggttgcacttctctagacacaaagaccatcaccaccatggctgaagacatgtccccaggaccaccaattttcaacagtgtgatggccaggaccaagatgaaacgcatgagggaatcagccatgcagaagctggggacagaagtatttgaagaggtctataattacctcaagagagcaaggcatcagaatgctagcgaagcagagatccgcgagtgtttggaaaaagtggtgcctcaagccagcgactgttttgaagtggaccagctcctgtactttgaagagcagttgctgatcacgatgggaaaagaacctactctccagaaccatctctaggcaactatcaaaaagaagcagaagttcaagtggacaaatttatgtgaaaattcatttaacatataagctgaactctattatggggaatggatacaaaagcagagctcccatcttgactttcaattcctcatcagaagtactggcttctttagagagtagtaagcatggctgcctatgcttggagtcataagtgttatttggactataccctgagataagcttatagatcaagtttggctcccttgaaaagcatttctctcatgtgcgccctcagggcttccagcaggattgagtcaccctgacgatgaccggggagaagccgtgtgctcttcattattttcagctggaggacagagctcagtgcctgactgcctagggtctcatggactgtaggcagcctgccagtgaaggtcactggactctagcctacaacatgctgagctacagcccagaagccagacatgcctgtcttagctgacctgtttttggtccacttttgcccttccatgactaataaggaagatatgtgtgtatttcatacacacacaaggacctggattaaaaatccaaaaa

SEQ ID NO: 64387 - DNA, 1919 bp, Homo sapiens
agctacatgtaattttacataacccagggaaaactagcatgctttgttctcaggctccctgccatggtcaaaagcaccccaaatctgaaaagattcttggtaatttattccctttcatccctaaagaggagcctttaagatatgtcagggttgatctttttttcagaacctaatgtgtagatattcagaaatgactctggaagacaaaaatttggattgtcagaaggaggctgctcatataattaatgccatgcaaaaaaggatccacctgcagactctgagggcactgtcagaagtacagaaaatgacgccaagagaaaggatgcggctgaggaagctccaggcggctgatgagaaagccaggaagctgaaaaagattgtggaagaaaaatatgaagaaaatagcaaacgaatgcaagaattgagatctcggaactttcagcagctgagtgttgatgtactccatgaaaaaacacatttaaaaggaatggaagaaaaggaggagcaacctgagggaagactttcttgttcaccccaggacgaggatgaagagaggtggcaaggcagggaagaggaatctgatgaaccaactttagagaacctgcctgagtctcagcctattccttccatggacctccacgaacttgaatcaattgtagaggatgccacatctgaccttggataccatgagatcccagaagacccacttgtggctgaagagtactacgctgatgcatttgattcctattgtgtagagagtgatgaggaggaagaagaaatagcgttagaaagaccagagaaagaaatcaggaatgagggatcccagcctgcttacagaacaaaccaacaggacagtgatatcgaagcgttggccaggtgtttggaaaatgtcctgggttgcacttctctagacacaaagaccatcaccaccatggctgaagacatgtccccaggaccaccaattttcaacagtgtgatggccaggaccaagatgaaacgcatgagggaatcagccatgcagaagctggggacagaagtatttgaagaggtctataattacctcaagagagcaaggcatcagaatgctagcgaagcagagatccgcgagtgtttggaaaaagtggtgcctcaagccagcgactgttttgaagtggaccagctcctgtactttgaagagcagttgctgatcacgatgggaaaagaacctactctccagaaccatctctaggcaactatcaaaaagaagcagaagttcaagtggacaaatttatgtgaaaattcatttaacatataagctgaactctattatggggaatggatacaaaagcagagctcccatcttgactttcaattcctcatcagaagtactggcttctttagagagtagtaagcatggctgcctatgcttggagtcataagtgttatttggactataccctgagataagcttatagatcaagtttggctcccttgaaaagcatttctctcatgtgcgccctcagggcttccagcaggattgagtcaccctgacgatgaccggggagaagccgtgtgctcttcattattttcagctggaggacagagctcagtgcctgactgcctagggtctcatggactgtaggcagcctgccagtgaaggtcactggactctagcctacaacatgctgagctacagcccagaagccagacatgcctgtcttagctgacctgtttttggtccacttttgcccttccatgactaataaggaagatatgtgtgtatttcatacacacacaaggacctggattaaaaatccaaaaagtgattctcttctatgatttatttcaaactcatccatagataattcaagatttgtattcaaaataaacatagttttcacagttacaaaataaatcacctattttatcttttccttatg

SEQ ID NO: 64388 - DNA, 820 bp, Homo sapiens
cagccgtggcccgcggtgtctggcgctcggtgggtgtggttgcccctagtttgaggcctgcccgattacccgcaagacttgggcagccccgggcgccgctccgaccacgacagggaaaggaactgaccaacactggatgaatttgaccatttcttaggagactggaatgttaagtttctataaatgaatgaaccagttctctcttgtttggagcaatgctgaaattccaagaggcagctaagtgtgtgagtggatcaacagccatttccacttatccaaagaccttgattgcaagaagatacgtgcttcaacaaaaacttggcagtggaagttttggaactgtctatctggtttcagacaagaaagccaaacgaggagaggaattaaaggtacttaaggaaatatctgttggagaactaaatccaaatgaaactgtacaggccaatttggaagcccaactcctctccaagctggaccacccagccattgtcaagttccatgcaagttttgtggagcaagataatttctgcattatcacggagtactgtgagtgaaatgagcgcctctaccactggaaatttctccaggagtattccataaagcaaacacatttcatgataaccttttagctactgttatatcagcaaccttcctgcatgacgggaaagcttctgtacatccagaaactattcattgaaggacctctccaaggagaactgcaaaccactgctcaatgaaataaaagaggacacaaacaaatggaagaacattccatgctcatgggtaggaagaatcaatatcgtgaaaatggccatactgc

SEQ ID NO: 64389 - DNA, 521 bp, Homo sapiens
  misc_feature (37)..(37): n is a, c, g, or t
  misc_feature (53)..(53): n is a, c, g, or t
  misc_feature (104)..(104): n is a, c, g, or t
tgagacagaatctcgtgctgttgcccaggctggagtncaatggtgtgatctcngctcactgcaacctctgcctccggagttctcctgcctcagactccctagtngctgggactgcaggcacccgccaccatgcccagctcccctcccttaaaggcataagtagtgcaagctgactccgagcacatccaggaatgcgcttactgatgagatatcgaggcaagctaaatcagcagttcctgaggacgcgcttgggggatggcacccaaagcccctgcattatctctttgtgatagtttgagcccctgcacctggaactgtttacttttctgtaactgtttctgtaaccaattaatctttcttaattggtttgcctgttctgcttctgtaaaaattgcttcagctaaactccctctcccctatttagaccacgatataaaaagaaatctagccccttcttcggggccgagagaattttgagctctagccgtcttgttcgccggcaataaaaggactcctgaatt

SEQ ID NO: 64390 - DNA, 858 bp, Homo sapiens
aaatgtcctgtaaacacacatgtctgattcctatgtcacttctgatgcagattgtgaaatcaagtctttactattaacagctttttattgcttgctgtcttctttgtgttttagctcttcttctctgctgaaatgtgagctttttgaagtaggagggagattttgagtttcttttttatcttataaaatatcgagttcagtgatggacatatataaactagacattaattataagttgattattaaaataatcacatccttctttgtgggctaagccgttgacacggtagtctaatttcagctatcatgccactgagttcttatgtgatgccattaaaaatgcccacattaaaaaaatgactataatctgaattgtataaagaaggtaatgtgataccctacctcgttttaacctgattgtctctcttagctgagagagccggacagactccatttttgtttcttcacttgcagctcccctcccttaaaggcataagtagtgcaagctgactccgagcacatccaggaatgcgcttactgatgagatatcgaggcaagctaaatcagcagttcctgaggacgcgcttgggggatggcacccaaagcccctgcattatctctttgtgatagtttgagcccctgcacctggaactgtttacttttctgtaactgtttctgtaaccaattaatctttcttaattggtttgcctgttctgcttctgtaaaaattgcttcagctaaactccctctcccctatttagaccacgatataaaaagaaatctagccccttcttcggggccgagagaattttgagctctagccgtcttgttcgccggcaataaaaggactcctgaatt

SEQ ID NO: 64391 - DNA, 830 bp, Homo sapiens
agacatggcttcaggggatgcaggacgctcccctgagctgcctgtcaccgactaagtggagcagtgtttcttccgcagactcaactgagaagtcagcctctgcggcaggcaccaggaatctgccttttcagttctgtctccggcaggctttgaggatgaaggctgcgggcattctgaccctcattggctgcctggtcacaggcgccgagtccaaaatctacactcgttgcaaactggcaaaaatattctcgagggctggcctggacaattactggggcttcagccttggaaactggatctgcatggcgtattatgagagcggctacaacaccacagcccagacggtcctggatgacggcagcatcgactacggcatcttccagatcaacagcttcgcgtggtgcagacgcggaaagctgaaggagaacaaccactgccacgtcgcctgctcagccttggtcactgatgacctcacagatgcgattatctgtgccaagaaaattgttaaagagacacaaggaatgaactattggcaaggctggaagaaacactgtgaggggagagacctgtccgactggaaaaaagactgtgaggtttcctaaactggaactggacccaggatgctttgcagcaacgccctagggtttgcagtgaatgtccaaatgcctgtgtcatcttgtcccgtttcctcccaatattccttctcaaacttggagagggaaaattaagctatacttttaagaaaataaatatttccatttaaatgtcttcacaaaaaaaaatcccggcggatcggcaaagggcgaactcaagggggccggacctttgtc

SEQ ID NO: 64392 - DNA, 811 bp, Homo sapiens
agacatggcttcaggggatgcaggacgctcccctgagctgcctgtcaccgactaagtggagcagtgtttcttccgcagactcaactgagaagtcagcctctgcggcaggcaccaggaatctgccttttcagttctgtctccggcaggctttgaggatgaaggctgcgggcattctgaccctcattggctgcctggtcacaggcgccgagtccaaaatctacactcgttgcaaactggcaaaaatattctcgagggctggcctggacaattactggggcttcagccttggaaactggatctgcatggcgtattatgagagcggctacaacaccacagcccagacggtcctggatgacggcagcatcgactacggcatcttccagatcaacagcttcgcgtggtgcagacgcggaaagctgaaggagaacaaccactgccacgtcgcctgctcagccttggtcactgatgacctcacagatgcgattatctgtgccaagaaaattgttaaagagagcaaggctggaagaaacactgtgaggggagagacctgtccgactggaaaaaagactgtgaggtttcctaaactggaactggacccaggatgctttgcagcaacgccctagggtttgcagtgaatgtccaaatgcctgtgtcatcttgtcccgtttcctcccaatattccttctcaaacttggagagggaaaattaagctatacttttaagaaaataaatatttccatttaaatgtcttcacaaaaaaaaatcccggcggatcggcaaagggcgaactcaagggggccggacctttgtc

SEQ ID NO: 64393 - DNA, 913 bp, Homo sapiens
agacatggcttcaggggatgcaggacgctcccctgagctgcctgtcaccgactaagtggagcagtgtttcttccgcagactcaactgagaagtcagcctctgcggcaggcaccaggaatctgccttttcagttctgtctccggcaggctttgaggatgaaggctgcgggcattctgaccctcattggctgcctggtcacaggcgccgagtccaaaatctacactcgttgcaaactggcaaaaatattctcgagggctggcctggacaattactggggcttcagccttggaaactggatctgcatggcgtattatgagagcggctacaacaccacagcccagacggtcctggatgacggcagcatcgactacggcatcttccagatcaacagcttcgcgtggtgcagacgcggaaagctgaaggagaacaaccactgccacgtcgcctgctcagccttggtcactgatgacctcacagatgcgattatctgtgccaagaaaattgttaaagagacacaaggaatgaactattggcaaggctggaagaaacactgtgaggggagagacctgtccgactggaaaaaagactgtgaggtttcctaaactggaactggacccaggatgctttgcagcaacgccctaggtgtggcccagggaagtcaaaagattggatacccctgattggaaaactgactccaaaaataagtgcttcaaaattcaagattcagcaagcacctctgtttaaactgatcctccagtaacagaaagagaagaggaagcacaagggcagaagctaataagcagagtcttgctggagaacaggagagaggagagaggtgatttctaacaggacctgcagacacttcgacaagataaactacattttatgtgaaataaaggcatgttcaaaaagc

SEQ ID NO: 64394 - DNA, 758 bp, Homo sapiens
agacatggcttcaggggatgcaggacgctcccctgagctgcctgtcaccgactaagtggagcagtgtttcttccgcagactcaactgagaagtcagcctctgcggcaggcaccaggaatctgccttttcagttctgtctccggcaggctttgaggatgaaggctgcgggcattctgaccctcattggctgcctggtcacaggcgccgagtccaaaatctacactcgttgcaaactggcaaaaatattctcgagggctggcctggacaattactggggcttcagccttggaaactggatctgcatggcgtattatgagagcggctacaacaccacagcccagacggtcctggatgacggcagcatcgactacggcatcttccagatcaacagcttcgcgtggtgcagacgcggaaagctgaaggagaacaaccactgccacgtcgcctgctcagccttggtcactgatgacctcacagatgcgattatctgtgccaagaaaattgttaaagagaactgtgaggtttcctaaactggaactggacccaggatgctttgcagcaacgccctagggtttgcagtgaatgtccaaatgcctgtgtcatcttgtcccgtttcctcccaatattccttctcaaacttggagagggaaaattaagctatacttttaagaaaataaatatttccatttaaatgtcttcacaaaaaaaaatcccggcggatcggcaaagggcgaactcaagggggccggacctttgtc

SEQ ID NO: 64395 - DNA, 459 bp, Homo sapiens
agacatggcttcaggggatgcaggacgctcccctgagctgcctgtcaccgactaagtggagcagtgtttcttccgcagactcaactgagaagtcagcctctgcggcaggcaccaggaatctgccttttcagttctgtctccggcaggctttgaggatgaaggctgcgggcattctgaccctcattggctgcctggtcacaggcgccgagtccaaaatctacactcgttgcaaatggaactggacccaggatgctttgcagcaacgccctagggtttgcagtgaatgtccaaatgcctgtgtcatcttgtcccgtttcctcccaatattccttctcaaacttggagagggaaaattaagctatacttttaagaaaataaatatttccatttaaatgtcttcacaaaaaaaaatcccggcggatcggcaaagggcgaactcaagggggccggacctttgtc

SEQ ID NO: 64396 - DNA, 4338 bp, Homo sapiens
tttgctcatcgtttgttgtttagataatatcatgaactgataaatgcagttgccacgttgattccctagggcctggcttaccgactgaggtcataagatattatgccttctctttagacttggtcagtggagaggaaatgggcaaagaaccagcctatggaggtgacaaggccttagggccaaaagtcttgagggtgaaggtttagggcctgcgcagcttccctgccatgccccgcaaggtctcgcattcgcaaggcttgtgacagtgggagcctcattacggactctcctaaagtccatggtgtcctcttttcgcatttgcgccccgtgggtgatgcccgatgccgcccttcccatcgctctcttccccttcaagcgtatcgcaactgcaaaaacacccagcacagacactccattttctatcttaatgcatttaactagcacaacctacaggttgttccatcccagagactacccttttctccatagacgtgaccatcaaccaaccagcggtcagaatcagtcagcctctgtcatgttcctaggtccttggcgaactggctgggcggggtcccagcagcctaggagtacagtggagcaatgcctgacgtaagtcaacaaagatcacgtgagacgaatcagtcgcctagattggctacaactaagtggttgggagcggggaggtcgcggcggctgcgtggggttcgcccgtgacacaattacaactttgtgctggtgctggcaaagtttgtgattttaagaaattctgctgtgctctccagcactgcgagcttctgccttccctgtagtttcccagatgtgatccaggtagccgagttccgctgcccgtgcttcggtagcttaagtctttgcctcagcttttttccttgcagccgctgaggaggcgataaaattggcgtcacagtctcaagcagcgattgaaggcgtcttttcaactactcgattaaggttgggtatcgtcgtgggacttggaaatttgttgtttccatgaaatcctgcgcagtgtcgctcactaccgccgctgttgccttcggtgatgaggcaaagaaaatggcggaaggaaaagcgagccgcgagagtgaagaggagtctgttagcctgacagtcgaggaaagggaggcgcttggtggcatggacagccgtctcttcgggttcgtgaggcttcatgaagatggcgccagaacgaagaccctactaggcaaggctgttcgctgctacgaatctttaatcttaaaagctgaaggaaaagtggagtctgacttcttttgccaattaggtcacttcaacctcttgttggaagattattcaaaagcattatctgcatatcagagatattacagtttacaggctgactactggaagaatgctgcgtttttatatggccttggtttggtctacttctactacaatgcatttcattgggcaattaaagcatttcaagatgtcctttatgttgaccccagcttttgtcgagccaaggaaattcatttacgacttgggctcatgttcaaagtgaacacagactacaagtctagtttaaagcattttcagttagccttgattgactgtaatccatgtactttgtccaatgctgaaattcaatttcatattgcccatttgtatgaaacccagaggaagtatcattctgcaaaggaggcatatgaacaacttttgcagacagaaaaccttcctgcacaagtaaaagcaactgtattgcaacagttaggttggatgcatcataatatggatctagtaggagacaaagccacaaaggaaagctatgctattcagtatctccaaaagtctttggaggcagatcctaattctggccaatcgtggtattttcttggaaggtgttattcaagtattgggaaagttcaggatgcctttatatcttacaggcaatctattgataaatcagaagcaagtgcagatacatggtgttcaataggtgtgttgtatcagcagcaaaatcagcctatggatgctttacaggcatatatttgtgctgtacaattggaccatgggcatgccgcagcctggatggacctaggtactctctatgaatcctgcaatcaacctcaagatgccattaaatgctacctaaatgcagctagaagcaaacgttgtagtaatacctctacgcttgctgcaagaattaaatttctacagaatggttctgataactggaatggtggccagagtctttcacatcatccagtacagcaagtttattcgttgtgtttgacaccacagaaattacagcacttggaacaactgcgagcaaatagagataatttaaatccagcacagaagcatcagctggaacagttagaaagtcagtttgtcttaatgcagcaaatgagacacaaagaagttgctcaggtacgaactactggaattcataacggggccataactgattcatcactgcctacaaactctgtctctaatcgacaaccacatggtgctctgaccagagtatctagcgtctctcagcctggagttcgccctgcttgtgttgaaaaacttttgtccagtggagctttttctgcaggctgtattccttgtggcacatcaaaaattctaggaagtacagacactatcttgctaggcagtaattgtatagcaggaagtgaaagtaatggaaatgtgccttacctgcagcaaaatacacacactctacctcataatcatacagacctgaacagcagcacagaagagccatggagaaaacagctatctaactccgctcaggggcttcataaaagtcagagttcatgtttgtcaggacctaatgaagaacaacctctgttttccactgggtcagcccagtatcaccaggcaactagcactggtattaagaaggcgaatgaacatctcactctgcctagtaattcagtaccacagggggatgctgacagtcacctctcctgtcatactgctacctcaggtggacaacaaggcattatgtttaccaaagagagcaagccttcaaaaaatagatccttggtgcctgaaacaagcaggcatactggagacacatctaatggctgtgctgatgtcaagggactttctaatcatgttcatcagttgatagcagatgctgtttccagtcctaaccatggagattcaccaaatttattaattgcagacaatcctcagctctctgctttgttgattggaaaagccaatggcaatgtgggtactggaacctgcgacaaagtgaataatattcacccagctgttcatacaaagactgatcattctgttgcctcttcaccctcttcagccatttccacagcaacaccttctcctaaatccactgagcagagaagcataaacagtgttaccagccttaacagtcctcacagtggattacacacagtcaatggagaggggctggggaagtcacagagctctacaaaagtagacctgcctttagctagccacagatctacttctcagatcttaccatcaatgtcagtgtctatatgccccagttcaacagaagttctgaaagcatgcaggaatccaggtaaaaatggcttgtctaatagctgcattttgttagataaatgtccacctccaagaccaccaacttcaccatacccacccttgccaaaggacaagttgaatccacccacacctagtatttacttggaaaataaacgtgatgctttctttcctccattacatcaattttgtacaaatccaaaaaaccctgttacagtaatacgtggccttgctggagctcttaaattagatcttggacttttctctaccaaaactttggtagaagctaacaatgaacatatggtagaagtgaggacacagttgctgcaaccagcagatgaaaactgggatcccactggaacaaagaaaatctggcgttgtgaaagcaatagatctcatactacaattgccaaatacgcacaataccaggcttcctccttccaggaatcattgagagctggaatgcaatggtgtgatctcagctcactgcagcctccgcctcctgggttcaagcgattctcccacctcagcctcccgaatagctggaattacaggcacctgccatcatgcccaactaatttttgtatttttgtagagacagggtttcaccatgttggccaggcttgtcttgaactcctgacctcaggtggtctgcttgcctcagcatcccaaagtgctgggattacaggtgtgagccaccatgcccggtaaacttttaaaaatgtaagcaaaattacagtatgtaaaacacacattgctaatggagaaataaagttcctacttttacatctaaaaaaaaaa

SEQ ID NO: 64397 - DNA, 5002 bp, Homo sapiens
tttgctcatcgtttgttgtttagataatatcatgaactgataaatgcagttgccacgttgattccctagggcctggcttaccgactgaggtcataagatattatgccttctctttagacttggtcagtggagaggaaatgggcaaagaaccagcctatggaggtgacaaggccttagggccaaaagtcttgagggtgaaggtttagggcctgcgcagcttccctgccatgccccgcaaggtctcgcattcgcaaggcttgtgacagtgggagcctcattacggactctcctaaagtccatggtgtcctcttttcgcatttgcgccccgtgggtgatgcccgatgccgcccttcccatcgctctcttccccttcaagcgtatcgcaactgcaaaaacacccagcacagacactccattttctatcttaatgcatttaactagcacaacctacaggttgttccatcccagagactacccttttctccatagacgtgaccatcaaccaaccagcggtcagaatcagtcagcctctgtcatgttcctaggtccttggcgaactggctgggcggggtcccagcagcctaggagtacagtggagcaatgcctgacgtaagtcaacaaagatcacgtgagacgaatcagtcgcctagattggctacaactaagtggttgggagcggggaggtcgcggcggctgcgtggggttcgcccgtgacacaattacaactttgtgctggtgctggcaaagtttgtgattttaagaaattctgctgtgctctccagcactgcgagcttctgccttccctgtagtttcccagatgtgatccaggtagccgagttccgctgcccgtgcttcggtagcttaagtctttgcctcagcttttttccttgcagccgctgaggaggcgataaaattggcgtcacagtctcaagcagcgattgaaggcgtcttttcaactactcgattaaggttgggtatcgtcgtgggacttggaaatttgttgtttccatgaaatcctgcgcagtgtcgctcactaccgccgctgttgccttcggtgatgaggcaaagaaaatggcggaaggaaaagcgagccgcgagagtgaagaggagtctgttagcctgacagtcgaggaaagggaggcgcttggtggcatggacagccgtctcttcgggttcgtgaggcttcatgaagatggcgccagaacgaagaccctactaggcaaggctgttcgctgctacgaatctttaatcttaaaagctgaaggaaaagtggagtctgacttcttttgccaattaggtcacttcaacctcttgttggaagattattcaaaagcattatctgcatatcagagatattacagtttacaggctgactactggaagaatgctgcgtttttatatggccttggtttggtctacttctactacaatgcatttcattgggcaattaaagcatttcaagatgtcctttatgttgaccccagcttttgtcgagccaaggaaattcatttacgacttgggctcatgttcaaagtgaacacagactacaagtctagtttaaagcattttcagttagccttgattgactgtaatccatgtactttgtccaatgctgaaattcaatttcatattgcccatttgtatgaaacccagaggaagtatcattctgcaaaggaggcatatgaacaacttttgcagacagaaaaccttcctgcacaagtaaaagcaactgtattgcaacagttaggttggatgcatcataatatggatctagtaggagacaaagccacaaaggaaagctatgctattcagtatctccaaaagtctttggaggcagatcctaattctggccaatcgtggtattttcttggaaggtgttattcaagtattgggaaagttcaggatgcctttatatcttacaggcaatctattgataaatcagaagcaagtgcagatacatggtgttcaataggtgtgttgtatcagcagcaaaatcagcctatggatgctttacaggcatatatttgtgctgtacaattggaccatgggcatgccgcagcctggatggacctaggtactctctatgaatcctgcaatcaacctcaagatgccattaaatgctacctaaatgcagctagaagcaaacgttgtagtaatacctctacgcttgctgcaagaattaaatttctacagaatggttctgataactggaatggtggccagagtctttcacatcatccagtacagcaagtttattcgttgtgtttgacaccacagaaattacagcacttggaacaactgcgagcaaatagagataatttaaatccagcacagaagcatcagctggaacagttagaaagtcagtttgtcttaatgcagcaaatgagacacaaagaagttgctcaggtacgaactactggaattcataacggggccataactgattcatcactgcctacaaactctgtctctaatcgacaaccacatggtgctctgaccagagtatctagcgtctctcagcctggagttcgccctgcttgtgttgaaaaacttttgtccagtggagctttttctgcaggctgtattccttgtggcacatcaaaaattctaggaagtacagacactatcttgctaggcagtaattgtatagcaggaagtgaaagtaatggaaatgtgccttacctgcagcaaaatacacacactctacctcataatcatacagacctgaacagcagcacagaagagccatggagaaaacagctatctaactccgctcaggggcttcataaaagtcagagttcatgtttgtcaggacctaatgaagaacaacctctgttttccactgggtcagcccagtatcaccaggcaactagcactggtattaagaaggcgaatgaacatctcactctgcctagtaattcagtaccacagggggatgctgacagtcacctctcctgtcatactgctacctcaggtggacaacaaggcattatgtttaccaaagagagcaagccttcaaaaaatagatccttggtgcctgaaacaagcaggcatactggagacacatctaatggctgtgctgatgtcaagggactttctaatcatgttcatcagttgatagcagatgctgtttccagtcctaaccatggagattcaccaaatttattaattgcagacaatcctcagctctctgctttgttgattggaaaagccaatggcaatgtgggtactggaacctgcgacaaagtgaataatattcacccagctgttcatacaaagactgatcattctgttgcctcttcaccctcttcagccatttccacagcaacaccttctcctaaatccactgagcagagaagcataaacagtgttaccagccttaacagtcctcacagtggattacacacagtcaatggagaggggctggggaagtcacagagctctacaaaagtagacctgcctttagctagccacagatctacttctcagatcttaccatcaatgtcagtgtctatatgccccagttcaacagaagttctgaaagcatgcaggaatccaggtaaaaatggcttgtctaatagctgcattttgttagataaatgtccacctccaagaccaccaacttcaccatacccacccttgccaaaggacaagttgaatccacccacacctagtatttacttggaaaataaacgtgatgctttctttcctccattacatcaattttgtacaaatccaaaaaaccctgttacagtaatacgtggccttgctggagctcttaaattagatcttggacttttctctaccaaaactttggtagaagctaacaatgaacatatggtagaagtgaggacacagttgctgcaaccagcagatgaaaactgggatcccactggaacaaagaaaatctggcgttgtgaaagcaatagatctcatactacaattgccaaatacgcacaataccaggcttcctccttccaggaatcattgagagaagaaaatgagaaaagaacacaacacaaagatcattcagataacgaatccacatcttcagagaattctggaaggagaaggaaaggaccttttaaaaccataaaatttgggaccaacattgacctctctgataacaaaaagtggaagttgcagttacatgaactgactaaacttcctgcttttgcgcgtgtggtgtcagcaggaaatcttctaacccatgttgggcataccattctgggcatgaatacagtacaactgtatatgaaagttccagggagtcggacaccaggtcaccaagaaaataacaacttctgctctgttaacataaatattggtccaggagattgtgaatggtttgttgtacctgaagattattggggtgttctgaatgacttctgtgaaaaaaataatttgaattttttaatgagttcttggtggcccaaccttgaagatctttatgaagcaaatgtccctgtgtatagatttattcagcgacctggagatttggtctggataaatgcaggcactgtgcattgggttcaagctgttggctggtgcaataacattgcctggaatgttggtccacttacagcctgccagtataaattggcagtggaacggtatgaatggaacaaattgaaaagtgtgaagtcaccagtacccatggtgcatctttcctggaatatggcacgaaatatcaaagtctcagatccaaagctttttgaaatgattaagtaagtgccttctgaaactgctgcagtttctctttgggggtattggtagccattcagtatttttttcaaaagaattctgttgacattaaatgatatcagcagtccagaagtcttggcaaaatgtaataagatgtaaataatcttatatattcataagtgttataaaatctcataagattaaaatattgccttcccttacagatagtcacttgtgtttattacaatttagagaggaataaagatgtacatgaatatacactggtaaatttacaact

SEQ ID NO: 64398 - DNA, 2099 bp, Homo sapiens
tttgctcatcgtttgttgtttagataatatcatgaactgataaatgcagttgccacgttgattccctagggcctggcttaccgactgaggtcataagatattatgccttctctttagacttggtcagtggagaggaaatgggcaaagaaccagcctatggaggtgacaaggccttagggccaaaagtcttgagggtgaaggtttagggcctgcgcagcttccctgccatgccccgcaaggtctcgcattcgcaaggcttgtgacagtgggagcctcattacggactctcctaaagtccatggtgtcctcttttcgcatttgcgccccgtgggtgatgcccgatgccgcccttcccatcgctctcttccccttcaagcgtatcgcaactgcaaaaacacccagcacagacactccattttctatcttaatgcatttaactagcacaacctacaggttgttccatcccagagactacccttttctccatagacgtgaccatcaaccaaccagcggtcagaatcagtcagcctctgtcatgttcctaggtccttggcgaactggctgggcggggtcccagcagcctaggagtacagtggagcaatgcctgacgtaagtcaacaaagatcacgtgagacgaatcagtcgcctagattggctacaactaagtggttgggagcggggaggtcgcggcggctgcgtggggttcgcccgtgacacaattacaactttgtgctggtgctggcaaagtttgtgattttaagaaattctgctgtgctctccagcactgcgagcttctgccttccctgtagtttcccagatgtgatccaggtagccgagttccgctgcccgtgcttcggtagcttaagtctttgcctcagcttttttccttgcagccgctgaggaggcgataaaattggcgtcacagtctcaagcagcgattgaaggcgtcttttcaactactcgattaaggttgggtatcgtcgtgggacttggaaatttgttgtttccatgaaatcctgcgcagtgtcgctcactaccgccgctgttgccttcggtgatgaggcaaagaaaatggcggaaggaaaagcgagccgcgagagtgaagaggagtctgttagcctgacagtcgaggaaagggaggcgcttggtggcatggacagccgtctcttcgggttcgtgaggcttcatgaagatggcgccagaacgaagaccctactaggcaaggctgttcgctgctacgaatctttaatcttaaaagctgaaggaaaagtggagtctgacttcttttgccaattaggtcacttcaacctcttgttggaagattattcaaaagcattatctgcatatcagagatattacagtttacaggctgactactggaagaatgctgcgtttttatatggccttggtttggtctacttctactacaatgcatttcattgggcaattaaagcatttcaagatgtcctttatgttgaccccagcttttgtcgagccaaggaaattcatttacgacttgggctcatgttcaaagtgaacacagactacaagtctagtttaaagcattttcagttagccttgattgactgtaatccatgtactttgtccaatgctgaaagtaagtatttttaaatgaaatacttttgagtaaagaatattaatgatacctttttttctactgatacctttgtttctgttcattcttgagaagagaagtgagaaggcatgtgcctgattcagagagtttaaatcactggagttgagttgatttgggtactatttttcttgctcaaagacagtcagtattattatttgataactgtagaaatgattggtatgtcacagagcactaacaaatagtgattacctactttagtagtttttctccctttatggtgtctatgttttcatattaatgaattacttcaccttttaatattttaggatttgcacataccgtaagcttgactattttttgaaacttttttgtgtacttggtgatgttgcaaaaatcaaaagttttcaaagccaattttaaacaaaacctgaataagttaaaaatgtgtagtttaaaaaataaatactgttttttgaactct

SEQ ID NO: 64399 - DNA, 2607 bp, Homo sapiens
tttgctcatcgtttgttgtttagataatatcatgaactgataaatgcagttgccacgttgattccctagggcctggcttaccgactgaggtcataagatattatgccttctctttagacttggtcagtggagaggaaatgggcaaagaaccagcctatggaggtgacaaggccttagggccaaaagtcttgagggtgaaggtttagggcctgcgcagcttccctgccatgccccgcaaggtctcgcattcgcaaggcttgtgacagtgggagcctcattacggactctcctaaagtccatggtgtcctcttttcgcatttgcgccccgtgggtgatgcccgatgccgcccttcccatcgctctcttccccttcaagcgtatcgcaactgcaaaaacacccagcacagacactccattttctatcttaatgcatttaactagcacaacctacaggttgttccatcccagagactacccttttctccatagacgtgaccatcaaccaaccagcggtcagaatcagtcagcctctgtcatgttcctaggtccttggcgaactggctgggcggggtcccagcagcctaggagtacagtggagcaatgcctgacgtaagtcaacaaagatcacgtgagacgaatcagtcgcctagattggctacaactaagtggttgggagcggggaggtcgcggcggctgcgtggggttcgcccgtgacacaattacaactttgtgctggtgctggcaaagtttgtgattttaagaaattctgctgtgctctccagcactgcgagcttctgccttccctgtagtttcccagatgtgatccaggtagccgagttccgctgcccgtgcttcggtagcttaagtctttgcctcagcttttttccttgcagccgctgaggaggcgataaaattggcgtcacagtctcaagcagcgattgaaggcgtcttttcaactactcgattaaggttgggtatcgtcgtgggacttggaaatttgttgtttccatgaaatcctgcgcagtgtcgctcactaccgccgctgttgccttcggtgatgaggcaaagaaaatggcggaaggaaaagcgagccgcgagagtgaagaggagtctgttagcctgacagtcgaggaaagggaggcgcttggtggcatggacagccgtctcttcgggttcgtgaggcttcatgaagatggcgccagaacgaagaccctactaggcaaggctgttcgctgctacgaatctttaatcttaaaagctgaaggaaaagtggagtctgacttcttttgccaattaggtcacttcaacctcttgttggaagattattcaaaagcattatctgcatatcagagatattacagtttacaggctgactactggaagaatgctgcgtttttatatggccttggtttggtctacttctactacaatgcatttcattgggcaattaaagcatttcaagatgtcctttatgttgaccccagcttttgtcgagccaaggaaattcatttacgacttgggctcatgttcaaagtgaacacagactacaagtctagtttaaagcattttcagttagccttgattgactgtaatccatgtactttgtccaatgctgaaagtaagtatttttaaatgaaatacttttgagtaaagaatattaatgatacctttttttctactgatacctttgtttctgttcattcttgagaagagaagtgagaaggcatgtgcctgattcagagagtttaaatcactggagttgagttgatttgggtactatttttcttgctcaaagacagtcagtattattatttgataactgtagaaatgattggtatgtcacagagcactaacaaatagtgattacctactttagtagtttttctccctttatggtgtctatgttttcatattaatgaattacttcaccttttaatattttaggatttgcacataccgtaagcttgactattttttgaaacttttttgtgtacttggtgatgttgcaaaaatcaaaagttttcaaagccaattttaaacaaaacctgaataagttaaaaatgtgtagtttaaaaaataaatactgttttttgaactctttcagatgaatgactacagttaatattttgggaaaaaaacatgtttaaaaagaatatgaaactttaaattatgtgattttcctttgtgataaaaatgttagaatattaaagaccttttatgtcaattttttacctatttgagtctataattgaatattgccatactgagtatacctagttatataattacactcccttttaatgtatagataagaatgaaacatgggctgggagcagtggctcacacctgtaatcccaacactttgggaggccgaggtgggttgatcacctaaggtcagtagtttgagaccagcctggccaacatggtgaaaaccccatctctactaaaaatacaaaaattagtcaggtgcagtggtgcacacttgattgaaatcccagctactcaggaggctgaggcaggagaattgcctgaacccgggaggcggacattgcagtgaggcgagtttgtgccactacatgccagggtgacaaagcaagacactgtctt

SEQ ID NO: 64400 - DNA, 344 bp, Homo sapiens
gtctgacattttatattatccctactttttgttactttattacattagactgtattgtaactgatcttttcccatgatccattgcagttcaatttcatattgcccatttgtatgaaacccaggtaagtgttttaacttaagaacaagaatgaaacagtcacctatgctttagatgaaatgaaatgtacttgaaaatatcaggctttaaatgaaataaatatattagacgatttgagttgtgggtattatactcttgcatgtattttgtattctactcctcattaaatgtgtttgaaatttttagtgaacaaattgttaaagacaaatgaaggcatttgagattt

SEQ ID NO: 64401 - DNA, 6540 bp, Homo sapiens
tttgctcatcgtttgttgtttagataatatcatgaactgataaatgcagttgccacgttgattccctagggcctggcttaccgactgaggtcataagatattatgccttctctttagacttggtcagtggagaggaaatgggcaaagaaccagcctatggaggtgacaaggccttagggccaaaagtcttgagggtgaaggtttagggcctgcgcagcttccctgccatgccccgcaaggtctcgcattcgcaaggcttgtgacagtgggagcctcattacggactctcctaaagtccatggtgtcctcttttcgcatttgcgccccgtgggtgatgcccgatgccgcccttcccatcgctctcttccccttcaagcgtatcgcaactgcaaaaacacccagcacagacactccattttctatcttaatgcatttaactagcacaacctacaggttgttccatcccagagactacccttttctccatagacgtgaccatcaaccaaccagcggtcagaatcagtcagcctctgtcatgttcctaggtccttggcgaactggctgggcggggtcccagcagcctaggagtacagtggagcaatgcctgacgtaagtcaacaaagatcacgtgagacgaatcagtcgcctagattggctacaactaagtggttgggagcggggaggtcgcggcggctgcgtggggttcgcccgtgacacaattacaactttgtgctggtgctggcaaagtttgtgattttaagaaattctgctgtgctctccagcactgcgagcttctgccttccctgtagtttcccagatgtgatccaggtagccgagttccgctgcccgtgcttcggtagcttaagtctttgcctcagcttttttccttgcagccgctgaggaggcgataaaattggcgtcacagtctcaagcagcgattgaaggcgtcttttcaactactcgattaaggttgggtatcgtcgtgggacttggaaatttgttgtttccatgaaatcctgcgcagtgtcgctcactaccgccgctgttgccttcggtgatgaggcaaagaaaatggcggaaggaaaagcgagccgcgagagtgaagaggagtctgttagcctgacagtcgaggaaagggaggcgcttggtggcatggacagccgtctcttcgggttcgtgaggcttcatgaagatggcgccagaacgaagaccctactaggcaaggctgttcgctgctacgaatctttaatcttaaaagctgaaggaaaagtggagtctgacttcttttgccaattaggtcacttcaacctcttgttggaagattattcaaaagcattatctgcatatcagagatattacagtttacaggctgactactggaagaatgctgcgtttttatatggccttggtttggtctacttctactacaatgcatttcattgggcaattaaagcatttcaagatgtcctttatgttgaccccagcttttgtcgagccaaggaaattcatttacgacttgggctcatgttcaaagtgaacacagactacaagtctagtttaaagcattttcagttagccttgattgactgtaatccatgtactttgtccaatgctgaaattcaatttcatattgcccatttgtatgaaacccagaggaagtatcattctgcaaaggaggcatatgaacaacttttgcagacagaaaaccttcctgcacaagtaaaagcaactgtattgcaacagttaggttggatgcatcataatatggatctagtaggagacaaagccacaaaggaaagctatgctattcagtatctccaaaagtctttggaggcagatcctaattctggccaatcgtggtattttcttggaaggtgttattcaagtattgggaaagttcaggatgcctttatatcttacaggcaatctattgataaatcagaagcaagtgcagatacatggtgttcaataggtgtgttgtatcagcagcaaaatcagcctatggatgctttacaggcatatatttgtgctgtacaattggaccatgggcatgccgcagcctggatggacctaggtactctctatgaatcctgcaatcaacctcaagatgccattaaatgctacctaaatgcagctagaagcaaacgttgtagtaatacctctacgcttgctgcaagaattaaatttctacagaatggttctgataactggaatggtggccagagtctttcacatcatccagtacagcaagtttattcgttgtgtttgacaccacagaaattacagcacttggaacaactgcgagcaaatagagataatttaaatccagcacagaagcatcagctggaacagttagaaagtcagtttgtcttaatgcagcaaatgagacacaaagaagttgctcaggtacgaactactggaattcataacggggccataactgattcatcactgcctacaaactctgtctctaatcgacaaccacatggtgctctgaccagagtatctagcgtctctcagcctggagttcgccctgcttgtgttgaaaaacttttgtccagtggagctttttctgcaggctgtattccttgtggcacatcaaaaattctaggaagtacagacactatcttgctaggcagtaattgtatagcaggaagtgaaagtaatggaaatgtgccttacctgcagcaaaatacacacactctacctcataatcatacagacctgaacagcagcacagaagagccatggagaaaacagctatctaactccgctcaggggcttcataaaagtcagagttcatgtttgtcaggacctaatgaagaacaacctctgttttccactgggtcagcccagtatcaccaggcaactagcactggtattaagaaggcgaatgaacatctcactctgcctagtaattcagtaccacagggggatgctgacagtcacctctcctgtcatactgctacctcaggtggacaacaaggcattatgtttaccaaagagagcaagccttcaaaaaatagatccttggtgcctgaaacaagcaggcatactggagacacatctaatggctgtgctgatgtcaagggactttctaatcatgttcatcagttgatagcagatgctgtttccagtcctaaccatggagattcaccaaatttattaattgcagacaatcctcagctctctgctttgttgattggaaaagccaatggcaatgtgggtactggaacctgcgacaaagtgaataatattcacccagctgttcatacaaagactgatcattctgttgcctcttcaccctcttcagccatttccacagcaacaccttctcctaaatccactgagcagagaagcataaacagtgttaccagccttaacagtcctcacagtggattacacacagtcaatggagaggggctggggaagtcacagagctctacaaaagtagacctgcctttagctagccacagatctacttctcagatcttaccatcaatgtcagtgtctatatgccccagttcaacagaagttctgaaagcatgcaggaatccaggtaaaaatggcttgtctaatagctgcattttgttagataaatgtccacctccaagaccaccaacttcaccatacccacccttgccaaaggacaagttgaatccacccacacctagtatttacttggaaaataaacgtgatgctttctttcctccattacatcaattttgtacaaatccaaaaaaccctgttacagtaatacgtggccttgctggagctcttaaattagatcttggacttttctctaccaaaactttggtagaagctaacaatgaacatatggtagaagtgaggacacagttgctgcaaccagcagatgaaaactgggatcccactggaacaaagaaaatctggcgttgtgaaagcaatagatctcatactacaattgccaaatacgcacaataccaggcttcctccttccaggaatcattgagagaagaaaatgagaaaagaacacaacacaaagatcattcagataacgaatccacatcttcagagaattctggaaggagaaggaaaggaccttttaaaaccataaaatttgggaccaacattgacctctctgataacaaaaagtggaagttgcagttacatgaactgactaaacttcctgcttttgcgcgtgtggtgtcagcaggaaatcttctaacccatgttgggcataccattctgggcatgaatacagtacaactgtatatgaaagttccagggagtcggacaccaggtcaccaagaaaataacaacttctgctctgttaacataaatattggtccaggagattgtgaatggtttgttgtacctgaagattattggggtgttctgaatgacttctgtgaaaaaaataatttgaattttttaatgagttcttggtggcccaaccttgaagatctttatgaagcaaatgtccctgtgtatagatttattcagcgacctggagatttggtctggataaatgcaggcactgtgcattgggttcaagctgttggctggtgcaataacattgcctggaatgttggtccacttacagcctgccagtataaattggcagtggaacggtatgaatggaacaaattgaaaagtgtgaagtcaccagtacccatggtgcatctttcctggaatatggcacgaaatatcaaagtctcagatccaaagctttttgaaatgattaagtattgtcttttgaaaattctgaagcaatatcagacattgagagaagctcttgttgcagcaggaaaagaggttatatggcatgggcggacaaatgatgaaccagctcattactgtagcatttgtgaggtggaggtttttaatctgctttttgtcactaatgaaagcaatactcaaaaaacctacatagtacattgccatgattgtgcacgaaaaacaagcaaaagtttggaaaattttgtggtgctcgaacagtacaaaatggaggacctaatccaagtttatgatcaatttacactagctctttcattatcatcctcatcttgatatagttccatgaatattaaatgagattatttctgctcttcaggaaatttctgcaccactggttttgtagctgtttcataaaactgttgactaaaagctatgtctatgcaaccttccaagaatagtatgtcaagcaactggacacagtgctgcctctgcttcaggacttaacatgctgatccagctgtacttcagaaaaataatattaatcatatgttttgtgtacgtatgacaaactgtcaaagtgacacagaatactgatttgaagatagccttttttatgtttctctatttctgggctgatgaattaatattcatttgtattttaaccctgcagaattttccttagttaaaaacactttcctagctggtcatttcttcataagatagcaaatttaaatctctcctcgatcagcttttaaaaaatgtgtactattatctgaggaagttttttactgctttatgtttttgtgtgttttgaggccatgatgattacatttgtggttccaaaataatttttttaaatattaatagcccatatacaaagataatggattgcacatagacaaagaaataaacttcagatttgtgatttttgtttctaaacttgatacagatttacactatttataaatacgtatttattgcctgaaaatatttgtgaatggaatgttgtttttttccagacgtaactgccattaaatactaaggagttctgtagttttaaacactactcctattacattttatatgtgtagataaaactgcttagtattatacagaaatttttattaaaattgttaaatgtttaaagggtttcccaatgtttgagtttaaaaaagactttctgaaaaaatccactttttgttcattttcaaacctaatgattatatgtattttatatgtgtgtgtatgtgtacacacatgtataatatatacagaaacctcgatatataattgtatagattttaaaagttttattttttacatctatggtagtttttgaggtgcctattataaagtattacggaagtttgctgtttttaaagtaaatgtcttttagtgtgatttattaagttgtagtcaccatagtgatagcccataaataattgctggaaaattgtattttataacagtagaaaacatatagtcagtgaagtaaatattttaaaggaaacattatatagatttgataaatgttgtttataattaagagtttcttatggaaaagagattcagaatgataacctcttttagagaacaaataagtgacttatttttttaaagctagatgactttgaaatgctatactgtcctgcttgtacaacatggtttggggtgaaggggaggaaagtattaaaaaatctatatcgctagtaaattgtaataagttctattaaaacttgtatttcatatgaaaaatttgctaatttaatattaactcatttgataataatacttgtcttttctacctctctttctgaagca

SEQ ID NO: 64402 - DNA, 1167 bp, Homo sapiens
tttgctcatcgtttgttgtttagataatatcatgaactgataaatgcagttgccacgttgattccctagggcctggcttaccgactgaggtcataagatattatgccttctctttagacttggtcagtggagaggaaatgggcaaagaaccagcctatggaggtgacaaggccttagggccaaaagtcttgagggtgaaggtttagggcctgcgcagcttccctgccatgccccgcaaggtctcgcattcgcaaggcttgtgacagtgggagcctcattacggactctcctaaagtccatggtgtcctcttttcgcatttgcgccccgtgggtgatgcccgatgccgcccttcccatcgctctcttccccttcaagcgtatcgcaactgcaaaaacacccagcacagacactccattttctatcttaatgcatttaactagcacaacctacaggttgttccatcccagagactacccttttctccatagacgtgaccatcaaccaaccagcggtcagaatcagtcagcctctgtcatgttcctaggtccttggcgaactggctgggcggggtcccagcagcctaggagtacagtggagcaatgcctgacgtaagtcaacaaagatcacgtgagacgaatcagtcgcctagattggctacaactaagtggttgggagcggggaggtcgcggcggctgcgtggggttcgcccgtgacacaattacaactttgtgctggtgctggcaaagtttgtgattttaagaaattctgctgtgctctccagcactgcgagcttctgccttccctgtagtttcccagatgtgatccaggtagccgagttccgctgcccgtgcttcggtagcttaagtctttgcctcagcttttttccttgcagccgctgaggaggcgataaaattggcgtcacagtctcaagcagcgattgaaggcgtcttttcaactactcgattaaggttgggtatcgtcgtgggagcaaagaaaatggcggaaggaaaagcgagccgcgagagtgaagaggagtctgttagcctgacagtcgaggaaagggaggcgcttggtggcatggacaggtacgcacctccatcacccgcctggttggctggcgatactctccgggaaggcctggacgcagacgcgcctatggttgatga

SEQ ID NO: 64403 - DNA, 592 bp, Homo sapiens
ttaaggttgggtatcgtcgtgggacttggaaatttgttgtttccatgaaatcctgcgcagtgtcgctcactaccgccgctgttgccttcggtgatgaggcaaagaaaatggcggaaggaaaagcgagccgcgagagtgaagaggagtctgttagcctgacagtcgaggaaagggaggcgcttggtggcatggacaggtacgcacctccatcacccgcctggttggctggcgatactctccgggaaggcctggacgcagacgcgcctatggttgatgacggggtcatcctcagcttggcactcaccaatctgtcgctgtcgctcttggactcgggaaggagcaagtcactggctttctcagaccattaacaagctctgtgtctctctctctacagccgtctcttcgggttcgtgaggcttcatgaagatggcgccagaacgaagaccctactaggcaaggtaaaagcaaccagacgcaaagtctttggtccgcactttgctctaccaaggccccgcgttccttaccgcccagccagtatttattttggctctgctccatggccaaggggtcggaaaagtgtttcttgcctttg

SEQ ID NO: 64404 - DNA, 1386 bp, Homo sapiens
ggcacgagggaagagaggctcagagggctgaagtgcctatttggccgaaagccgtggcagagtggcaaggcagggccaggggaagcggctccgccgccggggccgggcccctgtttggcccggtgcccggtccttagcctgaaggtggcgggcttccgccagaagcccctggcggaagcggtgcccgcgtgcgggccagagtgtgggtgtgcaggtctctgggcggcccaaagggggtgcccctgcctggtaacctagcgggagggtggggacggcggggagggcggcgggcgcggggcacggctccgctgctcagggcaggctccgcccccaggggcgcggatttaaaaggatcgaaggcagccccggagcccagcggccgggaagcgcgcccgaacgaagccgcggcccgggcacagccatggcccggcgggcggggggcgctcggatgttcggcagcctcctgctcttcgccctgctcgctgccggcgtcgccccgctcagctgggatctcccggagccccgcagccgagccagcaagatccgagtgcactcgcgaggcaacctctgggccaccggtcacttcatgggcaagaagagtctggagccttccagcccatccccattggggacagctccccacacctccctgagggaccagcgactgcagctgagtcatgatctgctcggaatcctcctgctaaagaaggctctgggcgtgagcctcagccgccccgcaccccaaatccagtacaggaggctgctggtacaaatactgcagaaatgacaccaataatggggcagacacaacagcgtggcttagattgtgcccacccagggaaggtgctgaatgggaccctgttgatggccccatctggatgtaaatcctgagctcaaatctctgttactccattactgtgatttctggctgggtcaccagaaatatcgctgatgcagacacagattatgttcctgctgtatttcctgcttccctgttgaattggtgaataaaaccttgctctttacaaaaaagaacaaacaaaaaaaaaaaaaaagcaaaaaaaaagaaaaagaacacaaaccacaaccaaaaacaaaaaaggcgggggcgggacaaaaaacacccggggggccaataaacaggcaccccaggtatgaaaaggcgcgccaaaggagcgcaatcaaaacgagcggcagccgccgcgttacaaaccaccgggcgaggcgacaaacgtgacacacgagcacagaggagaacaccaccacggcggggcgaccacaccggggccccccacaccggatatcaacagccgggaaacacacacgcgacgagatggagaacccgcctataccgcgggaagtccgggtaaatcaacgaccgacgcc

SEQ ID NO: 64405 - DNA, 1027 bp, Homo sapiens
ggcacgagggaagagaggctcagagggctgaagtgcctatttggccgaaagccgtggcagagtggcaaggcagggccaggggaagcggctccgccgccggggccgggcccctgtttggcccggtgcccggtccttagcctgaaggtggcgggcttccgccagaagcccctggcggaagcggtgcccgcgtgcgggccagagtgtgggtgtgcaggtctctgggcggcccaaagggggtgcccctgcctggtaacctagcgggagggtggggacggcggggagggcggcgggcgcggggcacggctccgctgctcagggcaggctccgcccccaggggcgcggatttaaaaggatcgaaggcagccccggagcccagcggccgggaagcgcgcccgaacgaagccgcggcccgggcacagccatggcccggcgggcggggggcgctcggatgttcggcagcctcctgctcttcgccctgctcgctgccggcgtcgccccgctcagctgggatctcccggagccccgcagccgagccagcaagatccgagtgcactcgcgaggcaacctctgggccaccggtcacttcatgggcaagaagagtctggagccttccagcccatccccattggggacagctccccacacctccctgagggaccagcgactgcagctgagtcatgatctgctcggaatcctcctgctaaagaaggctctgggcgtgagcctcagccgccccgcaccccaaatccagtacaggaggctgctggtacaaatactgcagaaatgacaccaataatggggcagacacaacagcgtggcttagattgtgcccacccagggaaggtgctgaatgggaccctgttgatggccccatctggatgtaaatcctgagctcaaatctctgttactccattactgtgatttctggctgggtcaccagaaatatcgctgatgcagacacagattatgttcctgctgtatttcctgcttccctgttgaattggtgaataaaaccttgctctttaca

SEQ ID NO: 64406 - DNA, 596 bp, Homo sapiens
cctcttttctcttcctttttcctttatttatttatttctcttttcttctctttctttcaacaaggtctcactctgtctcccaggctggagtacagtggtgcattcatagctcactgcaaccttggactcctgggctcaagtgattccccaatctcagccacctgagtagctgggactataggtgttagccaccacacctggctatttttattttatttctgtagagacaaggtcttactatgttgccaaggctggtcttgaattcccaatgttctcttttagtagtttcatagtttcaggtgtcagatttaagtctttaagccactttgatttgatttttttatatggtgagagataggggtctagttcattattctgcatatagacatctagttttcccagcaccatttattgaaaagactgttctttccccaatgtatgttcttggcagctttgtcaaaaatgagttcattgcagatgtgtggattcatttctgaattctctactgttacattggtctatgtgtctgtttttataccagtaccatgctgtttcgggtctctagttctacaataaacttcaaagtcaggcaatgt

SEQ ID NO: 64407 - DNA, 546 bp, Homo sapiens
ccgatatttaaagatagataaacaggaaactgagggagagaggattgggaacctgggggcagaggaattgaatcctggcagaggagaatttggaggaaaaatatgttttaggaaccttattctttgccctccccaaacagaaaaaggttttttttttctttgaaattttatttcaaagacctttggatatttttaagtatccatcaaaatgttatgagatcatgaatttcatggacctcaacacaccaaatatattgagcactattaaaagtgcacagtggaaaataaaagatacccacaatttcctttttgccaaatatattttggtttcccccgattaaaaaaaaaattcaacttgagcctcatgattatctgaatactcagcctttctatatatttctatgttatctttctaccctattctattattctgtaatatatcagctgcagttcagtcaaccaaatcacccattgttttccttctggctgttgtcctcagagtttcccatccttccttgtttaggaggcccaaggctatgcctctcg

SEQ ID NO: 64408 - DNA, 525 bp, Homo sapiens
tgccaagctttccctctaggatttcctttgtggcctccattagctaacaattctccgttttagccgcttcttggctcttgcaggttgcagttttctagattttgctttgtcattctttctcttgcccctttcattgtccagaaatctgttgaaaaaattatatccactgataattacatcccatactcttcattttttaaactttttatctttattatttattattgtagtatggtgtctctgaaagattggagaagaatgtttataatcttaaaccagaagccttgggtatcacagcataataattaaggttttatattgtttatgattatttgagccaaaggctttctaccatttatcaaaacaaagtatttttgtaaacttcaatatacattaatttttttcagaaatgcaacacaaatatgaaaacaaataaatattatacttcattttttcctgaactttaccaagggttgttcaccatttcaaaataacatttacctcttgagttaccagataacaacc

SEQ ID NO: 64409 - DNA, 346 bp, Homo sapiens
ggaaagatgcacaagaaactaataaagtacttttactaatttggcagggttggaggggtgaggaaaattgggaactgagcagatggggaattaaggggaggacactactcgctgtgtatctccttctatatcttttgaattttgaaccttgtaaatgtattgcctattcacacatttaaaaaaacgaaacaaagtgttctacccagtgggcatccctctctcagccatgcaccgtgacggcagagtacaagttacaagtcatgcctgagtctgggaggtccacggttgggaatccatcactggcttttgtgagcaaggcaggtcacgcggatacaaagcatctttc

SEQ ID NO: 64410 - DNA, 657 bp, Homo sapiens
gctgccatttctttccttatactctcccttcttttcagatgtcttttttattcattgatagaattcattatttatttaatgtttttgagaatgtagtcagccaagtttcttctacctctttggtttgtttgtttgtttgtttgttcgtttgtttgtttgttttttagtcggagccttgctctgtcgcccaggctggagtgcagtggtgcaatcttggctcactgcaacctccgcttcccaggttcgagccattctcctgcctcagcctcccgagtagctgggattacaggcatgtgtcaccatgcctggcttatttttgtatttttagtagagacggggtttcaccatgttgaccaggctggtctcgaactcctgacctcaggtgatccgcccacctcggcctcccaaagtgctggaattacaagcatgagccactgcacccagtctgttgtttctttttatgatacagtatcttgtcattggttccattttatttactaaataaatggaaaattctgtttactgaagtgtctttcctttataactgataccctgcagaacccctaagttttattttgctttcataaggttgctcttttttaaatttttaatgaaagagtaaggactcaagtaggtcaagtggcgacagttttatgt

SEQ ID NO: 64411 - DNA, 350 bp, Homo sapiens
gctgccatttctttccttatactctcccttcttttcagatgtcttttttattcattgatagaattcattatttatttaatgtttttgagaatgtagtcagccaagtttcttctacctctttggtttgtttgtttgtttgtttgttcgtttgtttgtttgttttttagtcggagccttgctctgtcgcccaggctggagtgcagtggtgcaatcttggctcactgcaacctccgcttcccaggctgaggcagaagaattgcttgaacccgggaggcagaggttgcgatgagccaagattacaccacgcaccccagcttgggcaataagagttaaactctgtctcaaaaaag

SEQ ID NO: 64412 - DNA, 421 bp, Homo sapiens
atacagttttctagtacaagggatcttgatgaagttcatggaaaaatacatattatgagaaaattgtgcatgaatttcacagtttttgcaccaaattaaactggtacaagtctgttataacatgtctgaacaggctgtagttgaaggcactcagaaggataagacataagtttgaaaagagactctatcaaagtaaaataaattctgctaaaattgaaacaaaaagaaacatcaaatttatgatgagatcagatgcagtgtcaccacaccctgctaatttttgtatttttagtagagatgggtttcaccatgttggccaggctggtcttgaactcgtgacctcgtgatccacccgcctcggcctcccgaagtgctgggattacaggcatgagccactgcacctggcccacatcagttttac

SEQ ID NO: 64413 - DNA, 384 bp, Homo sapiens
ggaggccaaggcgggtggatcacttgaggtcagtggttcgagaccagtctggccaacatggcaaaacccctctctataaaaatataaaaaattagcggggcgtggtggcgtgcgcctgtagtcccagctacttgggagagggaggccggagaatcgcttgaacccgagagagggaggttgcagtgagccaagatcgtgccactgcactccagcctgtgtgacggagcaacattctgtctcaaaatcaaaaacacaaacaaacaaacaaaaagtgccttgggaatcacccttttaaaatatcaaacaaaatacctgtatttaatcagcagattattcacctctagaaatacaaatataatttttaaaataagtatttgctatgtt

SEQ ID NO: 64414 - DNA, 730 bp, Homo sapiens
caggcagcctcagcacaagaaaagaacatggtctagactgaagtaccaactaagtcatctcctttcaaattatcaccgacaccatcatggattcaagcaccgcacacagtccggtgtttctggtatttcctccagaaatcactgcttcagaatatgagtccacagaactttcagccacgaccttttcaactcaaagccccttgcaaaaattatttgctagaaaaatgaaaatcttagggactatccagatcctgtttggaattatgaccttttcttttggagttatcttccttttcactttgttaaaaccatatccaaggtttccctttatatttctttcaggatatccattctggggctctgttttgttcattaattctggagccttcctaattgcagtgaaaagaaaaaccacagaaactctgataatattgagccgaataatgaattttcttagtgccctgggagcaatagctggaatcattctcctcacatttggtttcatcctagatcaaaactacatttgtggttattctcaccaaaatagtcagtgtaaggctgttactgtcctgttcttgggaattttgattacattgatgactttcagcattattgaattattcatttctctgcctttctcaattttggggtgccactcagaggattgtgattgtgaacaatgttgttgactagcactgtgagaataaagatgtgttaaaataaaaaaaag

SEQ ID NO: 64415 - DNA, 542 bp, Homo sapiens
caggcagcctcagcacaagaaaagaacatggtctagactgaagtaccaactaagtcatctcctttcaaattatcaccgacaccatcatggattcaagcaccgcacacagtccggtgtttctggtatttcctccagaaatcactgcttcagaatatgagtccacagaactttcagccacgaccttttcaactcaaagccccttgcaaaaattatttgctagaaaaatgaaaatcttaggggatatccattctggggctctgttttgttcattaattctggagccttcctaattgcagtgaaaagaaaaaccacagaaactctgatcaaaactacatttgtggttattctcaccaaaatagtcagtgtaaggctgttactgtcctgttcttgggaattttgattacattgatgactttcagcattattgaattattcatttctctgcctttctcaattttggggtgccactcagaggattgtgattgtgaacaatgttgttgactagcactgtgagaataaagatgtgttaaaataaaaaaaag

SEQ ID NO: 64416 - DNA, 474 bp, Homo sapiens
caggcagcctcagcacaagaaaagaacatggtctagactgaagtaccaactaagtcatctcctttcaaattatcaccgacaccatcatggattcaagcaccgcacacagtccggtgtttctggtatttcctccagaaatcactgcttcagaatatgagtccacagaactttcagccacgaccttttcaactcaaagccccttgcaaaaattatttgctagaaaaatgaaaatcttaggggatatccattctggggctctgttttgttcattaattctggagccttcctaattgcagtgaaaagaaaaaccacagaaactctgggaattttgattacattgatgactttcagcattattgaattattcatttctctgcctttctcaattttggggtgccactcagaggattgtgattgtgaacaatgttgttgactagcactgtgagaataaagatgtgttaaaataaaaaaaag

SEQ ID NO: 64417 - DNA, 627 bp, Homo sapiens
caggcagcctcagcacaagaaaagaacatggtctagactgaagtaccaactaagtcatctcctttcaaattatcaccgacaccatcatggattcaagcaccgcacacagtccggtgtttctggtatttcctccagaaatcactgcttcagaatatgagtccacagaactttcagccacgaccttttcaactcaaagccccttgcaaaaattatttgctagaaaaatgaaaatcttaggggatatccattctggggctctgttttgttcattaattctggagccttcctaattgcagtgaaaagaaaaaccacagaaactctgataatattgagccgaataatgaattttcttagtgccctgggagcaatagctggaatcattctcctcacatttggtttcatcctagatcaaaactacatttgtggttattctcaccaaaatagtcagtgtaaggctgttactgtcctgttcttgggaattttgattacattgatgactttcagcattattgaattattcatttctctgcctttctcaattttggggtgccactcagaggattgtgattgtgaacaatgttgttgactagcactgtgagaataaagatgtgttaaaataaaaaaaag

SEQ ID NO: 64418 - DNA, 577 bp, Homo sapiens
caggcagcctcagcacaagaaaagaacatggtctagactgaagtaccaactaagtcatctcctttcaaattatcaccgacaccatcatggattcaagcaccgcacacagtccggtgtttctggtatttcctccagaaatcactgcttcagaatatgagtccacagaactttcagccacgaccttttcaactcaaagccccttgcaaaaattatttgctagaaaaatgaaaatcttagggactatccagatcctgtttggaattatgaccttttcttttggagttatcttccttttcactttgttaaaaccatatccaaggtttccctttatatttctttcaggatatccattctggggctctgttttgttcattaattctggagccttcctaattgcagtgaaaagaaaaaccacagaaactctgggaattttgattacattgatgactttcagcattattgaattattcatttctctgcctttctcaattttggggtgccactcagaggattgtgattgtgaacaatgttgttgactagcactgtgagaataaagatgtgttaaaataaaaaaaag

SEQ ID NO: 64419 - DNA, 452 bp, Homo sapiens
gcactggcctcccggcggccttttgaggcctaagagctccaagccctgcccttcgtgccctctgcactagacgcgtggccacagccgacagtggatacctcatggcgactcagagtcctctctttaacctctcagctaccttcttctcatgacgttttctcggtaaaataagtggtgtggctcccctctcctgaccgggctgtgtcccaggacagagccggctggaaacgccccgcttgactggagagcactgcccgggctgctgcaggtgcccctttcacaggagctggagcgcgcctcaatgcagagatggtgtggctgggagggacttccctttcccagtcctccacttacatcacagggcacaagagccattggaaaagcatttagagaaatcatagcgaaaattttccagatgtggcaaaagacatacagctgcagatttaaaaagt

SEQ ID NO: 64420 - DNA, 379 bp, Homo sapiens
  misc_feature (379)..(379): n is a, c, g, or t
gacttaaaacatgttacatatttgagagtttctggaagaaaggaatcccttaaacatggctgtggcaaacacttcagaatgagttcacaccactatgactacaagaaatatgggaaggggctcagacacatgattgggggcttcagcctacatcagagaattcatagtggactgaaagggaacaaaaaggacgtgtgtggaaaagacttcagccttagctctcatcaccaacgtgggcagagtcttcacacagtgggagtgtcatttaagtgcagtgactgtggaaggactttcagtcatagctcccatcttgcgtatcatcagagacttcacactcaagagaaagcatttaaatgtagggtgtgcgggaaagccttcn

SEQ ID NO: 64421 - DNA, 945 bp, Homo sapiens
cttttataaaaccattagctcttctgagacatactcactatggacaagaacagcatgggaaaacccacccccattattcaattacctcccatcaggtccctcccatgacaggtggggattatgggagctataattcaagatgagatttgggtggggacagagccaaaccatatcaccacctaagttctctgtaaaaatagtttcagccaggcatgctggctcacgcctgtaatcccagcatgttggaaggccgaggcaagaggatcgcttgagctccggagttcaagaccagtctgggcaacatgacaagaccctgtctccacagaaaattaacattagccaggtgtggtggtgcgcatctgtagtcccagctactggggaggctgagatgagaaaatcgtttgaacccaggaggtcaaagctgcagggagccatgatggtgccactgcattctggtgtgggtgacagagcaagactctgtctccaaaaaaaaaaaaaaaaaaaaaaaaaaaaaaaaaaaaaaaatagttcagaaatctaagacagcactttttttagttactaagccttttattcagatagcacactaaattggggtcaaaaatctgctatagtaaagttctgtatttgtgtgtattgggtataaaaataagcgctttaattaatttgaaaatccctattcaccaaaagtttatactgtaataggggacaaaacaagtgcataaagctaaatttagccagtacatttataactgtttcattcagttgatcagagaagcatcacgattgctggaaaatatcggacctggattcaaggtttggcattgctgttttcaaagtatgtaatcttttagatcaggggtcagtgaactacagtacagagaccaaatctaccctgccacctgtttttgtgaataaagttttattgaaacagaaaaaaaagta

SEQ ID NO: 64422 - DNA, 434 bp, Homo sapiens
gtattattatctcagttttacagaaaaggtaactgaggtttacagagattaatttgtcccactagaccatagattccattaagggtaggaccctgtctaccttgttcattgctgtggcctcagtgcttagcaaagactggaatattgaaaaggctccataaataactactgaataaacacccaagaaccctggcagagccgggatataagcccaggtatatctagctccagtcacccacaccaccatatcagtcagctcccattctatggaaggaatgtaaatggaaggaagaaaataagcaatgaattacgctcataaatccaagattagaaaaaaaaaaagaaagccttaaacaataccactaaatatgaaggcatgatgtatagagttaaaatttgaaatattctaagaaagcatctccttcttaactaaa

SEQ ID NO: 64423 - DNA, 574 bp, Homo sapiens
agcggggacttgcagcctccttccccccgagcggagctgcggggccggccgggccggggcggaccccgggaacccggacgcggccgcccgggcccgcgggcggggggatcggcgggggggacccgcggggtgaccggcggcaggagccgccaccatggagttccgccaggaggagtttcggaagctagcgggtcgtgctctcgggaagctgcaccggtgagcctggcgggggtcccgggagaagagtgggaggatctgaggaggatgctaattcccacctgggcgcagactgacagatgaacgggcgataccccggcatgggggtccacccatctgtccagttttctgccgtgggctccgacggcgctgttctccctggtcgagccttgtccattatcctgttcctttttctgcaccccaccccacccggctccactctctctggtgctgtaaatgcctctctcccgggtctctggctcctcccccaccacttctgggtctctgtccccgtctctttctggatgtctctgccccttttctctctgggtctccgtctccctctttttccagatct

SEQ ID NO: 64424 - DNA, 2965 bp, Homo sapiens
agcggggacttgcagcctccttccccccgagcggagctgcggggccggccgggccggggcggaccccgggaacccggacgcggccgcccgggcccgcgggcggggggatcggcgggggggacccgcggggtgaccggcggcaggagccgccaccatggagttccgccaggaggagtttcggaagctagcgggtcgtgctctcgggaagctgcaccgccttctggagaagcggcaggaaggcgcggagacgctggagctgagtgcggatgggcgcccggtgaccacgcagacccgggacccgccggtggtggactgcacctgcttcggcctccctcgccgctacattatcgccatcatgagtggtctgggcttctgcatcagctttggcatccgctgcaacctgggcgtggccatcgtctccatggtcaataacagcacgacccaccgcgggggccacgtggtggtgcagaaagcccagttcagctgggatccagagactgtcggcctcatacacggctcctttttctggggctacattgtcactcagattccaggaggatttatctgtcaaaaatttgcagccaacagagttttcggctttgctattgtggcaacatccactctaaacatgctgatcccctcagctgcccgcgtccactatggctgtgtcatcttcgtgaggatcctgcaggggttggtagagggggtcacataccccgcctgccatgggatctggagcaaatgggccccacccttagaacggagtcgcctggcgacgacagccttttgtggttcctatgctggggcggtggtcgcgatgcccctcgccggggtccttgtgcagtactcaggatggagctctgttttctacgtctacggcagcttcgggatcttctggtacctgttctggctgctcgtctcctacgagtcccccgcgctgcaccccagcatctcggaggaggagcgcaagtacatcgaggacgccatcggagagagcgcgaaactcatgaaccccctcacgaagtttagcactccctggcggcgcttcttcacgtctatgccagtctatgccatcatcgtggccaacttctgccgcagctggacgttctacctgctgctcatctcccagcccgcctacttcgaagaagtgttcggcttcgagatcagcaaggtaggcctggtgtccgcgctgccccacctggtcatgaccatcatcgtgcccatcggcggccagatcgcggacttcctgcggagccgccgcatcatgtccaccaccaacgtgcgcaagttgatgaactgcggaggcttcggcatggaagccacgctgctgttggtggtcggctactcgcactccaagggcgtggccatctccttcctggtcctagccgtgggcttcagcggcttcgccatctctgggttcaacgtgaaccacctggacatagccccgcgctacgccagcatcctcatgggcatctccaacggcgtgggcacactgtcgggcatggtgtgccccatcatcgtgggggccatgactaagcacaagactcgggaggagtggcagtacgtgttcctaattgcctccctggtgcactatggaggtgtcatcttctacggggtctttgcttctggagagaagcagccgtgggcagagcctgaggagatgagcgaggagaagtgtggcttcgttggccatgaccagctggctggcagtgacgacagcgaaatggaggatgaggctgagcccccgggggcaccccctgcacccccgccctcctatggggccacacacagcacatttcagccccccaggcccccaccccctgtccgggactactgaccatgtgcctcccactgaatggcagtttccaggacctccattccactcatctctggcctgagtgacagtgtcaaggaaccctgctcctctctgtcctgcctcaggcctaagaagcactctcccttgttcccagtgctgtcaaatcctctttccttcccaattgcctctcaggggtagtgaagctgcagactgacagtttcaaggatacccaaattcccctaaaggttccctctccacccgttctgcctcagtggtttcaaatctctcctttcagggctttatttgaatggacagttcgacctcttactctctcttgtggttttgaggcacccacaccccccgctttcctttatctccagggactctcaggctaacctttgagatcactcagctcccatctcctttcagaaaaattcaaggtcctcctctagaagtttcaaatctctcccaactctgttctgcatcttccagattggtttaaccaattactcgtccccgccattccagggattgattctcaccagcgtttctgatggaaaatggcggtttcaagtccccgattccgtgcccacttcacatctcccctaccagcagattctgcgaaagcaccaaatttctcaagaccctcttctccctagcttagcataatgtctggggaaacaaccaaaatcgcaattttaacaatatgcctctctacccccgtgcactttttctgacatggttttcaggtctaaatagtggctgctccagtccatgaactcaaaggtttgaagctaccaccattgaactcccccatggtggtttcatgatgccccctccccaattcctcgcactttattctcctgggtggtttcgaactaccctgtttctcagtggccatttgttgtgtccctcaggggcttaatgactcaaaatctgggatccttcccctctcagacacccctctttcagcttagaatttggggaacctatagagaagtcacagaatcccatgaaagggaatggggcaggagacaggggtgttttttcccagtgcagggttgtgtctttgtgtctctgtctctgtgactgtaaatcctgccctgccccactcccaataaaagctttggtgtataggcaaaaaaaaaa

SEQ ID NO: 64425 - DNA, 2867 bp, Homo sapiens
agcggggacttgcagcctccttccccccgagcggagctgcggggccggccgggccggggcggaccccgggaacccggacgcggccgcccgggcccgcgggcggggggatcggcgggggggacccgcggggtgaccggcggcaggagccgccaccatggagttccgccaggaggagtttcggaagctagcgggtcgtgctctcgggaagctgcaccgccttctggagaagcggcaggaaggcgcggagacgctggagctgagtgcggatgggcgcccggtgaccacgcagacccgggacccgccggtggtggactgcacctgcttcggcctccctcgccgctacattatcgccatcatgagtggtctgggcttctgcatcagctttggcatccgctgcaacctgggcgtggccatcgtctccatggtcaataacagcacgacccaccgcgggggccacgtggtggtgcagaaagcccagttcagctgggatccagagactgtcggcctcatacacggctcctttttctggggctacattgtcactcagattccaggaggatttatctgtcaaaaatttgcagccaacagagttttcggctttgctattgtggcaacatccactctaaacatgctgatcccctcagctgcccgcgtccactatggctgtgtcatcttcgtgaggatcctgcaggggttggtagagggggtcacataccccgcctgccatgggatctggagcaaatgggccccacccttagaacggagtcgcctggcgacgacagccttttgtggttcctatgctggggcggtggtcgcgatgcccctcgccggggtccttgtgcagtactcaggatggagctctgttttctacgtctacggcagcttcgggatcttctggtacctgttctggctgctcgtctcctacgagtcccccgcgctgcaccccagcatctcggaggaggagcgcaagtacatcgaggacgccatcggagagagcgcgaaactcatgaaccccctcacgaagtttagcactccctggcggcgcttcttcacgtctatgccagtctatgccatcatcgtggccaacttctgccgcagctggacgttctacctgctgctcatctcccagcccgcctacttcgaagaagtgttcggcttcgagatcagcaaggtaggcctggtgtccgcgctgccccacctggtcatgaccatcatcgtgcccatcggcggccagatcgcggacttcctgcggagccgccgcatcatgtccaccaccaacgtgcgcaagttgatgaactgcggaggcttcggcatggaagccacgctgctgttggtggtcggctactcgcactccaagggcgtggccatctccttcctggtcctagccgtgggcttcagcggcttcgccatctctgggttcaacgtgaaccacctggacatagccccgcgctacgccagcatcctcatgggcatctccaacggcgtgggcacactgtcgggcatggtgtgccccatcatcgtgggggccatgactaagcacaagactcgggaggagtggcagtacgtgttcctaattgcctccctggtgcactatggaggtgtcatcttctacggggtctttgcttctggagagaagcagccgtgggcagagcctgaggagatgagcgaggagaagtgtggcttcgttggccatgaccagctggctggcagtgacgacagcgaaatggaggatgaggctgagcccccgggggcaccccctgcacccccgccctcctatggggccacacacagcacatttcagccccccaggcccccaccccctgtccgggactactgaccatgtgcctcccactgaatggcagtttccaggacctccattccactcatctctggcctgagtgacagtgtcaaggaaccctgctcctctctgtcctgcctcaggcctaagaagcactctcccttgttcccagtgctgtcaaatcctctttccttcccaattgcctctcaggggtagtgaagctgcagactgacagtttcaaggatacccaaattcccctaaaggttccctctccacccgttctgcctcagtggtttcaaatctctcctttcagggctttatttgaatggacagttcgacctcttactctctcttgtggttttgaggcacccacaccccccgctttcctttatctccagggactctcaggctaacctttgagatcactcagctcccatctcctttcagaaaaattcaaggtcctcctctagaagtttcaaatctctcccaactctgttctgcatcttccagattggtttaaccaattactcgtccccgccattccagggattgattctcaccagcgtttctgatggaaaatggcggtttcaagtccccgattccgtgcccacttcacatctcccctaccagcagattctgcgaaagcaccaaatttctcaagaccctcttctccctagcttagcataatgtctggggaaacaaccaaaatcgcaattttaacaatatgcctctctacccccgtgcactttttctgacatggttttcaggtctaaatagtggctgctccagtccatgaactcaaaggtttgaagctaccaccattgaactcccccatggtggtttcatgatgccccctccccaattcctcgcactttattctcctgggtggtttcgaactaccctgtttctcagtggccatttgttgtgtccctcaggggcttaatgactcaaaatctgggatccttcccctctcagacacccctctttcagcttagaatttggggaacctatagagaagtcacagaatcccactcccaataaaagctttggtgtataggcaaaaaaaaaa

SEQ ID NO: 64426 - DNA, 1117 bp, Homo sapiens
  misc_feature (23)..(23): n is a, c, g, or t
  misc_feature (29)..(29): n is a, c, g, or t
gttttttttttatatgggtcggngaaganagcagatcatctctggcctgagtgacagtgtcaaggaaccctgctcctctctgtcctgcctcaggcctaagaagcactctcccttgttcccagtgctgtcaaatcctctttccttcccaattgcctctcaggggtagtgaagctgcagactgacagtttcaaggatacccaaattcccctaaaggttccctctccacccgttctgcctcagtggtttcaaatctctcctttcagggctttatttgaatggacagttcgacctcttactctctcttgtggttttgaggcacccacaccccccgctttcctttatctccagggactctcaggctaacctttgagatcactcagctcccatctcctttcagaaaaattcaaggtcctcctctagaagtttcaaatctctcccaactctgttctgcatcttccagattggtttaaccaattactcgtccccgccattccagggattgattctcaccagcgtttctgatggaaaatggcggtttcaagtccccgattccgtgcccacttcacatctcccctaccagcagattctgcgaaagcaccaaatttctcaagaccctcttctccctagcttagcataatgtctggggaaacaaccaaaatcgcaattttaacaatatgcctctctacccccgtgcactttttctgacatggttttcaggtctaaatagtggctgctccagtccatgaactcaaaggtttgaagctaccaccattgaactcccccatggtggtttcatgatgccccctccccaattcctcgcactttattctcctgggtggtttcgaactaccctgtttctcagtggccatttgttgtgtccctcaggggcttaatgactcaaaatctgggatccttcccctctcagacacccctctttcagcttagaatttggggaacctatagagaagtcacagaatcccatgaaagggaatggggcaggagacaggggtgttttttcccagtgcagggttgtgtctttgtgtctctgtctctgtgactgtaaatcctgccctgccccactcccaataaaagctttggtgtataggcaaaaaaaaaa

SEQ ID NO: 64427 - DNA, 1178 bp, Homo sapiens
  misc_feature (4)..(6): n is a, c, g, or t
  misc_feature (8)..(8): n is a, c, g, or t
  misc_feature (27)..(27): n is a, c, g, or t
  misc_feature (33)..(33): n is a, c, g, or t
  misc_feature (160)..(160): n is a, c, g, or t
  misc_feature (162)..(162): n is a, c, g, or t
gggnnnanggccctcaactagaagttncaaatntctcccaactctgttctgcatcttccagattggtttaaccaattactcgtccccgccattccagggattgattctcaccagcgtttctgatggaaaatgggggtttcaagtccccgattccgtgccnanttcactctcccttgttcccagtgctgtcaaatcctctttccttcccaattgcctctcaggggtagtgaagctgcagactgacagtttcaaggatacccaaattcccctaaaggttccctctccacccgttctgcctcagtggtttcaaatctctcctttcagggctttatttgaatggacagttcgacctcttactctctcttgtggttttgaggcacccacaccccccgctttcctttatctccagggactctcaggctaacctttgagatcactcagctcccatctcctttcagaaaaattcaaggtcctcctctagaagtttcaaatctctcccaactctgttctgcatcttccagattggtttaaccaattactcgtccccgccattccagggattgattctcaccagcgtttctgatggaaaatggcggtttcaagtccccgattccgtgcccacttcacatctcccctaccagcagattctgcgaaagcaccaaatttctcaagaccctcttctccctagcttagcataatgtctggggaaacaaccaaaatcgcaattttaacaatatgcctctctacccccgtgcactttttctgacatggttttcaggtctaaatagtggctgctccagtccatgaactcaaaggtttgaagctaccaccattgaactcccccatggtggtttcatgatgccccctccccaattcctcgcactttattctcctgggtggtttcgaactaccctgtttctcagtggccatttgttgtgtccctcaggggcttaatgactcaaaatctgggatccttcccctctcagacacccctctttcagcttagaatttggggaacctatagagaagtcacagaatcccatgaaagggaatggggcaggagacaggggtgttttttcccagtgcagggttgtgtctttgtgtctctgtctctgtgactgtaaatcctgccctgccccactcccaataaaagctttggtgtataggcaaaaaaaaaa

SEQ ID NO: 64428 - DNA, 889 bp, Homo sapiens
tcgctctggaggctccccagatttccggcagtctaggctttatttgaatggacagttcgacctcttactctctcttgtggttttgaggcacccacaccccccgctttcctttatctccagggactctcaggctaacctttgagatcactcagctcccatctcctttcagaaaaattcaaggtcctcctctagaagtttcaaatctctcccaactctgttctgcatcttccagattggtttaaccaattactcgtccccgccattccagggattgattctcaccagcgtttctgatggaaaatggcggtttcaagtccccgattccgtgcccacttcacatctcccctaccagcagattctgcgaaagcaccaaatttctcaagaccctcttctccctagcttagcataatgtctggggaaacaaccaaaatcgcaattttaacaatatgcctctctacccccgtgcactttttctgacatggttttcaggtctaaatagtggctgctccagtccatgaactcaaaggtttgaagctaccaccattgaactcccccatggtggtttcatgatgccccctccccaattcctcgcactttattctcctgggtggtttcgaactaccctgtttctcagtggccatttgttgtgtccctcaggggcttaatgactcaaaatctgggatccttcccctctcagacacccctctttcagcttagaatttggggaacctatagagaagtcacagaatcccatgaaagggaatggggcaggagacaggggtgttttttcccagtgcagggttgtgtctttgtgtctctgtctctgtgactgtaaatcctgccctgccccactcccaataaaagctttggtgtataggcaaaaaaaaaa

SEQ ID NO: 64429 - DNA, 758 bp, Homo sapiens
agtataaagcttcgttgaaggctatctttaaaggagtacaaagtcttaaggagtggggtacacgaagaaaaagaggaggagaaggatgtacctcagttgaatgagtccagaggaaggctggatggttgacctttggctgggtgcgcagatggacgtgattctagtaatttggggcagtaataaccatgaagctgatttattgcaggtacctcatctgagagtgatggttattactgcaccaaatttctcaagaccctcttctccctagcttagcataatgtctggggaaacaaccaaaatcgcaattttaacaatatgcctctctacccccgtgcactttttctgacatggttttcaggtctaaatagtggctgctccagtccatgaactcaaaggtttgaagctaccaccattgaactcccccatggtggtttcatgatgccccctccccaattcctcgcactttattctcctgggtggtttcgaactaccctgtttctcagtggccatttgttgtgtccctcaggggcttaatgactcaaaatctgggatccttcccctctcagacacccctctttcagcttagaatttggggaacctatagagaagtcacagaatcccatgaaagggaatggggcaggagacaggggtgttttttcccagtgcagggttgtgtctttgtgtctctgtctctgtgactgtaaatcctgccctgccccactcccaataaaagctttggtgtataggcaaaaaaaaaa

SEQ ID NO: 64430 - DNA, 2127 bp, Homo sapiens
agcggggacttgcagcctccttccccccgagcggagctgcggggccggccgggccggggcggaccccgggaacccggacgcggccgcccgggcccgcgggcggggggatcggcgggggggacccgcggggtgaccggcggcaggagccgccaccatggagttccgccaggaggagtttcggaagctagcgggtcgtgctctcgggaagctgcaccgccttctggagaagcggcaggaaggcgcggagacgctggagctgagtgcggatgggcgcccggtgaccacgcagacccgggacccgccggtggtggactgcacctgcttcggcctccctcgccgctacattatcgccatcatgagtggtctgggcttctgcatcagctttggcatccgctgcaacctgggcgtggccatcgtctccatggtcaataacagcacgacccaccgcgggggccacgtggtggtgcagaaagcccagttcagctgggatccagagactgtcggcctcatacacggctcctttttctggggctacattgtcactcagattccaggaggatttatctgtcaaaaatttgcagccaacagagttttcggctttgctattgtggcaacatccactctaaacatgctgatcccctcagctgcccgcgtccactatggctgtgtcatcttcgtgaggatcctgcaggggttggtagagggggtcacataccccgcctgccatgggatctggagcaaatgggccccacccttagaacggagtcgcctggcgacgacagccttttgtggttcctatgctggggcggtggtcgcgatgcccctcgccggggtccttgtgcagtactcaggatggagctctgttttctacgtctacggcagcttcgggatcttctggtacctgttctggctgctcgtctcctacgagtcccccgcgctgcaccccagcatctcggaggaggagcgcaagtacatcgaggacgccatcggagagagcgcgaaactcatgaaccccctcacgaagtttagcactccctggcggcgcttcttcacgtctatgccagtctatgccatcatcgtggccaacttctgccgcagctggacgttctacctgctgctcatctcccagcccgcctacttcgaagaagtgttcggcttcgagatcagcaaggtaggcctggtgtccgcgctgccccacctggtcatgaccatcatcgtgcccatcggcggccagatcgcggacttcctgcggagccgccgcatcatgtccaccaccaacgtgcgcaagttgatgaactgcggaggcttcggcatggaagccacgctgctgttggtggtcggctactcgcactccaagggcgtggccatctccttcctggtcctagccgtgggcttcagcggcttcgccatctctgggttcaacgtgaaccacctggacatagccccgcgctacgccagcatcctcatgggcatctccaacggcgtgggcacactgtcgggcatggtgtgccccatcatcgtgggggccatgactaagcacaagactcgggaggagtggcagtacgtgttcctaattgcctccctggtgcactatggaggtgtcatcttctacggggtctttgcttctggagagaagcagccgtgggcagagcctgaggagatgagcgaggagaagtgtggcttcgttggccatgaccagctggctggcagtgacgacagcgaaatggaggatgaggctgagcccccgggggcaccccctgcacccccgccctcctatggggccacacacagcacatttcagccccccaggcccccaccccctgtccgggactactgaccatgtgcctcccactgaatggcagtttccaggacctccattccactcatctctggcctgagtgacagtgtcaaggaaccctgctcctctctgtcctgcctcaggcctaagaagcactctcccttgttcccagtgctgtcaaatcctctttccttcccaattgcctctcaggggtagtgaagctgcagactgacagtttcaaggatacccaaattcccctaaaggttccctctccacccgttctgcctgtgggtaaaggtgtagttaatgcataattctttagcttcctt

SEQ ID NO: 64431 - DNA, 448 bp, Homo sapiens
gatgaatggacggaggcgttgaatggccctttctgacatggttttcaggtctaaatagtggctgctccagtccatgaactcaaaggtttgaagctaccaccattgaactcccccatggtggtttcatgatgccccctccccaattcctcgcactttattctcctgggtggtttcgaactaccctgtttctcagtggccatttgttgtgtccctcaggggcttaatgactcaaaatctgggatccttcccctctcagacacccctctttcagcttagaatttggggaacctatagagaagtcacagaatcccatgaaagggaatggggcaggagacaggggtgttttttcccagtgcagggttgtgtctttgtgtctctgtctctgtgactgtaaatcctgccctgccccactcccaataaaagctttggtgtataggcaaaaaaaaaa

SEQ ID NO: 64432 - DNA, 2569 bp, Homo sapiens
agcggggacttgcagcctccttccccccgagcggagctgcggggccggccgggccggggcggaccccgggaacccggacgcggccgcccgggcccgcgggcggggggatcggcgggggggacccgcggggtgaccggcggcaggagccgccaccatggagttccgccaggaggagtttcggaagctagcgggtcgtgctctcgggaagctgcaccgccttctggagaagcggcaggaaggcgcggagacgctggagctgagtgcggatgggcgcccggtgaccacgcagacccgggacccgccggtggtggactgcacctgcttcggcctccctcgccgctacattatcgccatcatgagtggtctgggcttctgcatcagctttggcatccgctgcaacctgggcgtggccatcgtctccatggtcaataacagcacgacccaccgcgggggccacgtggtggtgcagaaagcccagttcagctgggatccagagactgtcggcctcatacacggctcctttttctggggctacattgtcactcagattccaggaggatttatctgtcaaaaatttgcagccaacagagttttcggctttgctattgtggcaacatccactctaaacatgctgatcccctcagctgcccgcgtccactatggctgtgtcatcttcgtgaggatcctgcaggggttggtagagggggtcacataccccgcctgccatgggatctggagcaaatgggccccacccttagaacggagtcgcctggcgacgacagccttttgtggttcctatgctggggcggtggtcgcgatgcccctcgccggggtccttgtgcagtactcaggatggagctctgttttctacgtctacggcagcttcgggatcttctggtacctgttctggctgctcgtctcctacgagtcccccgcgctgcaccccagcatctcggaggaggagcgcaagtacatcgaggacgccatcggagagagcgcgaaactcatgaaccccctcacgaagtttagcactccctggcggcgcttcttcacgtctatgccagtctatgccatcatcgtggccaacttctgccgcagctggacgttctacctgctgctcatctcccagcccgcctacttcgaagaagtgttcggcttcgagatcagcaaggtaggcctggtgtccgcgctgccccacctggtcatgaccatcatcgtgcccatcggcggccagatcgcggacttcctgcggagccgccgcatcatgtccaccaccaacgtgcgcaagttgatgaactgcggaggcttcggcatggaagccacgctgctgttggtggtcggctactcgcactccaagggcgtggccatctccttcctggtcctagccgtgggcttcagcggcttcgccatctctgggttcaacgtgaaccacctggacatagccccgcgctacgccagcatcctcatgggcatctccaacggcgtgggcacactgtcgggcatggtgtgccccatcatcgtgggggccatgactaagcacaagactcgggaggagtggcagtacgtgttcctaattgcctccctggtgcactatggaggtgtcatcttctacggggtctttgcttctggagagaagcagccgtgggcagagcctgaggagatgagcgaggagaagtgtggcttcgttggccatgaccagctggctggcagtgacgacagcgaaatggaggatgaggctgagcccccgggggcaccccctgcacccccgccctcctatggggccacacacagcacatttcagccccccaggcccccaccccctgtccgggactactgaccatgtgcctcccactgaatggcagtttccaggacctccattccactcatctctggcctgagtgacagtgtcaaggaaccctgctcctctctgtcctgcctcaggcctaagaagcactctcccttgttcccagtgctgtcaaatcctctttccttcccaattgcctctcaggggtagtgaagctgcagactgacagtttcaaggatacccaaattcccctaaaggttccctctccacccgttctgcctcagtggtttcaaatctctcctttcagggctttatttgaatggacagttcgacctcttactctctcttgtggttttgaggcacccacaccccccgctttcctttatctccagggactctcaggctaacctttgagatcactcagctcccatctcctttcagaaaaattcaaggtcctcctctagaagtttcaaatctctcccaactctgttctgcatcttccagattggtttaaccaattactcgtccccgccattccagggattgattctcaccagcgtttctgatggaaaatggcggtttcaagtccccgattccgtgcccacttcacatctcccctaccagcagattctgcgaaagcaccaaatttctcaagaccctcttctccctagcttagcataatgtctggggaaacaaccaaaatcgcaattttaacaatatgcctctctacccccgtgcacttccggaaaggctgggtaccgagct

SEQ ID NO: 64433 - DNA, 2483 bp, Homo sapiens
agcggggacttgcagcctccttccccccgagcggagctgcggggccggccgggccggggcggaccccgggaacccggacgcggccgcccgggcccgcgggcggggggatcggcgggggggacccgcggggtgaccggcggcaggagccgccaccatggagttccgccaggaggagtttcggaagctagcgggtcgtgctctcgggaagctgcaccgccttctggagaagcggcaggaaggcgcggagacgctggagctgagtgcggatgggcgcccggtgaccacgcagacccgggacccgccggtggtggactgcacctgcttcggcctccctcgccgctacattatcgccatcatgagtggtctgggcttctgcatcagctttggcatccgctgcaacctgggcgtggccatcgtctccatggtcaataacagcacgacccaccgcgggggccacgtggtggtgcagaaagcccagttcagctgggatccagagactgtcggcctcatacacggctcctttttctggggctacattgtcactcagattccaggaggatttatctgtcaaaaatttgcagccaacagagttttcggctttgctattgtggcaacatccactctaaacatgctgatcccctcagctgcccgcgtccactatggctgtgtcatcttcgtgaggatcctgcaggggttggtagagggggtcacataccccgcctgccatgggatctggagcaaatgggccccacccttagaacggagtcgcctggcgacgacagccttttgtggttcctatgctggggcggtggtcgcgatgcccctcgccggggtccttgtgcagtactcaggatggagctctgttttctacgtctacggcagcttcgggatcttctggtacctgttctggctgctcgtctcctacgagtcccccgcgctgcaccccagcatctcggaggaggagcgcaagtacatcgaggacgccatcggagagagcgcgaaactcatgaaccccctcacgaagtttagcactccctggcggcgcttcttcacgtctatgccagtctatgccatcatcgtggccaacttctgccgcagctggacgttctacctgctgctcatctcccagcccgcctacttcgaagaagtgttcggcttcgagatcagcaaggtaggcctggtgtccgcgctgccccacctggtcatgaccatcatcgtgcccatcggcggccagatcgcggacttcctgcggagccgccgcatcatgtccaccaccaacgtgcgcaagttgatgaactgcggaggcttcggcatggaagccacgctgctgttggtggtcggctactcgcactccaagggcgtggccatctccttcctggtcctagccgtgggcttcagcggcttcgccatctctgggttcaacgtgaaccacctggacatagccccgcgctacgccagcatcctcatgggcatctccaacggcgtgggcacactgtcgggcatggtgtgccccatcatcgtgggggccatgactaagcacaagactcgggaggagtggcagtacgtgttcctaattgcctccctggtgcactatggaggtgtcatcttctacggggtctttgcttctggagagaagcagccgtgggcagagcctgaggagatgagcgaggagaagtgtggcttcgttggccatgaccagctggctggcagtgacgacagcgaaatggaggatgaggctgagcccccgggggcaccccctgcacccccgccctcctatggggccacacacagcacatttcagccccccaggcccccaccccctgtccgggactactgaccatgtgcctcccactgaatggcagtttccaggacctccattccactcatctctggcctgagtgacagtgtcaaggaaccctgctcctctctgtcctgcctcaggcctaagaagcactctcccttgttcccagtgctgtcaaatcctctttccttcccaattgcctctcaggggtagtgaagctgcagactgacagtttcaaggatacccaaattcccctaaaggttccctctccacccgttctgcctcagtggtttcaaatctctcctttcagggctttatttgaatggacagttcgacctcttactctctcttgtggttttgaggcacccacaccccccgctttcctttatctccagggactctcaggctaacctttgagatcactcagctcccatctcctttcagaaaaattcaaggtcctcctctagaagtttcaaatctctcccaactctgttctgcatcttccagattggtttaaccaattactcgtccccgccattccagggattgattctcaccagcgtttctgatggaaaatggcggtttcaagtccccgattccgtgcccacttcacatctcccctaccagcagattctgcgaaagcaccaaatttctcaagacccaggagcctatgtgtagacct

SEQ ID NO: 64434 - DNA, 581 bp, Homo sapiens
agcggggacttgcagcctccttccccccgagcggagctgcggggccggccgggccggggcggaccccgggaacccggacgcggccgcccgggcccgcgggcggggggatcggcgggggggacccgcggggtgaccggcggcaggagccgccaccatggagttccgccaggaggagtttcggaagctagcgggtcgtgctctcgggaagctgcaccgccttctggagaagcggcaggaaggcgcggagacgctggagctgagtgcggatgggcgcccggtgaccacgcagacccgggacccgccggtggtggactgcacctgcttcggcctccctcgccgctacattatcgccatcatgagtggtctgggcttctgcatcagctttggcatccgctgcaacctgggcgtggccatcgtctccatggtcaataacagcacgacccaccgcgggggccacgtggtggtgcagaaagcccagttcagctgggatccagagactgtcggcctcatacacggctcctttttctggggctacattgtcactcagattccagctgaactgggctttctgcaccaccacc

SEQ ID NO: 64435 - DNA, 368 bp, Homo sapiens
cctggtgcagtagcctgaataaagcatttccttaattgtctagtacattttatctttcagaaaaacaaagtcatccttaaattatttgttttctcaactaacatttgcttcacttgaaaccactgctcttcaagagcttggttagtattctggagcatgaggtctggagtgagtctcaaactctggctctactcttcatactgtgtaaccatgggcaagggacatgacctttttgtcttaatccactcacctataaatgggaatgatgggggtggtggtggtggtggtggagactacaacacagtgttgttatgaagttcataacaagtgccccattgttattatttgaaaaacaccttaggctcatc

SEQ ID NO: 64436 - DNA, 1691 bp, Homo sapiens
aggcgaggggctgcaaatgaggatggaatatgccaggctggcagcagacatgggcactggatggaggtgcactggtctcagatggctaggaatggataccagcccagtcaaggggatcattctgtcatggccagcctgacccagcatactttgccccctgggggccaccagatggggagagagagaaaccaaagactggaagatacaaaggcctaagttgtagaatggattccaagcagaaggcagaaggactcagaattggagaagcagccctttcactgagcctggggacagctgtcagggtaggagacaggacccaggcctcaggcaatgcctgccaggctagacatgagggatgctgcggcctctccccaccccatctccccaccccacccgcaactgccttcctcacaatggggttcattgttgaggtggtggggggcacctagggagggtgcagcagggggcctgcctgtcagacatccttggggagcctgccctttcaagcatgaatcataccaccagagatcacccagcttgctcttagctctgcctgcctggtgtagggtcctggagaccttcttggagctcatccagcagccatcatgcaaggtggtgctggggactgccctcttgctaggaggtggaggtctcatgctgtgggttcagagaaagaggagaagaaaggaaacctctgagtgtccatcagacaaggacaagtcaccagaatcccataaagcaaagaatgaaagctggattaaatcccactttagccgcctttccgaagagaagctggccctcgacaacaatgccagcgctagtggcaatgctacccagactgagagtgggagtgaagaggtcagctccacggttcacatagagaccttcaccacgaggcacggagaagtgggctccgctctgcaccgggaatccttcaccagcaggcagaagacatctgggccctcagtgatccaagagatccaccaggagtctggaaaagccccatccactgatgacgccacgtgggccgctgtggctgcctgcaccaaggagattgacacccaggggcggcacctggctcactccatgctgcagcgggccatagcttaccagcactcaggtcacctggagtccaaggacatcaaccaggaggagctgagggccctcgaggaggtagagatgaagctgcaaaagaatttcctcacccagcgggaaaacaccatagctggtgccaatcacacacacaccttctatggccacagtcaccacagtcaccatggccacccaagccaccagagccacagcctgcctaatcgcagacactagatctgtgacttcttggaagccacctaaccatggatggagacgcccctgcccccagcaaggctggctcacacacacgtctgttttctctcctatggggccatctatgcaggccagggtgagatgctgtgcccaaatccctactttcttaggctcctcacggggattatgggctctttaaactccatgagtggggtctgccacagaagatggcccctgttggagggagagctgggaggacacagcgcaggtgagatagaccctgaggcccctgaagacccaccaagagaagacagatgggagcaggcaagagccccacactgatgtcattgcctggaacggagccaataaagctttgtgtgccttca

SEQ ID NO: 64437 - DNA, 1241 bp, Homo sapiens
acattgctaacctgtaaagcactgtacggtcaacgggatggagcctgccctttcaagcatgaatcataccaccagagatcacccagcttgctcttagctctgcctgcctggtgtagggtcctggagaccttcttggagctcatccagcagccatcatgcaaggtggtgctggggactgccctcttgctaggaggtggaggtctcatgctgtgggttcagagaaagaggagaagaaaggaaacctctgagtgtccatcagacaaggacaagtcaccagaatcccataaagcaaagaatgaaagctggattaaatcccactttagccgcctttccgaagagaagctggccctcgacaacaatgccagcgctagtggcaatgctacccagactgagagtgggagtgaagaggtcagctccacggttcacatagagaccttcaccacgaggcacggagaagtgggctccgctctgcaccgggaatccttcaccagcaggcagaagacatctgggccctcagtgatccaagagatccaccaggagtctggaaaagccccatccactgatgacgccacgtgggccgctgtggctgcctgcaccaaggagattgacacccaggggcggcacctggctcactccatgctgcagcgggccatagcttaccagcactcaggtcacctggagtccaaggacatcaaccaggaggagctgagggccctcgaggaggtagagatgaagctgcaaaagaatttcctcacccagcgggaaaacaccatagctggtgccaatcacacacacaccttctatggccacagtcaccacagtcaccatggccacccaagccaccagagccacagcctgcctaatcgcagacactagatctgtgacttcttggaagccacctaaccatggatggagacgcccctgcccccagcaaggctggctcacacacacgtctgttttctctcctatggggccatctatgcaggccagggtgagatgctgtgcccaaatccctactttcttaggctcctcacggggattatgggctctttaaactccatgagtggggtctgccacagaagatggcccctgttggagggagagctgggaggacacagcgcaggtgagatagaccctgaggcccctgaagacccaccaagagaagacagatgggagcaggcaagagccccacactgatgtcattgcctggaacggagccaataaagctttgtgtgccttca

SEQ ID NO: 64438 - DNA, 332 bp, Homo sapiens
tgaaacagagtctcactctgttacccaggctggagtgcaatggcatgacctcactcactgcaacctccgcctcccgggttcaagcaattctccctgcctcagcctcccaagtagctgggattacaggcatgcaccaccatgcctggctaatttttgtatttttagtagagatggagtttcaccaggttggccaggttggtctcaaactcctgacctcagatgatccgcccacctcggcctcccaaagtactgggattacaggcatgagccactgcgcccagcctccatgggaaatttcttaatagaaacggggtctcccaggctgaagtaca

SEQ ID NO: 64439 - DNA, 365 bp, Homo sapiens
acgcgtgggcggacgcgtgggatgctgtcacgcatacacacacgcacatactcctgcacatgttcccatgcatgtgtgtgcactcggaccgagcatctcccacgcacctctaccccaccccaagcacctctctccccccatgcacctctccccaacaacacacacagccccctgcaccgcccgccccccgcccccaccaaggccccagcctctggccatcagtcctggtgccagagctttgcgtgaagttcgggccgcagagtggcccgctgggactcccatgtgctgccgtctgatgtgctcagatgggctcatcgttggttcgtttttactgtatatttatagtaataaaatcatgcagcaaa

SEQ ID NO: 64440 - DNA, 416 bp, Homo sapiens
ctatacagtcacaactgcagtaggcagtgaggaagccagagaaatgcgatagcggcatttttctaaagcgggttattaaggatatatacagttacactttttgctgcttttattttcttccaagccaatcaatcagccagttcctagcagagtcagcacatgaacaagatctaagtcatttcttgatgtgagcactggagcttttttttttttacaacgtgacaggaagaggagggagagggtgacgaacaccagccagcctctggccatcagtcctggtgccagagctttgcgtgaagttcgggccgcagagtggcccgctgggactcccatgtgctgccgtctgatgtgctcagatgggctcatcgttggttcgtttttactgtatatttatagtaataaaatcatgcagcaaa

SEQ ID NO: 64441 - DNA, 467 bp, Homo sapiens
gcacataaacacactcctactcgcacacactcatacagacacgacactcatacacacatacactcacactcacatgcagtcattcagatgcacacactcagacacactcatacactcagtcacacacatatacatagacatactcgtacacatacacacatacactcacactcactcacatatacatagacacatactgatacacacacatatacccattcacacacacacatagacattcatacacatatacacatacgcacacgtatacagacacacactcatacacatacccacacatatactcacacacataaactcacatgtatactcatacacatatacatagacacacattcactcgcacacatatacagacatacatacacacaatcacttgcacacatatacatagacacactcatacaatcactcacgcacatatacaaagaggcacagattgcagt

SEQ ID NO: 64442 - DNA, 438 bp, Homo sapiens
tctctaaacagaaaagaggagcagagccctgaggactggcgttcacagacagcgcctttgctctagaaggctcctcccaagcccccttgatcagggccttgacctgggccctatgggcctccctggcagcaggtgcaatgtttctgaaatggggtcaatgtttaaaagtctggaatttcccttaaaacccagattttgggtttgtcttttaaaatctgacatggtcttgatgctagaggagaaacatggcttgggggtccctgtcaacccaggccctccagcctctggccatcagtcctggtgccagagctttgcgtgaagttcgggccgcagagtggcccgctgggactcccatgtgctgccgtctgatgtgctcagatgggctcatcgttggttcgtttttactgtatatttatagtaataaaatcatgcagcaaa

SEQ ID NO: 64443 - DNA, 5667 bp, Homo sapiens
  misc_feature (1901)..(1901): n is a, c, g, or t
cagatcacttgagcccaggagtttgatatcagcttggccaacatggtggaccgggtcagctacctcctgcaggagatctatggcattgagaacaagaacaaccaggagaccaagccctcggacgacgagaacagcgacaacagcaacgagtgtgtggtgtgcctgtccgacctgcgggacacgctgatcctgccctgccgccacctgtgcctctgtacctcctgcgccgacacgctgcgctaccaggccaacaactgccccatctgccggctgcctttccgggccctcctgcagatccgggcggtgcggaagaagccaggagccctgtcccccgtgtccttcagccccgtcctggcccagagcctggagcatgatgagcactcttgtccctttaaaaaatcaaagccgcaccccgcctccctggccagcaagaaacctaaaagggaaacaaactctgacagcgtcccacctggctacgagcccatctcgctgctcgaggcgctcaacggcctccgggctgtctccccggccatcccctcggcccctctttatgaagaaatcacctattcaggcatctcggacggcctgtcccaggccagctgtcccctcgcggctatcgaccacatcctggacagcagccgccagaagggcaggccgcagagcaaggcccccgacagcaccctacggtccccgtcttcccccatccacgaagaggatgaggagaagctctccgaggacgtggacgcccctcccccactgggtggcgcagagctggccctgcgggaaagcagctcccctgagagtttcataacagaagaggttgatgagtcgtcgtcaccacagcaagggacccgagcagcttccattgagaatgtcctgcaggacagcagccccgagcactgtggccgaggcccacctgctgacatctacctgccagccctggggcccgactcctgctctgttggtatagacgagtaagccggtacgtgaccttccagacgcgcttcgggggctctgacgcgcgtccttggagagaggagccctcccctgctctctggcgggggttccttctggtttttgggtcttcgtccgcatccgcatcttcccaggggccctggattccgaatccagagctctccagtggctgctgcaccttcccccagaaagtggcctcctggggggtcctgactttcggggccagaggtctctccatctggactaggcggccggtcaggctcttcttccagccttgaggggccctggaacagtcccagcccaggcagggagacagacacagcccaggtgcgccagagccactgtccactgcgggaggcaggagcttgagggatgagggcagcaccgtggagggaaccccagggagacatggggtgagcgtcccaaggggagaggcctgggcctggccttgttccggatggtcccaccatgagttcgcatcggtcctgcagcagacacgttaggacgctcagcaggtccactcccgtgttccggtcatggctttaacaattcatggggaaagaatgcgccccgattgggagagcccctggatcacgtcttcccaagctcagtccctgtctcttggagggagtccgtcctcgaggggccctctggtgcccaggggagagtatcttgcgtcctgtcctgagggcgtccgctcacacagccacctgctcccccgctccctccttcccttgtcagcatggccaccgtgggcctggcatcaccatgggcctggcacacagtccctcgtgggctgcctttgtgccatgagcccactgctgccgactcacctgtccctcccagtactggaaccttctggaacaccagcactaaaagataggaggccctgtgaggttggcatcccccatccccccccaagaggngccctctaccagggtggcccaggtgagtgttttacagaaggcggctctgtccaggcagtggttcgcacctataagcccggtactttgggagaccgaggggatagatcacttgagcccaggaattcaagatcagtgtagaaaacatagaccccctctctataaaaaataaaaaattggcttgggcgtggtagcttgtgcctgtggtcccagctactcaggggtgctgaggtgggaggattgccggagctggggaggtcaaggcccactccagcctgagacgctgtctcaataaaaaaaaatacacacacacccacccacccactccagcctgagaccctgtctcaagaaaaaaaaaatacacacacacacacacacacacacacacacacacacacacacacgggggagagagagaaggcagctccaggagtgccaccaaaatgtaggcagacggattggggaccctctgccttcccagagggtcttggcacacaagctgcgtgcagctctggtctgccgaggcccatgcagcctgctgggaggtgcctggccgggggtgcaggctctaagaggccctttccccttgggtggacttgagccgggtcagggagaacttcgcttcttttgactgcgctctgcattcccatgaacctctgtcttcttgagcccagcgagtccctctgttgacccctgtcctgagccattatacccctagattgaaacagtcagcacctttcagacggccccggcctgcgcatcggtggaaggtgccatgcgaatgtcacgattcaggtcaagcttccggagctggggagtgcaggtgtgatctagaacagggctcacagcctcggaaacctgctctcgccgcggcccccgaagaaaatagacgcccttcaccggagagtggggcctgggccgtgtctgctgggagccatgtgtcagggctggtggctgggtgtcaggcagccctgaggccatgctggccccgtcccaggctctgcaccagcaccattgcccaagccccagggacgccagacccatccggggacagcgcccggcggcgtcgtgcaggccacagtctgggcattggggctctgtgggaggctcctctctttgccttgcagtagccatccgggggctactctgagcacgggcttgttctcacccagggccgctcccgacccctgcaccctgggttgaccgagttccaccctaacccagccgtaagaaccttggcaggacagtggctggccacatcccaggaaaccggaaccagggcaagggcaggaggcccagagggcatccaccgcggtgccgtgtcgcgctctgactcggggctgcagatctgctgtgggtgtccggggatctgggatcgtctgtcccaagagggacacagcgtatttggcacagttagggagtccccgggcccttggtgtgctcacatctgagtgaatgctgttgtggccacaggcggcgggagtgggggtgctggatggcccagcccctctggggctccagatcggtaggagcgggtggcgtggcaccaggcatccgagtgtgaccctcctccctctgctcccacctgcaggacggcccacctccatggagacggcccacggcctcgccaccaccagccccacctggcctccacttggtggccccagccccgatcccagcgccgccgagctgaccccactctgagagcctggccgagctggcagcatggagccctcggctccccagactttgccgaggggctgctccggaccccgttgtgagccggcctcctgtctgcatgccccctgtggccaccaggctccgaggggccgtggtgactcttgatcaaagagcacagtgaactgtcccttctgagtctcccttttctacagttgatatatttgtaactggtacaagatgaaggacagcagctttccatccctagttcagagcccccgttccccagggtcctgtgggctgagcggctggggctggggctgcccacgtgtggcctccgctggctctgcctgctcctgcaacagtgcggtccctgcccggagaactcaggaggcctgcagaagagaactgattggtggtcgaagcaccatcttcacagatgttcaggggcagtggggggctccaggcacggtcaatgaaggaaacagtgcctgtccacccaccctgcgtgtcactgtggcggcctggctgtcgctgctttttgtcctctgccgtgtttgcgcggcctcagtgccctccctggtgcgtctgcgctggggccctcagtgctcggggccttggggtgcatgggcgccgccctgggcagctagagtgtctcagcccggtgctgggcctggccgaggggcggaggcacagctgcttccagcagccagcattcagtggccttgtcaccaagctccacacctcctcctggtgctggctttggtgacatcacaaggcccctccaggtgcaggggcttctgtttggcaggcccctgccagggaggacctggtggcctcctcattctcttttgccattggaatgtccccttgcagttctcttctcttttttttttttttggagatggagtttcactcttgctgcccaggctggagtgcagtggctcaatctcgggtcactgcaacctccgcctcccgggttcaagtgatcgtcctgccttaggctcctgagtagctggggattacaggtgcctaccagcatgctcggctaatttttttgtatttttagtagagaagggatttcaccatgttggccgggctggtctcaaactcctaaggtcatccacctgcctcggcctcccagagtgctgagattacaggcgtgagcctccgcgcccggcccccttgcagttctctctgatttggtttgttctgtctcaggcttctgtggcaggactggcccagggaggaggaagccagcagcacacctggggaatggggtcccggccgggaggcttggcctctgggcgacctcgtcctgttttgtttgtttgtttgtttgtttttttaaaggtaaacctcctgggccgcagatggcaaagggagtgcctgggcctggtgacccagggctggatccacccctgcggagccctgggccaggcaggtgtctgctgctcacctggctctggagggctgccctgcagctgggcctggggacaggtcggctgtggggcagctcagtaccctccctgaggctcacggtggctccgagcatgagctctgcctcctgggcgagacccagcagtggacagcacggtcctcacacccagctccctgcacacccaggccagccacccctcccgctcgtgcacaggcacgcagatgcgctcacacgtacacacacacaaatgcacgcccacttgcacatgctcacgcacacgttcacacatgcacactcacgctcacacatgctgtcacgcatacacacacgcacatactcctgcacatgttcccatgcatgtgtgtgcactcggaccgagcatctcccacgcacctctaccccaccccaagcacctctctccccccatgcacctctccccaacaacacacacagccccctgcaccgcccgccccccgcccccaccaaggccccagcctctggccatcagtcctggtgccagagctttgcgtgaagttcgggccgcagagtggcccgctgggactcccatgtgctgccgtctgatgtgctcagatgggctcatcgttggttcgtttttactgtatatttatagtaataaaatcatgcagcaaa

SEQ ID NO: 64444 - DNA, 5615 bp, Homo sapiens
  misc_feature (1849)..(1849): n is a, c, g, or t
ctggagcagctccacgtggcgggagcggagcacctggccgggcctcgcctcaacccagggaaccctcggacgacgagaacagcgacaacagcaacgagtgtgtggtgtgcctgtccgacctgcgggacacgctgatcctgccctgccgccacctgtgcctctgtacctcctgcgccgacacgctgcgctaccaggccaacaactgccccatctgccggctgcctttccgggccctcctgcagatccgggcggtgcggaagaagccaggagccctgtcccccgtgtccttcagccccgtcctggcccagagcctggagcatgatgagcactcttgtccctttaaaaaatcaaagccgcaccccgcctccctggccagcaagaaacctaaaagggaaacaaactctgacagcgtcccacctggctacgagcccatctcgctgctcgaggcgctcaacggcctccgggctgtctccccggccatcccctcggcccctctttatgaagaaatcacctattcaggcatctcggacggcctgtcccaggccagctgtcccctcgcggctatcgaccacatcctggacagcagccgccagaagggcaggccgcagagcaaggcccccgacagcaccctacggtccccgtcttcccccatccacgaagaggatgaggagaagctctccgaggacgtggacgcccctcccccactgggtggcgcagagctggccctgcgggaaagcagctcccctgagagtttcataacagaagaggttgatgagtcgtcgtcaccacagcaagggacccgagcagcttccattgagaatgtcctgcaggacagcagccccgagcactgtggccgaggcccacctgctgacatctacctgccagccctggggcccgactcctgctctgttggtatagacgagtaagccggtacgtgaccttccagacgcgcttcgggggctctgacgcgcgtccttggagagaggagccctcccctgctctctggcgggggttccttctggtttttgggtcttcgtccgcatccgcatcttcccaggggccctggattccgaatccagagctctccagtggctgctgcaccttcccccagaaagtggcctcctggggggtcctgactttcggggccagaggtctctccatctggactaggcggccggtcaggctcttcttccagccttgaggggccctggaacagtcccagcccaggcagggagacagacacagcccaggtgcgccagagccactgtccactgcgggaggcaggagcttgagggatgagggcagcaccgtggagggaaccccagggagacatggggtgagcgtcccaaggggagaggcctgggcctggccttgttccggatggtcccaccatgagttcgcatcggtcctgcagcagacacgttaggacgctcagcaggtccactcccgtgttccggtcatggctttaacaattcatggggaaagaatgcgccccgattgggagagcccctggatcacgtcttcccaagctcagtccctgtctcttggagggagtccgtcctcgaggggccctctggtgcccaggggagagtatcttgcgtcctgtcctgagggcgtccgctcacacagccacctgctcccccgctccctccttcccttgtcagcatggccaccgtgggcctggcatcaccatgggcctggcacacagtccctcgtgggctgcctttgtgccatgagcccactgctgccgactcacctgtccctcccagtactggaaccttctggaacaccagcactaaaagataggaggccctgtgaggttggcatcccccatccccccccaagaggngccctctaccagggtggcccaggtgagtgttttacagaaggcggctctgtccaggcagtggttcgcacctataagcccggtactttgggagaccgaggggatagatcacttgagcccaggaattcaagatcagtgtagaaaacatagaccccctctctataaaaaataaaaaattggcttgggcgtggtagcttgtgcctgtggtcccagctactcaggggtgctgaggtgggaggattgccggagctggggaggtcaaggcccactccagcctgagacgctgtctcaataaaaaaaaatacacacacacccacccacccactccagcctgagaccctgtctcaagaaaaaaaaaatacacacacacacacacacacacacacacacacacacacacacacgggggagagagagaaggcagctccaggagtgccaccaaaatgtaggcagacggattggggaccctctgccttcccagagggtcttggcacacaagctgcgtgcagctctggtctgccgaggcccatgcagcctgctgggaggtgcctggccgggggtgcaggctctaagaggccctttccccttgggtggacttgagccgggtcagggagaacttcgcttcttttgactgcgctctgcattcccatgaacctctgtcttcttgagcccagcgagtccctctgttgacccctgtcctgagccattatacccctagattgaaacagtcagcacctttcagacggccccggcctgcgcatcggtggaaggtgccatgcgaatgtcacgattcaggtcaagcttccggagctggggagtgcaggtgtgatctagaacagggctcacagcctcggaaacctgctctcgccgcggcccccgaagaaaatagacgcccttcaccggagagtggggcctgggccgtgtctgctgggagccatgtgtcagggctggtggctgggtgtcaggcagccctgaggccatgctggccccgtcccaggctctgcaccagcaccattgcccaagccccagggacgccagacccatccggggacagcgcccggcggcgtcgtgcaggccacagtctgggcattggggctctgtgggaggctcctctctttgccttgcagtagccatccgggggctactctgagcacgggcttgttctcacccagggccgctcccgacccctgcaccctgggttgaccgagttccaccctaacccagccgtaagaaccttggcaggacagtggctggccacatcccaggaaaccggaaccagggcaagggcaggaggcccagagggcatccaccgcggtgccgtgtcgcgctctgactcggggctgcagatctgctgtgggtgtccggggatctgggatcgtctgtcccaagagggacacagcgtatttggcacagttagggagtccccgggcccttggtgtgctcacatctgagtgaatgctgttgtggccacaggcggcgggagtgggggtgctggatggcccagcccctctggggctccagatcggtaggagcgggtggcgtggcaccaggcatccgagtgtgaccctcctccctctgctcccacctgcaggacggcccacctccatggagacggcccacggcctcgccaccaccagccccacctggcctccacttggtggccccagccccgatcccagcgccgccgagctgaccccactctgagagcctggccgagctggcagcatggagccctcggctccccagactttgccgaggggctgctccggaccccgttgtgagccggcctcctgtctgcatgccccctgtggccaccaggctccgaggggccgtggtgactcttgatcaaagagcacagtgaactgtcccttctgagtctcccttttctacagttgatatatttgtaactggtacaagatgaaggacagcagctttccatccctagttcagagcccccgttccccagggtcctgtgggctgagcggctggggctggggctgcccacgtgtggcctccgctggctctgcctgctcctgcaacagtgcggtccctgcccggagaactcaggaggcctgcagaagagaactgattggtggtcgaagcaccatcttcacagatgttcaggggcagtggggggctccaggcacggtcaatgaaggaaacagtgcctgtccacccaccctgcgtgtcactgtggcggcctggctgtcgctgctttttgtcctctgccgtgtttgcgcggcctcagtgccctccctggtgcgtctgcgctggggccctcagtgctcggggccttggggtgcatgggcgccgccctgggcagctagagtgtctcagcccggtgctgggcctggccgaggggcggaggcacagctgcttccagcagccagcattcagtggccttgtcaccaagctccacacctcctcctggtgctggctttggtgacatcacaaggcccctccaggtgcaggggcttctgtttggcaggcccctgccagggaggacctggtggcctcctcattctcttttgccattggaatgtccccttgcagttctcttctcttttttttttttttggagatggagtttcactcttgctgcccaggctggagtgcagtggctcaatctcgggtcactgcaacctccgcctcccgggttcaagtgatcgtcctgccttaggctcctgagtagctggggattacaggtgcctaccagcatgctcggctaatttttttgtatttttagtagagaagggatttcaccatgttggccgggctggtctcaaactcctaaggtcatccacctgcctcggcctcccagagtgctgagattacaggcgtgagcctccgcgcccggcccccttgcagttctctctgatttggtttgttctgtctcaggcttctgtggcaggactggcccagggaggaggaagccagcagcacacctggggaatggggtcccggccgggaggcttggcctctgggcgacctcgtcctgttttgtttgtttgtttgtttgtttttttaaaggtaaacctcctgggccgcagatggcaaagggagtgcctgggcctggtgacccagggctggatccacccctgcggagccctgggccaggcaggtgtctgctgctcacctggctctggagggctgccctgcagctgggcctggggacaggtcggctgtggggcagctcagtaccctccctgaggctcacggtggctccgagcatgagctctgcctcctgggcgagacccagcagtggacagcacggtcctcacacccagctccctgcacacccaggccagccacccctcccgctcgtgcacaggcacgcagatgcgctcacacgtacacacacacaaatgcacgcccacttgcacatgctcacgcacacgttcacacatgcacactcacgctcacacatgctgtcacgcatacacacacgcacatactcctgcacatgttcccatgcatgtgtgtgcactcggaccgagcatctcccacgcacctctaccccaccccaagcacctctctccccccatgcacctctccccaacaacacacacagccccctgcaccgcccgccccccgcccccaccaaggccccagcctctggccatcagtcctggtgccagagctttgcgtgaagttcgggccgcagagtggcccgctgggactcccatgtgctgccgtctgatgtgctcagatgggctcatcgttggttcgtttttactgtatatttatagtaataaaatcatgcagcaaa

SEQ ID NO: 64445 - DNA, 5272 bp, Homo sapiens
  misc_feature (1506)..(1506): n is a, c, g, or t
cctagaggatcccctgtgacgctccttgtgccagcagaaacctaaaagggaaacaaactctgacagcgtcccacctggctacgagcccatctcgctgctcgaggcgctcaacggcctccgggctgtctccccggccatcccctcggcccctctttatgaagaaatcacctattcaggcatctcggacggcctgtcccaggccagctgtcccctcgcggctatcgaccacatcctggacagcagccgccagaagggcaggccgcagagcaaggcccccgacagcaccctacggtccccgtcttcccccatccacgaagaggatgaggagaagctctccgaggacgtggacgcccctcccccactgggtggcgcagagctggccctgcgggaaagcagctcccctgagagtttcataacagaagaggttgatgagtcgtcgtcaccacagcaagggacccgagcagcttccattgagaatgtcctgcaggacagcagccccgagcactgtggccgaggcccacctgctgacatctacctgccagccctggggcccgactcctgctctgttggtatagacgagtaagccggtacgtgaccttccagacgcgcttcgggggctctgacgcgcgtccttggagagaggagccctcccctgctctctggcgggggttccttctggtttttgggtcttcgtccgcatccgcatcttcccaggggccctggattccgaatccagagctctccagtggctgctgcaccttcccccagaaagtggcctcctggggggtcctgactttcggggccagaggtctctccatctggactaggcggccggtcaggctcttcttccagccttgaggggccctggaacagtcccagcccaggcagggagacagacacagcccaggtgcgccagagccactgtccactgcgggaggcaggagcttgagggatgagggcagcaccgtggagggaaccccagggagacatggggtgagcgtcccaaggggagaggcctgggcctggccttgttccggatggtcccaccatgagttcgcatcggtcctgcagcagacacgttaggacgctcagcaggtccactcccgtgttccggtcatggctttaacaattcatggggaaagaatgcgccccgattgggagagcccctggatcacgtcttcccaagctcagtccctgtctcttggagggagtccgtcctcgaggggccctctggtgcccaggggagagtatcttgcgtcctgtcctgagggcgtccgctcacacagccacctgctcccccgctccctccttcccttgtcagcatggccaccgtgggcctggcatcaccatgggcctggcacacagtccctcgtgggctgcctttgtgccatgagcccactgctgccgactcacctgtccctcccagtactggaaccttctggaacaccagcactaaaagataggaggccctgtgaggttggcatcccccatccccccccaagaggngccctctaccagggtggcccaggtgagtgttttacagaaggcggctctgtccaggcagtggttcgcacctataagcccggtactttgggagaccgaggggatagatcacttgagcccaggaattcaagatcagtgtagaaaacatagaccccctctctataaaaaataaaaaattggcttgggcgtggtagcttgtgcctgtggtcccagctactcaggggtgctgaggtgggaggattgccggagctggggaggtcaaggcccactccagcctgagacgctgtctcaataaaaaaaaatacacacacacccacccacccactccagcctgagaccctgtctcaagaaaaaaaaaatacacacacacacacacacacacacacacacacacacacacacacgggggagagagagaaggcagctccaggagtgccaccaaaatgtaggcagacggattggggaccctctgccttcccagagggtcttggcacacaagctgcgtgcagctctggtctgccgaggcccatgcagcctgctgggaggtgcctggccgggggtgcaggctctaagaggccctttccccttgggtggacttgagccgggtcagggagaacttcgcttcttttgactgcgctctgcattcccatgaacctctgtcttcttgagcccagcgagtccctctgttgacccctgtcctgagccattatacccctagattgaaacagtcagcacctttcagacggccccggcctgcgcatcggtggaaggtgccatgcgaatgtcacgattcaggtcaagcttccggagctggggagtgcaggtgtgatctagaacagggctcacagcctcggaaacctgctctcgccgcggcccccgaagaaaatagacgcccttcaccggagagtggggcctgggccgtgtctgctgggagccatgtgtcagggctggtggctgggtgtcaggcagccctgaggccatgctggccccgtcccaggctctgcaccagcaccattgcccaagccccagggacgccagacccatccggggacagcgcccggcggcgtcgtgcaggccacagtctgggcattggggctctgtgggaggctcctctctttgccttgcagtagccatccgggggctactctgagcacgggcttgttctcacccagggccgctcccgacccctgcaccctgggttgaccgagttccaccctaacccagccgtaagaaccttggcaggacagtggctggccacatcccaggaaaccggaaccagggcaagggcaggaggcccagagggcatccaccgcggtgccgtgtcgcgctctgactcggggctgcagatctgctgtgggtgtccggggatctgggatcgtctgtcccaagagggacacagcgtatttggcacagttagggagtccccgggcccttggtgtgctcacatctgagtgaatgctgttgtggccacaggcggcgggagtgggggtgctggatggcccagcccctctggggctccagatcggtaggagcgggtggcgtggcaccaggcatccgagtgtgaccctcctccctctgctcccacctgcaggacggcccacctccatggagacggcccacggcctcgccaccaccagccccacctggcctccacttggtggccccagccccgatcccagcgccgccgagctgaccccactctgagagcctggccgagctggcagcatggagccctcggctccccagactttgccgaggggctgctccggaccccgttgtgagccggcctcctgtctgcatgccccctgtggccaccaggctccgaggggccgtggtgactcttgatcaaagagcacagtgaactgtcccttctgagtctcccttttctacagttgatatatttgtaactggtacaagatgaaggacagcagctttccatccctagttcagagcccccgttccccagggtcctgtgggctgagcggctggggctggggctgcccacgtgtggcctccgctggctctgcctgctcctgcaacagtgcggtccctgcccggagaactcaggaggcctgcagaagagaactgattggtggtcgaagcaccatcttcacagatgttcaggggcagtggggggctccaggcacggtcaatgaaggaaacagtgcctgtccacccaccctgcgtgtcactgtggcggcctggctgtcgctgctttttgtcctctgccgtgtttgcgcggcctcagtgccctccctggtgcgtctgcgctggggccctcagtgctcggggccttggggtgcatgggcgccgccctgggcagctagagtgtctcagcccggtgctgggcctggccgaggggcggaggcacagctgcttccagcagccagcattcagtggccttgtcaccaagctccacacctcctcctggtgctggctttggtgacatcacaaggcccctccaggtgcaggggcttctgtttggcaggcccctgccagggaggacctggtggcctcctcattctcttttgccattggaatgtccccttgcagttctcttctcttttttttttttttggagatggagtttcactcttgctgcccaggctggagtgcagtggctcaatctcgggtcactgcaacctccgcctcccgggttcaagtgatcgtcctgccttaggctcctgagtagctggggattacaggtgcctaccagcatgctcggctaatttttttgtatttttagtagagaagggatttcaccatgttggccgggctggtctcaaactcctaaggtcatccacctgcctcggcctcccagagtgctgagattacaggcgtgagcctccgcgcccggcccccttgcagttctctctgatttggtttgttctgtctcaggcttctgtggcaggactggcccagggaggaggaagccagcagcacacctggggaatggggtcccggccgggaggcttggcctctgggcgacctcgtcctgttttgtttgtttgtttgtttgtttttttaaaggtaaacctcctgggccgcagatggcaaagggagtgcctgggcctggtgacccagggctggatccacccctgcggagccctgggccaggcaggtgtctgctgctcacctggctctggagggctgccctgcagctgggcctggggacaggtcggctgtggggcagctcagtaccctccctgaggctcacggtggctccgagcatgagctctgcctcctgggcgagacccagcagtggacagcacggtcctcacacccagctccctgcacacccaggccagccacccctcccgctcgtgcacaggcacgcagatgcgctcacacgtacacacacacaaatgcacgcccacttgcacatgctcacgcacacgttcacacatgcacactcacgctcacacatgctgtcacgcatacacacacgcacatactcctgcacatgttcccatgcatgtgtgtgcactcggaccgagcatctcccacgcacctctaccccaccccaagcacctctctccccccatgcacctctccccaacaacacacacagccccctgcaccgcccgccccccgcccccaccaaggccccagcctctggccatcagtcctggtgccagagctttgcgtgaagttcgggccgcagagtggcccgctgggactcccatgtgctgccgtctgatgtgctcagatgggctcatcgttggttcgtttttactgtatatttatagtaataaaatcatgcagcaaa

SEQ ID NO: 64446 - DNA, 3903 bp, Homo sapiens
gacgagcgtccgtgcggcctggtccgggccatgtccgcgtgaggaccccgccgctgtcgccgctcccgttccggccctggcccctctgcccggcagcgcggcgcaccatgggctccattctcagccgccgcatcgcgggggtggaggacatcgacatccaggcgaactcggcctatcgctaccctccgaagtccggaaactactttgcttcgcactttttcatgggaggagagaaattcgacaccccccaccctgaaggttacctctttggagagaacatggatctgaacttcctgggcagccgcccggtccagtttccctacgtcactcctgccccccacgagcccgtgaagacgctgcggagcctggtgaacatccgcaaagactccctgcggctggtgaggtacaaagacgatgccgacagccccaccgaggacggcgacaagccccgggtgctctacagcctggagttcaccttcgacgccgatgcccgcgtggccatcaccatctactgccaggcatcggaggagttcctgaacggcagggcagtatacagccccaagagcccctcgctacagtccgagaccgtccactacaagagaggggtgagccagcagttctccctgccctccttcaagattgacttctcggaatggaaggatgacgagctgaactttgacctggaccggggcgtgtttccagtagtcatccaggctgtggtggacgaaggagatgtggtggaagtgactggccacgcccacgtgctcttggctgcctttgaaaagcacatggacggcagcttctctgtgaagcctttaaagcagaagcaaattgtggaccgggtcagctacctcctgcaggagatctatggcattgagaacaagaacaaccaggagaccaagccctcggacgacgagaacagcgacaacagcaacgagtgtgtggtgtgcctgtccgacctgcgggacacgctgatcctgccctgccgccacctgtgcctctgtacctcctgcgccgacacgctgcgctaccaggccaacaactgccccatctgccggctgcctttccgggccctcctgcagatccgggcggtgcggaagaagccaggagccctgtcccccgtgtccttcagccccgtcctggcccagagcctggagcatgatgagcactcttgtccctttaaaaaatcaaagccgcaccccgcctccctggccagcaagaaacctaaaagggaaacaaactctgacagcgtcccacctggctacgagcccatctcgctgctcgaggcgctcaacggcctccgggctgtctccccggccatcccctcggcccctctttatgaagaaatcacctattcaggcatctcggacggcctgtcccaggccagctgtcccctcgcggctatcgaccacatcctggacagcagccgccagaagggcaggccgcagagcaaggcccccgacagcaccctacggtccccgtcttcccccatccacgaagaggatgaggagaagctctccgaggacgtggacgcccctcccccactgggtggcgcagagctggccctgcgggaaagcagctcccctgagagtttcataacagaagaggttgatgagtcgtcgtcaccacagcaagggacccgagcagcttccattgagaatgtcctgcaggacagcagccccgagcactgtggccgaggcccacctgctgacatctacctgccaggacggcccacctccatggagacggcccacggcctcgccaccaccagccccacctggcctccacttggtggccccagccccgatcccagcgccgccgagctgaccccactctgagagcctggccgagctggcagcatggagccctcggctccccagactttgccgaggggctgctccggaccccgttgtgagccggcctcctgtctgcatgccccctgtggccaccaggctccgaggggccgtggtgactcttgatcaaagagcacagtgaactgtcccttctgagtctcccttttctacagttgatatatttgtaactggtacaagatgaaggacagcagctttccatccctagttcagagcccccgttccccagggtcctgtgggctgagcggctggggctggggctgcccacgtgtggcctccgctggctctgcctgctcctgcaacagtgcggtccctgcccggagaactcaggaggcctgcagaagagaactgattggtggtcgaagcaccatcttcacagatgttcaggggcagtggggggctccaggcacggtcaatgaaggaaacagtgcctgtccacccaccctgcgtgtcactgtggcggcctggctgtcgctgctttttgtcctctgccgtgtttgcgcggcctcagtgccctccctggtgcgtctgcgctggggccctcagtgctcggggccttggggtgcatgggcgccgccctgggcagctagagtgtctcagcccggtgctgggcctggccgaggggcggaggcacagctgcttccagcagccagcattcagtggccttgtcaccaagctccacacctcctcctggtgctggctttggtgacatcacaaggcccctccaggtgcaggggcttctgtttggcaggcccctgccagggaggacctggtggcctcctcattctcttttgccattggaatgtccccttgcagttctcttctcttttttttttttttggagatggagtttcactcttgctgcccaggctggagtgcagtggctcaatctcgggtcactgcaacctccgcctcccgggttcaagtgatcgtcctgccttaggctcctgagtagctggggattacaggtgcctaccagcatgctcggctaatttttttgtatttttagtagagaagggatttcaccatgttggccgggctggtctcaaactcctaaggtcatccacctgcctcggcctcccagagtgctgagattacaggcgtgagcctccgcgcccggcccccttgcagttctctctgatttggtttgttctgtctcaggcttctgtggcaggactggcccagggaggaggaagccagcagcacacctggggaatggggtcccggccgggaggcttggcctctgggcgacctcgtcctgttttgtttgtttgtttgtttgtttttttaaaggtaaacctcctgggccgcagatggcaaagggagtgcctgggcctggtgacccagggctggatccacccctgcggagccctgggccaggcaggtgtctgctgctcacctggctctggagggctgccctgcagctgggcctggggacaggtcggctgtggggcagctcagtaccctccctgaggctcacggtggctccgagcatgagctctgcctcctgggcgagacccagcagtggacagcacggtcctcacacccagctccctgcacacccaggccagccacccctcccgctcgtgcacaggcacgcagatgcgctcacacgtacacacacacaaatgcacgcccacttgcacatgctcacgcacacgttcacacatgcacactcacgctcacacatgctgtcacgcatacacacacgcacatactcctgcacatgttcccatgcatgtgtgtgcactcggaccgagcatctcccacgcacctctaccccaccccaagcacctctctccccccatgcacctctccccaacaacacacacagccccctgcaccgcccgccccccgcccccaccaaggccccagcctctggccatcagtcctggtgccagagctttgcgtgaagttcgggccgcagagtggcccgctgggactcccatgtgctgccgtctgatgtgctcagatgggctcatcgttggttcgtttttactgtatatttatagtaataaaatcatgcagcaaa

SEQ ID NO: 64447 - DNA, 3929 bp, Homo sapiens
gacgagcgtccgtgcggcctggtccgggccatgtccgcgtgaggaccccgccgctgtcgccgctcccgttccggccctggcccctctgcccggcagcgcggcgcaccatgggctccattctcagccgccgcatcgcgggggtggaggacatcgacatccaggcgaactcggcctatcgctaccctccgaagtccggaaactactttgcttcgcactttttcatgggaggagagaaattcgacaccccccaccctgaaggttacctctttggagagaacatggatctgaacttcctgggcagccgcccggtccagtttccctacgtcactcctgccccccacgagcccgtgaagacgctgcggagcctggtgaacatccgcaaagactccctgcggctggtgaggtacaaagacgatgccgacagccccaccgaggacggcgacaagccccgggtgctctacagcctggagttcaccttcgacgccgatgcccgcgtggccatcaccatctactgccaggcatcggaggagttcctgaacggcagggcagtatacagccccaagagcccctcgctacagtccgagaccgtccactacaagagaggggtgagccagcagttctccctgccctccttcaagattgacttctcggaatggaaggatgacgagctgaactttgacctggaccggggcgtgtttccagtagtcatccaggctgtggtggacgaaggagatgtggtggaagtgactggccacgcccacgtgctcttggctgcctttgaaaagcacatggacggcagcttctctgtgaagcctttaaagcagaagcaaattgtggaccgggtcagctacctcctgcaggagatctatggcattgagaacaagaacaaccaggagaccaagccctcggacgacgagaacagcgacaacagcaacgagtgtgtggtgtgcctgtccgacctgcgggacacgctgatcctgccctgccgccacctgtgcctctgtacctcctgcgccgacacgctgcgctaccaggccaacaactgccccatctgccggctgcctttccgggccctcctgcagatccgggcggtgcggaagaagccaggagccctgtcccccgtgtccttcagccccgtcctggcccagagcctggagcatgatgagcactcttgtccctttaaaaaatcaaagccgcaccccgcctccctggccagcaagaaacctaaaagggaaacaaactctgacagcgtcccacctggctacgagcccatctcgctgctcgaggcgctcaacggcctccgggctgtctccccggccatcccctcggcccctctttatgaagaaatcacctattcaggcatctcggacggcctgtcccaggccagctgtcccctcgcggctatcgaccacatcctggacagcagccgccagaagggcaggccgcagagcaaggcccccgacagcaccctacggtccccgtcttcccccatccacgaagaggatgaggagaagctctccgaggacgtggacgcccctcccccactgggtggcgcagagctggccctgcgggaaagcagctcccctgagagtttcataacagaagaggttgatgagtcgtcgtcaccacagcaagggacccgagcagcttccattgagaatgtcctgcaggacagcagccccgagcactgtggccgaggcccacctgctgacatctacctgccaggacggcccacctccatggagacggcccacggcctcgccaccaccagccccacctggcctccacttggtggccccagccccgatcccagcgccgccgagctgaccccactctgagagcctggccgagctggcagcatggagccctcggctccccagactttgccgaggggctgctccggaccccgttgtgagccggcctcctgtctgcatgccccctgtggccaccaggctccgaggggccgtggtgactcttgatcaaagagcacagtgaactgtcccttctgagtctcccttttctacagttgatatatttgtaactggtacaagatgaaggacagcagctttccatccctagttcagagcccccgttccccagggtcctgtgggctgagcggctggggctggggctgcccacgtgtggcctccgctggctctgcctgctcctgcaacagtgcggtccctgcccggagaactcaggaggcctgcagaagagaactgattggtggtcgaagcaccatcttcacagatgttcaggggcagtggggggctccaggcacggtcaatgaaggaaacagtgcctgtccacccaccctgcgtgtcactgtggcggcctggctgtcgctgctttttgtcctctgccgtgtttgcgcggcctcagtgccctccctggtgcgtctgcgctggggccctcagtgctcggggccttggggtgcatgggcgccgccctgggcagctagagtgtctcagcccggtgctgggcctggccgaggggcggaggcacagctgcttccagcagccagcattcagtggccttgtcaccaagctccacacctcctcctggtgctggctttggtgacatcacaaggcccctccaggtgcaggggcttctgtttggcaggcccctgccagggaggacctggtggcctcctcattctcttttgccattggaatgtccccttgcagttctcttctcttttttttttttttggagatggagtttcactcttgctgcccaggctggagtgcagtggctcaatctcgggtcactgcaacctccgcctcccgggttcaagtgatcgtcctgccttaggctcctgagtagctggggattacaggtgcctaccagcatgctcggctaatttttttgtatttttagtagagaagggatttcaccatgttggccgggctggtctcaaactcctaaggtcatccacctgcctcggcctcccagagtgctgagattacaggcgtgagcctccgcgcccggcccccttgcagttctctctgatttggtttgttctgtctcaggcttctgtggcaggactggcccagggaggaggaagccagcagcacacctggggaatggggtcccggccgggaggcttggcctctgggcgacctcgtcctgttttgtttgtttgtttgtttgtttttttaaaggtaaacctcctgggccgcagatggcaaagggagtgcctgggcctggtgacccagggctggatccacccctgcggagccctgggccaggcaggtgtctgctgctcacctggctctggagggctgccctgcagctgggcctggggacaggtcggctgtggggcagctcagtaccctccctgaggctcacggtggctccgagcatgagctctgcctcctgggcgagacccagcagtggacagcacggtcctcacacccagctccctgcacacccaggccagccacccctcccgctcgtgcacaggcacgcagatgcgctcacacgtacacacacacaaatgcacgcccacttgcacatgctcacgcacacgttcacacatgcacactcacgctcacacatgctgtcacgcatacacacacgcacatactcctgcacatgttcccatgcatgtgtgtgcactcggaccgagcatctcccacgcacctctaccccaccccaagcacctctctccccccatgcacctctccccaacaacacacacagccccctgcaccgcccgccccccgcccccaccaaggccccagcctctggccatcagtcctggtgccagagctttgcgtgaagttcgggccgcagagtggcccgctgggactcccatgtgctgccgtctgatgtgctcagatgggctcatcgttggttcgtttttactgtatatttatagtaataaaatcatgcagcaaaaaaaaaaaaaacaaagggcggccgct

SEQ ID NO: 64448 - DNA, 4277 bp, Homo sapiens
gacgagcgtccgtgcggcctggtccgggccatgtccgcgtgaggaccccgccgctgtcgccgctcccgttccggccctggcccctctgcccggcagcgcggcgcaccatgggctccattctcagccgccgcatcgcgggggtggaggacatcgacatccaggcgaactcggcctatcgctaccctccgaagtccggaaactactttgcttcgcactttttcatgggaggagagaaattcgacaccccccaccctgaaggttacctctttggagagaacatggatctgaacttcctgggcagccgcccggtccagtttccctacgtcactcctgccccccacgagcccgtgaagacgctgcggagcctggtgaacatccgcaaagactccctgcggctggtgaggtacaaagacgatgccgacagccccaccgaggacggcgacaagccccgggtgctctacagcctggagttcaccttcgacgccgatgcccgcgtggccatcaccatctactgccaggcatcggaggagttcctgaacggcagggcagtatacagccccaagagcccctcgctacagtccgagaccgtccactacaagagaggggtgagccagcagttctccctgccctccttcaagattgacttctcggaatggaaggatgacgagctgaactttgacctggaccggggcgtgtttccagtagtcatccaggctgtggtggacgaaggagatgtggtggaagtgactggccacgcccacgtgctcttggctgcctttgaaaagcacatggacggcagcttctctgtgaagcctttaaagcagaagcaaattgtggaccgggtcagctacctcctgcaggagatctatggcattgagaacaagaacaaccaggagaccaagccctcggacgacgagaacagcgacaacagcaacgagtgtgtggtgtgcctgtccgacctgcgggacacgctgatcctgccctgccgccacctgtgcctctgtacctcctgcgccgacacgctgcgctaccaggccaacaactgccccatctgccggctgcctttccgggccctcctgcagatccgggcggtgcggaagaagccaggagccctgtcccccgtgtccttcagccccgtcctggcccagagcctggagcatgatgagcactcttgtccctttaaaaaatcaaagccgcaccccgcctccctggccagcaagaaacctaaaagggaaacaaactctgacagcgtcccacctggctacgagcccatctcgctgctcgaggcgctcaacggcctccgggctgtctccccggccatcccctcggcccctctttatgaagaaatcacctattcaggcatctcggacggcctgtcccaggccagctgtcccctcgcggctatcgaccacatcctggacagcagccgccagaagggcaggccgcagagcaaggcccccgacagcaccctacggtccccgtcttcccccatccacgaagaggatgaggagaagctctccgaggacgtggacgcccctcccccactgggtggcgcagagctggccctgcgggaaagcagctcccctgagagtttcataacagaagaggttgatgagtcgtcgtcaccacagcaagggacccgagcagcttccattgagaatgtcctgcaggacagcagccccgagcactgtggccgaggcccacctgctgacatctacctgccaggacggcccacctccatggagacggcccacggcctcgccaccaccagccccacctggcctccacttggtggccccagccccgatcccagcgccgccgagctgaccccactctgagagcctggccgagctggcagcatggagccctcggctccccagactttgccgaggggctgctccggaccccgttgtgagccggcctcctgtctgcatgccccctgtggccaccaggctccgaggggccgtggtgactcttgatcaaagagcacagtgaactgtcccttctgagtctcccttttctacagttgatatatttgtaactggtacaagatgaaggacagcagctttccatccctagttcagagcccccgttccccagggtcctgtgggctgagcggctggggctggggctgcccacgtgtggcctccgctggctctgcctgctcctgcaacagtgcggtccctgcccggagaactcaggaggcctgcagaagagaactgattggtggtcgaagcaccatcttcacagatgttcaggggcagtggggggctccaggcacggtcaatgaaggaaacagtgcctgtccacccaccctgcgtgtcactgtggcggcctggctgtcgctgctttttgtcctctgccgtgtttgcgcggcctcagtgccctccctggtgcgtctgcgctggggccctcagtgctcggggccttggggtgcatgggcgccgccctgggcagctagagtgtctcagcccggtgctgggcctggccgaggggcggaggcacagctgcttccagcagccagcattcagtggccttgtcaccaagctccacacctcctcctggtgctggctttggtgacatcacaaggcccctccaggtgcaggggcttctgtttggcaggcccctgccagggaggacctggtggcctcctcattctcttttgccattggaatgtccccttgcagttctcttctcttttttttttttttggagatggagtttcactcttgctgcccaggctggagtgcagtggctcaatctcgggtcactgcaacctccgcctcccgggttcaagtgatcgtcctgccttaggctcctgagtagctggggattacaggtgcctaccagcatgctcggctaatttttttgtatttttagtagagaagggatttcaccatgttggccgggctggtctcaaactcctaaggtcatccacctgcctcggcctcccagagtgctgagattacaggcgtgagcctccgcgcccggcccccttgcagttctctctgatttggtttgttctgtctcaggcttctgtggcaggactggcccagggaggaggaagccagcagcacacctggggaatggggtcccggccgggaggcttggcctctgggcgacctcgtcctgttttgtttgtttgtttgtttgtttttttaaaggtaaacctcctgggccgcagatggcaaagggagtgcctgggcctggtgacccagggctggatccacccctgcggagccctgggccaggcaggtgtctgctgctcacctggctctggagggctgccctgcagctgggcctggggacaggtcggctgtggggcagctcagtaccctccctgaggctcacggtggctccgagcatgagctctgcctcctgggcgagacccagcagtggacagcacggtcctcacacccagctccctgcacacccaggccagccacccctcccgctcgtgcacaggcacgcagatgcgctcacacgtacacacacacaaatgcacgcccacttgcacatgctcacgcacacgttcacacatgcacactcacgctcacacatgctgtcacgcatacacacacgcacatactcctgcacatgttcccatgcatgtgtgtgcactcggaccgagcatctcccacgcacctctaccccaccccaagcacctctctccccccatgcacctctccccaacaacacacacagccccctgcaccgcccgccccccgcccccaccaaggccccagcctctggccatcagtcctggtgccagagctttgcgtgaagttcgggccgcagagtggcccgctgggactcccatgtgctgccgtctgatgtgctcagatgggctcatcgttggttcgtttttactgtatatttatagtaataaaatcatgcagcaaatatcctgtctgctccttcctccgggtgcagccctcaggattgtggctgtttcctgacccggagttttgccgctgggtggttggcggtggctcccgcaccgtggcagctccacggcctctgcctggcttccctctggggtcagggcagtgagcaaggtgagggctaacgagaacgggcagctcccagccatccctgtcagggctagttgtctggttggagggaagccacaccctccagattgggctctctcgtgaacaggtggttggggagcccagggcctccaggtttgtgagtagtcgctccggtccccatctctagtcctgatcatctcaaggcatttgctgagcacctgctgtgcgtcagtggaggcagaa

SEQ ID NO: 64449 - DNA, 3063 bp, Homo sapiens
ctggagcagctccacgtggcgggagcggagcacctggccgggcctcgcctcaacccagggaaccctcggacgacgagaacagcgacaacagcaacgagtgtgtggtgtgcctgtccgacctgcgggacacgctgatcctgccctgccgccacctgtgcctctgtacctcctgcgccgacacgctgcgctaccaggccaacaactgccccatctgccggctgcctttccgggccctcctgcagatccgggcggtgcggaagaagccaggagccctgtcccccgtgtccttcagccccgtcctggcccagagcctggagcatgatgagcactcttgtccctttaaaaaatcaaagccgcaccccgcctccctggccagcaagaaacctaaaagggaaacaaactctgacagcgtcccacctggctacgagcccatctcgctgctcgaggcgctcaacggcctccgggctgtctccccggccatcccctcggcccctctttatgaagaaatcacctattcaggcatctcggacggcctgtcccaggccagctgtcccctcgcggctatcgaccacatcctggacagcagccgccagaagggcaggccgcagagcaaggcccccgacagcaccctacggtccccgtcttcccccatccacgaagaggatgaggagaagctctccgaggacgtggacgcccctcccccactgggtggcgcagagctggccctgcgggaaagcagctcccctgagagtttcataacagaagaggttgatgagtcgtcgtcaccacagcaagggacccgagcagcttccattgagaatgtcctgcaggacagcagccccgagcactgtggccgaggcccacctgctgacatctacctgccaggacggcccacctccatggagacggcccacggcctcgccaccaccagccccacctggcctccacttggtggccccagccccgatcccagcgccgccgagctgaccccactctgagagcctggccgagctggcagcatggagccctcggctccccagactttgccgaggggctgctccggaccccgttgtgagccggcctcctgtctgcatgccccctgtggccaccaggctccgaggggccgtggtgactcttgatcaaagagcacagtgaactgtcccttctgagtctcccttttctacagttgatatatttgtaactggtacaagatgaaggacagcagctttccatccctagttcagagcccccgttccccagggtcctgtgggctgagcggctggggctggggctgcccacgtgtggcctccgctggctctgcctgctcctgcaacagtgcggtccctgcccggagaactcaggaggcctgcagaagagaactgattggtggtcgaagcaccatcttcacagatgttcaggggcagtggggggctccaggcacggtcaatgaaggaaacagtgcctgtccacccaccctgcgtgtcactgtggcggcctggctgtcgctgctttttgtcctctgccgtgtttgcgcggcctcagtgccctccctggtgcgtctgcgctggggccctcagtgctcggggccttggggtgcatgggcgccgccctgggcagctagagtgtctcagcccggtgctgggcctggccgaggggcggaggcacagctgcttccagcagccagcattcagtggccttgtcaccaagctccacacctcctcctggtgctggctttggtgacatcacaaggcccctccaggtgcaggggcttctgtttggcaggcccctgccagggaggacctggtggcctcctcattctcttttgccattggaatgtccccttgcagttctcttctcttttttttttttttggagatggagtttcactcttgctgcccaggctggagtgcagtggctcaatctcgggtcactgcaacctccgcctcccgggttcaagtgatcgtcctgccttaggctcctgagtagctggggattacaggtgcctaccagcatgctcggctaatttttttgtatttttagtagagaagggatttcaccatgttggccgggctggtctcaaactcctaaggtcatccacctgcctcggcctcccagagtgctgagattacaggcgtgagcctccgcgcccggcccccttgcagttctctctgatttggtttgttctgtctcaggcttctgtggcaggactggcccagggaggaggaagccagcagcacacctggggaatggggtcccggccgggaggcttggcctctgggcgacctcgtcctgttttgtttgtttgtttgtttgtttttttaaaggtaaacctcctgggccgcagatggcaaagggagtgcctgggcctggtgacccagggctggatccacccctgcggagccctgggccaggcaggtgtctgctgctcacctggctctggagggctgccctgcagctgggcctggggacaggtcggctgtggggcagctcagtaccctccctgaggctcacggtggctccgagcatgagctctgcctcctgggcgagacccagcagtggacagcacggtcctcacacccagctccctgcacacccaggccagccacccctcccgctcgtgcacaggcacgcagatgcgctcacacgtacacacacacaaatgcacgcccacttgcacatgctcacgcacacgttcacacatgcacactcacgctcacacatgctgtcacgcatacacacacgcacatactcctgcacatgttcccatgcatgtgtgtgcactcggaccgagcatctcccacgcacctctaccccaccccaagcacctctctccccccatgcacctctccccaacaacacacacagccccctgcaccgcccgccccccgcccccaccaaggccccagcctctggccatcagtcctggtgccagagctttgcgtgaagttcgggccgcagagtggcccgctgggactcccatgtgctgccgtctgatgtgctcagatgggctcatcgttggttcgtttttactgtatatttatagtaataaaatcatgcagcaaa

SEQ ID NO: 64450 - DNA, 3738 bp, Homo sapiens
gacgagcgtccgtgcggcctggtccgggccatgtccgcgtgaggaccccgccgctgtcgccgctcccgttccggccctggcccctctgcccggcagcgcggcgcaccatgggctccattctcagccgccgcatcgcgggggtggaggacatcgacatccaggcgaactcggcctatcgctaccctccgaagtccggaaactactttgcttcgcactttttcatgggaggagagaaattcgacaccccccaccctgaaggttacctctttggagagaacatggatctgaacttcctgggcagccgcccggtccagtttccctacgtcactcctgccccccacgagcccgtgaagacgctgcggagcctggtgaacatccgcaaagactccctgcggctggtgaggtacaaagacgatgccgacagccccaccgaggacggcgacaagccccgggtgctctacagcctggagttcaccttcgacgccgatgcccgcgtggccatcaccatctactgccaggcatcggaggagttcctgaacggcagggcagtatacagccccaagagcccctcgctacagtccgagaccgtccactacaagagaggggtgagccagcagttctccctgccctccttcaagattgacttctcggaatggaaggatgacgagctgaactttgacctggaccggggcgtgtttccagtagtcatccaggctgtggtggacgaaggagatgtggtggaagtgactggccacgcccacgtgctcttggctgcctttgaaaagcacatggacggcagcttctctgtgaagcctttaaagcagaagcaaattgtggaccgggtcagctacctcctgcaggagatctatggcattgagaacaagaacaaccaggagaccaagccctcggacgacgagaacagcgacaacagcaacgagtgtgtggtgtgcctgtccgacctgcgggacacgctgatcctgccctgccgccacctgtgcctctgtacctcctgcgccgacacgctgcgctaccaggccaacaactgccccatctgccggctgcctttccgggccctcctgcagatccgggcggtgcggaagaagccaggagccctgtcccccgtgtccttcagccccgtcctggcccagagcctggagcatgatgagcactcttgtccctttaaaaaatcaaagccgcaccccgcctccctggccagcaagaaacctaaaagggaaacaaactctgacagcgtcccacctggctacgagcccatctcgctgctcgaggcgctcaacggcctccgggctgtctccccggccatcccctcggcccctctttatgaagaaatcacctattcaggcatctcggacggcctgtcccaggccagctgtcccctcgcggctatcgaccacatcctggacagcagccgccagaagggcaggccgcagagcaaggcccccgacagcaccctacggtccccgtcttcccccatccacgaagaggatgaggagaagctctccgaggacgtggacgcccctcccccactgggtggcgcagagctggccctgcgggaaagcagctcccctgagagtttcataacagaagaggttgatgagtcgtcgtcaccacagcaagggacccgagcagcttccattgagaatgtcctgcaggacagcagccccgagcactgtggccgaggcccacctgctgacatctacctgccaggacggcccacctccatggagacggcccacggcctcgccaccaccagccccacctggcctccacttggtggccccagccccgatcccagcgccgccgagctgaccccactctgagagcctggccgagctggcagcatggagccctcggctccccagactttgccgaggggctgctccggaccccgttgtgagccggcctcctgtctgcatgccccctgtggccaccaggctccgaggggccgtggtgactcttgatcaaagagcacagtgaactgtcccttctgagtctcccttttctacagttgatatatttgtaactggtacaagatgaaggacagcagctttccatccctagttcagagcccccgttccccagggtcctgtgggctgagcggctggggctggggctgcccacgtgtggcctccgctggctctgcctgctcctgcaacagtgcggtccctgcccggagaactcaggaggcctgcagaagagaactgattggtggtcgaagcaccatcttcacagatgttcaggggcagtggggggctccaggcacggtcaatgaaggaaacagtgcctgtccacccaccctgcgtgtcactgtggcggcctggctgtcgctgctttttgtcctctgccgtgtttgcgcggcctcagtgccctccctggtgcgtctgcgctggggccctcagtgctcggggccttggggtgcatgggcgccgccctgggcagctagagtgtctcagcccggtgctgggcctggccgaggggcggaggcacagctgcttccagcagccagcattcagtggccttgtcaccaagctccacacctcctcctggtgctggctttggtgacatcacaaggcccctccaggtgcaggggcttctgtttggcaggcccctgccagggaggacctggtggcctcctcattctcttttgccattggaatgtccccttgcagttctcttctcttttttttttttttggagatggagtttcactcttgctgcccaggctggagtgcagtggctcaatctcgggtcactgcaacctccgcctcccgggttcaagtgatcgtcctgccttaggctcctgagtagctggggattacaggtgcctaccagcatgctcggctaatttttttgtatttttagtagagaagggatttcaccatgttggccgggctggtctcaaactcctaaggtcatccacctgcctcggcctcccagagtgctgagattacaggcgtgagcctccgcgcccggcccccttgcagttctctctgatttggtttgttctgtctcaggcttctgtggcaggactggcccagggaggaggaagccagcagcacacctggggaatggggtcccggccgggaggcttggcctctgggcgacctcgtcctgttttgtttgtttgtttgtttgtttttttaaaggtaaacctcctgggccgcagatggcaaagggagtgcctgggcctggtgacccagggctggatccacccctgcggagccctgggccaggcaggtgtctgctgctcacctggctctggagggctgccctgcagctgggcctggggacaggtcggctgtggggcagctcagtaccctccctgaggctcacggtggctccgagcatgagctctgcctcctgggcgagacccagcagtggacagcacggtcctcacacccagctccctgcacacccaggccagccacccctcccgctcgtgcacaggcacgcagatgcgctcacacgtacacacacacaaatgcactccccccatgcacctctccccaacaacacacacagccccctgcaccgcccgccccccgcccccaccaaggccccagcctctggccatcagtcctggtgccagagctttgcgtgaagttcgggccgcagagtggcccgctgggactcccatgtgctgccgtctgatgtgctcagatgggctcatcgttggttcgtttttactgtatatttatagtaataaaatcatgcagcaaa

SEQ ID NO: 64451 - DNA, 1936 bp, Homo sapiens
  misc_feature (19)..(19): n is a, c, g, or t
tatacgcaggctggtacgncccggagtttatgtcccttctgagtctcccttttctacagttgatatatttgtaactggtacaagatgaaggacagcagctttccatccctagttcagagcccccgttccccagggtcctgtgggctgagcggctggggctggggctgcccacgtgtggcctccgctggctctgcctgctcctgcaacagtgcggtccctgcccggagaactcaggaggcctgcagaagagaactgattggtggtcgaagcaccatcttcacagatgttcaggggcagtggggggctccaggcacggtcaatgaaggaaacagtgcctgtccacccaccctgcgtgtcactgtggcggcctggctgtcgctgctttttgtcctctgccgtgtttgcgcggcctcagtgccctccctggtgcgtctgcgctggggccctcagtgctcggggccttggggtgcatgggcgccgccctgggcagctagagtgtctcagcccggtgctgggcctggccgaggggcggaggcacagctgcttccagcagccagcattcagtggccttgtcaccaagctccacacctcctcctggtgctggctttggtgacatcacaaggcccctccaggtgcaggggcttctgtttggcaggcccctgccagggaggacctggtggcctcctcattctcttttgccattggaatgtccccttgcagttctcttctcttttttttttttttggagatggagtttcactcttgctgcccaggctggagtgcagtggctcaatctcgggtcactgcaacctccgcctcccgggttcaagtgatcgtcctgccttaggctcctgagtagctggggattacaggtgcctaccagcatgctcggctaatttttttgtatttttagtagagaagggatttcaccatgttggccgggctggtctcaaactcctaaggtcatccacctgcctcggcctcccagagtgctgagattacaggcgtgagcctccgcgcccggcccccttgcagttctctctgatttggtttgttctgtctcaggcttctgtggcaggactggcccagggaggaggaagccagcagcacacctggggaatggggtcccggccgggaggcttggcctctgggcgacctcgtcctgttttgtttgtttgtttgtttgtttttttaaaggtaaacctcctgggccgcagatggcaaagggagtgcctgggcctggtgacccagggctggatccacccctgcggagccctgggccaggcaggtgtctgctgctcacctggctctggagggctgccctgcagctgggcctggggacaggtcggctgtggggcagctcagtaccctccctgaggctcacggtggctccgagcatgagctctgcctcctgggcgagacccagcagtggacagcacggtcctcacacccagctccctgcacacccaggccagccacccctcccgctcgtgcacaggcacgcagatgcgctcacacgtacacacacacaaatgcacgcccacttgcacatgctcacgcacacgttcacacatgcacactcacgctcacacatgctgtcacgcatacacacacgcacatactcctgcacatgttcccatgcatgtgtgtgcactcggaccgagcatctcccacgcacctctaccccaccccaagcacctctctccccccatgcacctctccccaacaacacacacagccccctgcaccgcccgccccccgcccccaccaaggccccagcctctggccatcagtcctggtgccagagctttgcgtgaagttcgggccgcagagtggcccgctgggactcccatgtgctgccgtctgatgtgctcagatgggctcatcgttggttcgtttttactgtatatttatagtaataaaatcatgcagcaaa

SEQ ID NO: 64452 - DNA, 1410 bp, Homo sapiens
  misc_feature (14)..(14): n is a, c, g, or t
  misc_feature (20)..(20): n is a, c, g, or t
tccgttggcagtancctgcngtattgtagcgaggctgggtcgcgcttgtacaagctccacacctcctcctggtgctggctttggtgacatcacaaggcccctccaggtgcaggggcttctgtttggcaggcccctgccagggaggacctggtggcctcctcattctcttttgccattggaatgtccccttgcagttctcttctcttttttttttttttggagatggagtttcactcttgctgcccaggctggagtgcagtggctcaatctcgggtcactgcaacctccgcctcccgggttcaagtgatcgtcctgccttaggctcctgagtagctggggattacaggtgcctaccagcatgctcggctaatttttttgtatttttagtagagaagggatttcaccatgttggccgggctggtctcaaactcctaaggtcatccacctgcctcggcctcccagagtgctgagattacaggcgtgagcctccgcgcccggcccccttgcagttctctctgatttggtttgttctgtctcaggcttctgtggcaggactggcccagggaggaggaagccagcagcacacctggggaatggggtcccggccgggaggcttggcctctgggcgacctcgtcctgttttgtttgtttgtttgtttgtttttttaaaggtaaacctcctgggccgcagatggcaaagggagtgcctgggcctggtgacccagggctggatccacccctgcggagccctgggccaggcaggtgtctgctgctcacctggctctggagggctgccctgcagctgggcctggggacaggtcggctgtggggcagctcagtaccctccctgaggctcacggtggctccgagcatgagctctgcctcctgggcgagacccagcagtggacagcacggtcctcacacccagctccctgcacacccaggccagccacccctcccgctcgtgcacaggcacgcagatgcgctcacacgtacacacacacaaatgcacgcccacttgcacatgctcacgcacacgttcacacatgcacactcacgctcacacatgctgtcacgcatacacacacgcacatactcctgcacatgttcccatgcatgtgtgtgcactcggaccgagcatctcccacgcacctctaccccaccccaagcacctctctccccccatgcacctctccccaacaacacacacagccccctgcaccgcccgccccccgcccccaccaaggccccagcctctggccatcagtcctggtgccagagctttgcgtgaagttcgggccgcagagtggcccgctgggactcccatgtgctgccgtctgatgtgctcagatgggctcatcgttggttcgtttttactgtatatttatagtaataaaatcatgcagcaaa

SEQ ID NO: 64453 - DNA, 1043 bp, Homo sapiens
tagctagtacgagctgggtttgaatcggccgaggtcccatgttggccgggctggtctcaaactcctaaggtcatccacctgcctcggcctcccagagtgctgagattacaggcgtgagcctccgcgcccggcccccttgcagttctctctgatttggtttgttctgtctcaggcttctgtggcaggactggcccagggaggaggaagccagcagcacacctggggaatggggtcccggccgggaggcttggcctctgggcgacctcgtcctgttttgtttgtttgtttgtttgtttttttaaaggtaaacctcctgggccgcagatggcaaagggagtgcctgggcctggtgacccagggctggatccacccctgcggagccctgggccaggcaggtgtctgctgctcacctggctctggagggctgccctgcagctgggcctggggacaggtcggctgtggggcagctcagtaccctccctgaggctcacggtggctccgagcatgagctctgcctcctgggcgagacccagcagtggacagcacggtcctcacacccagctccctgcacacccaggccagccacccctcccgctcgtgcacaggcacgcagatgcgctcacacgtacacacacacaaatgcacgcccacttgcacatgctcacgcacacgttcacacatgcacactcacgctcacacatgctgtcacgcatacacacacgcacatactcctgcacatgttcccatgcatgtgtgtgcactcggaccgagcatctcccacgcacctctaccccaccccaagcacctctctccccccatgcacctctccccaacaacacacacagccccctgcaccgcccgccccccgcccccaccaaggccccagcctctggccatcagtcctggtgccagagctttgcgtgaagttcgggccgcagagtggcccgctgggactcccatgtgctgccgtctgatgtgctcagatgggctcatcgttggttcgtttttactgtatatttatagtaataaaatcatgcagcaaa

SEQ ID NO: 64454 - DNA, 544 bp, Homo sapiens
tgggtgtctagaggatccctgagagactgtgttgcactggacagcacggtcctcacacccagctccctgcacacccaggccagccacccctcccgctcgtgcacaggcacgcagatgcgctcacacgtacacacacacaaatgcacgcccacttgcacatgctcacgcacacgttcacacatgcacactcacgctcacacatgctgtcacgcatacacacacgcacatactcctgcacatgttcccatgcatgtgtgtgcactcggaccgagcatctcccacgcacctctaccccaccccaagcacctctctccccccatgcacctctccccaacaacacacacagccccctgcaccgcccgccccccgcccccaccaaggccccagcctctggccatcagtcctggtgccagagctttgcgtgaagttcgggccgcagagtggcccgctgggactcccatgtgctgccgtctgatgtgctcagatgggctcatcgttggttcgtttttactgtatatttatagtaataaaatcatgcagcaaa

SEQ ID NO: 64455 - DNA, 235 bp, Homo sapiens
tccaggtgctgctggttgggtgggggcaagcagcaggttttccctgcccttctcctggcccccaggggttgagctggactgacccctggtatggaagcctggtaagttggaggcagggctaggccaggtgggtatggaggagccctcatatggcagttggcgagggcccagtgagcccctctctgctctccaggtggaccgggtcagctacctcctgcaggagatctatggcatt

SEQ ID NO: 64456 - DNA, 393 bp, Homo sapiens
tggctggggcagggtggccaacccaggcggccacgcaggggtgctcagaggcgccagcttgaccaccttaacctctttgtctttctcccctgcagcacatggacggcagcttctctgtgaagcctttaaagcagaagcaaattgtaagtcatcagaggaaatatgacgtgcttgaattaaaagacacacatatacaatcactcacacgcatactcatgcatagacacacactcatacacacgcacatatactcatacacgctcatacacactcatacacattcacttgcacatatatacggacacacatacataccatcagacactcacattcacacatatatagacacataaacacacagacacacacatacgcacataaacacactcctac

SEQ ID NO: 64457 - DNA, 6455 bp, Homo sapiens
  misc_feature (2689)..(2689): n is a, c, g, or t
gacgagcgtccgtgcggcctggtccgggccatgtccgcgtgaggaccccgccgctgtcgccgctcccgttccggccctggcccctctgcccggcagcgcggcgcaccatgggctccattctcagccgccgcatcgcgggggtggaggacatcgacatccaggcgaactcggcctatcgctaccctccgaagtccggaaactactttgcttcgcactttttcatgggaggagagaaattcgacaccccccaccctgaaggttacctctttggagagaacatggatctgaacttcctgggcagccgcccggtccagtttccctacgtcactcctgccccccacgagcccgtgaagacgctgcggagcctggtgaacatccgcaaagactccctgcggctggtgaggtacaaagacgatgccgacagccccaccgaggacggcgacaagccccgggtgctctacagcctggagttcaccttcgacgccgatgcccgcgtggccatcaccatctactgccaggcatcggaggagttcctgaacggcagggcagtatacagccccaagagcccctcgctacagtccgagaccgtccactacaagagaggggtgagccagcagttctccctgccctccttcaagattgacttctcggaatggaaggatgacgagctgaactttgacctggaccggggcgtgtttccagtagtcatccaggctgtggtggacgaaggagatgtggtggaagtgactggccacgcccacgtgctcttggctgcctttgaaaagcacatggacggcagcttctctgtgaagcctttaaagcagaagcaaattgtggaccgggtcagctacctcctgcaggagatctatggcattgagaacaagaacaaccaggagaccaagccctcggacgacgagaacagcgacaacagcaacgagtgtgtggtgtgcctgtccgacctgcgggacacgctgatcctgccctgccgccacctgtgcctctgtacctcctgcgccgacacgctgcgctaccaggccaacaactgccccatctgccggctgcctttccgggccctcctgcagatccgggcggtgcggaagaagccaggagccctgtcccccgtgtccttcagccccgtcctggcccagagcctggagcatgatgagcactcttgtccctttaaaaaatcaaagccgcaccccgcctccctggccagcaagaaacctaaaagggaaacaaactctgacagcgtcccacctggctacgagcccatctcgctgctcgaggcgctcaacggcctccgggctgtctccccggccatcccctcggcccctctttatgaagaaatcacctattcaggcatctcggacggcctgtcccaggccagctgtcccctcgcggctatcgaccacatcctggacagcagccgccagaagggcaggccgcagagcaaggcccccgacagcaccctacggtccccgtcttcccccatccacgaagaggatgaggagaagctctccgaggacgtggacgcccctcccccactgggtggcgcagagctggccctgcgggaaagcagctcccctgagagtttcataacagaagaggttgatgagtcgtcgtcaccacagcaagggacccgagcagcttccattgagaatgtcctgcaggacagcagccccgagcactgtggccgaggcccacctgctgacatctacctgccagccctggggcccgactcctgctctgttggtatagacgagtaagccggtacgtgaccttccagacgcgcttcgggggctctgacgcgcgtccttggagagaggagccctcccctgctctctggcgggggttccttctggtttttgggtcttcgtccgcatccgcatcttcccaggggccctggattccgaatccagagctctccagtggctgctgcaccttcccccagaaagtggcctcctggggggtcctgactttcggggccagaggtctctccatctggactaggcggccggtcaggctcttcttccagccttgaggggccctggaacagtcccagcccaggcagggagacagacacagcccaggtgcgccagagccactgtccactgcgggaggcaggagcttgagggatgagggcagcaccgtggagggaaccccagggagacatggggtgagcgtcccaaggggagaggcctgggcctggccttgttccggatggtcccaccatgagttcgcatcggtcctgcagcagacacgttaggacgctcagcaggtccactcccgtgttccggtcatggctttaacaattcatggggaaagaatgcgccccgattgggagagcccctggatcacgtcttcccaagctcagtccctgtctcttggagggagtccgtcctcgaggggccctctggtgcccaggggagagtatcttgcgtcctgtcctgagggcgtccgctcacacagccacctgctcccccgctccctccttcccttgtcagcatggccaccgtgggcctggcatcaccatgggcctggcacacagtccctcgtgggctgcctttgtgccatgagcccactgctgccgactcacctgtccctcccagtactggaaccttctggaacaccagcactaaaagataggaggccctgtgaggttggcatcccccatccccccccaagaggngccctctaccagggtggcccaggtgagtgttttacagaaggcggctctgtccaggcagtggttcgcacctataagcccggtactttgggagaccgaggggatagatcacttgagcccaggaattcaagatcagtgtagaaaacatagaccccctctctataaaaaataaaaaattggcttgggcgtggtagcttgtgcctgtggtcccagctactcaggggtgctgaggtgggaggattgccggagctggggaggtcaaggcccactccagcctgagacgctgtctcaataaaaaaaaatacacacacacccacccacccactccagcctgagaccctgtctcaagaaaaaaaaaatacacacacacacacacacacacacacacacacacacacacacacgggggagagagagaaggcagctccaggagtgccaccaaaatgtaggcagacggattggggaccctctgccttcccagagggtcttggcacacaagctgcgtgcagctctggtctgccgaggcccatgcagcctgctgggaggtgcctggccgggggtgcaggctctaagaggccctttccccttgggtggacttgagccgggtcagggagaacttcgcttcttttgactgcgctctgcattcccatgaacctctgtcttcttgagcccagcgagtccctctgttgacccctgtcctgagccattatacccctagattgaaacagtcagcacctttcagacggccccggcctgcgcatcggtggaaggtgccatgcgaatgtcacgattcaggtcaagcttccggagctggggagtgcaggtgtgatctagaacagggctcacagcctcggaaacctgctctcgccgcggcccccgaagaaaatagacgcccttcaccggagagtggggcctgggccgtgtctgctgggagccatgtgtcagggctggtggctgggtgtcaggcagccctgaggccatgctggccccgtcccaggctctgcaccagcaccattgcccaagccccagggacgccagacccatccggggacagcgcccggcggcgtcgtgcaggccacagtctgggcattggggctctgtgggaggctcctctctttgccttgcagtagccatccgggggctactctgagcacgggcttgttctcacccagggccgctcccgacccctgcaccctgggttgaccgagttccaccctaacccagccgtaagaaccttggcaggacagtggctggccacatcccaggaaaccggaaccagggcaagggcaggaggcccagagggcatccaccgcggtgccgtgtcgcgctctgactcggggctgcagatctgctgtgggtgtccggggatctgggatcgtctgtcccaagagggacacagcgtatttggcacagttagggagtccccgggcccttggtgtgctcacatctgagtgaatgctgttgtggccacaggcggcgggagtgggggtgctggatggcccagcccctctggggctccagatcggtaggagcgggtggcgtggcaccaggcatccgagtgtgaccctcctccctctgctcccacctgcaggacggcccacctccatggagacggcccacggcctcgccaccaccagccccacctggcctccacttggtggccccagccccgatcccagcgccgccgagctgaccccactctgagagcctggccgagctggcagcatggagccctcggctccccagactttgccgaggggctgctccggaccccgttgtgagccggcctcctgtctgcatgccccctgtggccaccaggctccgaggggccgtggtgactcttgatcaaagagcacagtgaactgtcccttctgagtctcccttttctacagttgatatatttgtaactggtacaagatgaaggacagcagctttccatccctagttcagagcccccgttccccagggtcctgtgggctgagcggctggggctggggctgcccacgtgtggcctccgctggctctgcctgctcctgcaacagtgcggtccctgcccggagaactcaggaggcctgcagaagagaactgattggtggtcgaagcaccatcttcacagatgttcaggggcagtggggggctccaggcacggtcaatgaaggaaacagtgcctgtccacccaccctgcgtgtcactgtggcggcctggctgtcgctgctttttgtcctctgccgtgtttgcgcggcctcagtgccctccctggtgcgtctgcgctggggccctcagtgctcggggccttggggtgcatgggcgccgccctgggcagctagagtgtctcagcccggtgctgggcctggccgaggggcggaggcacagctgcttccagcagccagcattcagtggccttgtcaccaagctccacacctcctcctggtgctggctttggtgacatcacaaggcccctccaggtgcaggggcttctgtttggcaggcccctgccagggaggacctggtggcctcctcattctcttttgccattggaatgtccccttgcagttctcttctcttttttttttttttggagatggagtttcactcttgctgcccaggctggagtgcagtggctcaatctcgggtcactgcaacctccgcctcccgggttcaagtgatcgtcctgccttaggctcctgagtagctggggattacaggtgcctaccagcatgctcggctaatttttttgtatttttagtagagaagggatttcaccatgttggccgggctggtctcaaactcctaaggtcatccacctgcctcggcctcccagagtgctgagattacaggcgtgagcctccgcgcccggcccccttgcagttctctctgatttggtttgttctgtctcaggcttctgtggcaggactggcccagggaggaggaagccagcagcacacctggggaatggggtcccggccgggaggcttggcctctgggcgacctcgtcctgttttgtttgtttgtttgtttgtttttttaaaggtaaacctcctgggccgcagatggcaaagggagtgcctgggcctggtgacccagggctggatccacccctgcggagccctgggccaggcaggtgtctgctgctcacctggctctggagggctgccctgcagctgggcctggggacaggtcggctgtggggcagctcagtaccctccctgaggctcacggtggctccgagcatgagctctgcctcctgggcgagacccagcagtggacagcacggtcctcacacccagctccctgcacacccaggccagccacccctcccgctcgtgcacaggcacgcagatgcgctcacacgtacacacacacaaatgcacgcccacttgcacatgctcacgcacacgttcacacatgcacactcacgctcacacatgctgtcacgcatacacacacgcacatactcctgcacatgttcccatgcatgtgtgtgcactcggaccgagcatctcccacgcacctctaccccaccccaagcacctctctccccccatgcacctctccccaacaacacacacagccccctgcaccgcccgccccccgcccccaccaaggccccagcctctggccatcagtcctggtgccagagctttgcgtgaagttcgggccgcagagtggcccgctgggactcccatgtgctgccgtctgatgtgctcagatgggctcatcgttggttcgtttttactgtatatttatagtaataaaatcatgcagcaaa

SEQ ID NO: 64458 - DNA, 5884 bp, Homo sapiens
  misc_feature (5)..(5): n is a, c, g, or t
  misc_feature (2118)..(2118): n is a, c, g, or t
tccgnaccccagcggcagacgatgtctggttcactcagtgctcaatggtgcccaggctggagtgcagtggcgtgatctcggctcgctacaacctccacctcccagccgcctgccttggcctcccaaagtgcccagagtgcagcctctgcccagccgccaccccgtggtggaagtgactggccacgcccacgtgctcttggctgcctttgaaaagcacatggacggcagcttctctgtgaagcctttaaagcagaagcaaattgtggaccgggtcagctacctcctgcaggagatctatggcattgagaacaagaacaaccaggagaccaagccctcggacgacgagaacagcgacaacagcaacgagtgtgtggtgtgcctgtccgacctgcgggacacgctgatcctgccctgccgccacctgtgcctctgtacctcctgcgccgacacgctgcgctaccaggccaacaactgccccatctgccggctgcctttccgggccctcctgcagatccgggcggtgcggaagaagccaggagccctgtcccccgtgtccttcagccccgtcctggcccagagcctggagcatgatgagcactcttgtccctttaaaaaatcaaagccgcaccccgcctccctggccagcaagaaacctaaaagggaaacaaactctgacagcgtcccacctggctacgagcccatctcgctgctcgaggcgctcaacggcctccgggctgtctccccggccatcccctcggcccctctttatgaagaaatcacctattcaggcatctcggacggcctgtcccaggccagctgtcccctcgcggctatcgaccacatcctggacagcagccgccagaagggcaggccgcagagcaaggcccccgacagcaccctacggtccccgtcttcccccatccacgaagaggatgaggagaagctctccgaggacgtggacgcccctcccccactgggtggcgcagagctggccctgcgggaaagcagctcccctgagagtttcataacagaagaggttgatgagtcgtcgtcaccacagcaagggacccgagcagcttccattgagaatgtcctgcaggacagcagccccgagcactgtggccgaggcccacctgctgacatctacctgccagccctggggcccgactcctgctctgttggtatagacgagtaagccggtacgtgaccttccagacgcgcttcgggggctctgacgcgcgtccttggagagaggagccctcccctgctctctggcgggggttccttctggtttttgggtcttcgtccgcatccgcatcttcccaggggccctggattccgaatccagagctctccagtggctgctgcaccttcccccagaaagtggcctcctggggggtcctgactttcggggccagaggtctctccatctggactaggcggccggtcaggctcttcttccagccttgaggggccctggaacagtcccagcccaggcagggagacagacacagcccaggtgcgccagagccactgtccactgcgggaggcaggagcttgagggatgagggcagcaccgtggagggaaccccagggagacatggggtgagcgtcccaaggggagaggcctgggcctggccttgttccggatggtcccaccatgagttcgcatcggtcctgcagcagacacgttaggacgctcagcaggtccactcccgtgttccggtcatggctttaacaattcatggggaaagaatgcgccccgattgggagagcccctggatcacgtcttcccaagctcagtccctgtctcttggagggagtccgtcctcgaggggccctctggtgcccaggggagagtatcttgcgtcctgtcctgagggcgtccgctcacacagccacctgctcccccgctccctccttcccttgtcagcatggccaccgtgggcctggcatcaccatgggcctggcacacagtccctcgtgggctgcctttgtgccatgagcccactgctgccgactcacctgtccctcccagtactggaaccttctggaacaccagcactaaaagataggaggccctgtgaggttggcatcccccatccccccccaagaggngccctctaccagggtggcccaggtgagtgttttacagaaggcggctctgtccaggcagtggttcgcacctataagcccggtactttgggagaccgaggggatagatcacttgagcccaggaattcaagatcagtgtagaaaacatagaccccctctctataaaaaataaaaaattggcttgggcgtggtagcttgtgcctgtggtcccagctactcaggggtgctgaggtgggaggattgccggagctggggaggtcaaggcccactccagcctgagacgctgtctcaataaaaaaaaatacacacacacccacccacccactccagcctgagaccctgtctcaagaaaaaaaaaatacacacacacacacacacacacacacacacacacacacacacacgggggagagagagaaggcagctccaggagtgccaccaaaatgtaggcagacggattggggaccctctgccttcccagagggtcttggcacacaagctgcgtgcagctctggtctgccgaggcccatgcagcctgctgggaggtgcctggccgggggtgcaggctctaagaggccctttccccttgggtggacttgagccgggtcagggagaacttcgcttcttttgactgcgctctgcattcccatgaacctctgtcttcttgagcccagcgagtccctctgttgacccctgtcctgagccattatacccctagattgaaacagtcagcacctttcagacggccccggcctgcgcatcggtggaaggtgccatgcgaatgtcacgattcaggtcaagcttccggagctggggagtgcaggtgtgatctagaacagggctcacagcctcggaaacctgctctcgccgcggcccccgaagaaaatagacgcccttcaccggagagtggggcctgggccgtgtctgctgggagccatgtgtcagggctggtggctgggtgtcaggcagccctgaggccatgctggccccgtcccaggctctgcaccagcaccattgcccaagccccagggacgccagacccatccggggacagcgcccggcggcgtcgtgcaggccacagtctgggcattggggctctgtgggaggctcctctctttgccttgcagtagccatccgggggctactctgagcacgggcttgttctcacccagggccgctcccgacccctgcaccctgggttgaccgagttccaccctaacccagccgtaagaaccttggcaggacagtggctggccacatcccaggaaaccggaaccagggcaagggcaggaggcccagagggcatccaccgcggtgccgtgtcgcgctctgactcggggctgcagatctgctgtgggtgtccggggatctgggatcgtctgtcccaagagggacacagcgtatttggcacagttagggagtccccgggcccttggtgtgctcacatctgagtgaatgctgttgtggccacaggcggcgggagtgggggtgctggatggcccagcccctctggggctccagatcggtaggagcgggtggcgtggcaccaggcatccgagtgtgaccctcctccctctgctcccacctgcaggacggcccacctccatggagacggcccacggcctcgccaccaccagccccacctggcctccacttggtggccccagccccgatcccagcgccgccgagctgaccccactctgagagcctggccgagctggcagcatggagccctcggctccccagactttgccgaggggctgctccggaccccgttgtgagccggcctcctgtctgcatgccccctgtggccaccaggctccgaggggccgtggtgactcttgatcaaagagcacagtgaactgtcccttctgagtctcccttttctacagttgatatatttgtaactggtacaagatgaaggacagcagctttccatccctagttcagagcccccgttccccagggtcctgtgggctgagcggctggggctggggctgcccacgtgtggcctccgctggctctgcctgctcctgcaacagtgcggtccctgcccggagaactcaggaggcctgcagaagagaactgattggtggtcgaagcaccatcttcacagatgttcaggggcagtggggggctccaggcacggtcaatgaaggaaacagtgcctgtccacccaccctgcgtgtcactgtggcggcctggctgtcgctgctttttgtcctctgccgtgtttgcgcggcctcagtgccctccctggtgcgtctgcgctggggccctcagtgctcggggccttggggtgcatgggcgccgccctgggcagctagagtgtctcagcccggtgctgggcctggccgaggggcggaggcacagctgcttccagcagccagcattcagtggccttgtcaccaagctccacacctcctcctggtgctggctttggtgacatcacaaggcccctccaggtgcaggggcttctgtttggcaggcccctgccagggaggacctggtggcctcctcattctcttttgccattggaatgtccccttgcagttctcttctcttttttttttttttggagatggagtttcactcttgctgcccaggctggagtgcagtggctcaatctcgggtcactgcaacctccgcctcccgggttcaagtgatcgtcctgccttaggctcctgagtagctggggattacaggtgcctaccagcatgctcggctaatttttttgtatttttagtagagaagggatttcaccatgttggccgggctggtctcaaactcctaaggtcatccacctgcctcggcctcccagagtgctgagattacaggcgtgagcctccgcgcccggcccccttgcagttctctctgatttggtttgttctgtctcaggcttctgtggcaggactggcccagggaggaggaagccagcagcacacctggggaatggggtcccggccgggaggcttggcctctgggcgacctcgtcctgttttgtttgtttgtttgtttgtttttttaaaggtaaacctcctgggccgcagatggcaaagggagtgcctgggcctggtgacccagggctggatccacccctgcggagccctgggccaggcaggtgtctgctgctcacctggctctggagggctgccctgcagctgggcctggggacaggtcggctgtggggcagctcagtaccctccctgaggctcacggtggctccgagcatgagctctgcctcctgggcgagacccagcagtggacagcacggtcctcacacccagctccctgcacacccaggccagccacccctcccgctcgtgcacaggcacgcagatgcgctcacacgtacacacacacaaatgcacgcccacttgcacatgctcacgcacacgttcacacatgcacactcacgctcacacatgctgtcacgcatacacacacgcacatactcctgcacatgttcccatgcatgtgtgtgcactcggaccgagcatctcccacgcacctctaccccaccccaagcacctctctccccccatgcacctctccccaacaacacacacagccccctgcaccgcccgccccccgcccccaccaaggccccagcctctggccatcagtcctggtgccagagctttgcgtgaagttcgggccgcagagtggcccgctgggactcccatgtgctgccgtctgatgtgctcagatgggctcatcgttggttcgtttttactgtatatttatagtaataaaatcatgcagcaaa

SEQ ID NO: 64459 - DNA, 5386 bp, Homo sapiens
  misc_feature (1620)..(1620): n is a, c, g, or t
gtcctggcccagagcctggacggggctgaaggacacgggggacagggctcctggcttcttccgccccgtcctggcccagagcctggagcatgatgagcactcttgtccctttaaaaaatcaaagccgcaccccgcctccctggccagcaagaaacctaaaagggaaacaaactctgacagcgtcccacctggctacgagcccatctcgctgctcgaggcgctcaacggcctccgggctgtctccccggccatcccctcggcccctctttatgaagaaatcacctattcaggcatctcggacggcctgtcccaggccagctgtcccctcgcggctatcgaccacatcctggacagcagccgccagaagggcaggccgcagagcaaggcccccgacagcaccctacggtccccgtcttcccccatccacgaagaggatgaggagaagctctccgaggacgtggacgcccctcccccactgggtggcgcagagctggccctgcgggaaagcagctcccctgagagtttcataacagaagaggttgatgagtcgtcgtcaccacagcaagggacccgagcagcttccattgagaatgtcctgcaggacagcagccccgagcactgtggccgaggcccacctgctgacatctacctgccagccctggggcccgactcctgctctgttggtatagacgagtaagccggtacgtgaccttccagacgcgcttcgggggctctgacgcgcgtccttggagagaggagccctcccctgctctctggcgggggttccttctggtttttgggtcttcgtccgcatccgcatcttcccaggggccctggattccgaatccagagctctccagtggctgctgcaccttcccccagaaagtggcctcctggggggtcctgactttcggggccagaggtctctccatctggactaggcggccggtcaggctcttcttccagccttgaggggccctggaacagtcccagcccaggcagggagacagacacagcccaggtgcgccagagccactgtccactgcgggaggcaggagcttgagggatgagggcagcaccgtggagggaaccccagggagacatggggtgagcgtcccaaggggagaggcctgggcctggccttgttccggatggtcccaccatgagttcgcatcggtcctgcagcagacacgttaggacgctcagcaggtccactcccgtgttccggtcatggctttaacaattcatggggaaagaatgcgccccgattgggagagcccctggatcacgtcttcccaagctcagtccctgtctcttggagggagtccgtcctcgaggggccctctggtgcccaggggagagtatcttgcgtcctgtcctgagggcgtccgctcacacagccacctgctcccccgctccctccttcccttgtcagcatggccaccgtgggcctggcatcaccatgggcctggcacacagtccctcgtgggctgcctttgtgccatgagcccactgctgccgactcacctgtccctcccagtactggaaccttctggaacaccagcactaaaagataggaggccctgtgaggttggcatcccccatccccccccaagaggngccctctaccagggtggcccaggtgagtgttttacagaaggcggctctgtccaggcagtggttcgcacctataagcccggtactttgggagaccgaggggatagatcacttgagcccaggaattcaagatcagtgtagaaaacatagaccccctctctataaaaaataaaaaattggcttgggcgtggtagcttgtgcctgtggtcccagctactcaggggtgctgaggtgggaggattgccggagctggggaggtcaaggcccactccagcctgagacgctgtctcaataaaaaaaaatacacacacacccacccacccactccagcctgagaccctgtctcaagaaaaaaaaaatacacacacacacacacacacacacacacacacacacacacacacgggggagagagagaaggcagctccaggagtgccaccaaaatgtaggcagacggattggggaccctctgccttcccagagggtcttggcacacaagctgcgtgcagctctggtctgccgaggcccatgcagcctgctgggaggtgcctggccgggggtgcaggctctaagaggccctttccccttgggtggacttgagccgggtcagggagaacttcgcttcttttgactgcgctctgcattcccatgaacctctgtcttcttgagcccagcgagtccctctgttgacccctgtcctgagccattatacccctagattgaaacagtcagcacctttcagacggccccggcctgcgcatcggtggaaggtgccatgcgaatgtcacgattcaggtcaagcttccggagctggggagtgcaggtgtgatctagaacagggctcacagcctcggaaacctgctctcgccgcggcccccgaagaaaatagacgcccttcaccggagagtggggcctgggccgtgtctgctgggagccatgtgtcagggctggtggctgggtgtcaggcagccctgaggccatgctggccccgtcccaggctctgcaccagcaccattgcccaagccccagggacgccagacccatccggggacagcgcccggcggcgtcgtgcaggccacagtctgggcattggggctctgtgggaggctcctctctttgccttgcagtagccatccgggggctactctgagcacgggcttgttctcacccagggccgctcccgacccctgcaccctgggttgaccgagttccaccctaacccagccgtaagaaccttggcaggacagtggctggccacatcccaggaaaccggaaccagggcaagggcaggaggcccagagggcatccaccgcggtgccgtgtcgcgctctgactcggggctgcagatctgctgtgggtgtccggggatctgggatcgtctgtcccaagagggacacagcgtatttggcacagttagggagtccccgggcccttggtgtgctcacatctgagtgaatgctgttgtggccacaggcggcgggagtgggggtgctggatggcccagcccctctggggctccagatcggtaggagcgggtggcgtggcaccaggcatccgagtgtgaccctcctccctctgctcccacctgcaggacggcccacctccatggagacggcccacggcctcgccaccaccagccccacctggcctccacttggtggccccagccccgatcccagcgccgccgagctgaccccactctgagagcctggccgagctggcagcatggagccctcggctccccagactttgccgaggggctgctccggaccccgttgtgagccggcctcctgtctgcatgccccctgtggccaccaggctccgaggggccgtggtgactcttgatcaaagagcacagtgaactgtcccttctgagtctcccttttctacagttgatatatttgtaactggtacaagatgaaggacagcagctttccatccctagttcagagcccccgttccccagggtcctgtgggctgagcggctggggctggggctgcccacgtgtggcctccgctggctctgcctgctcctgcaacagtgcggtccctgcccggagaactcaggaggcctgcagaagagaactgattggtggtcgaagcaccatcttcacagatgttcaggggcagtggggggctccaggcacggtcaatgaaggaaacagtgcctgtccacccaccctgcgtgtcactgtggcggcctggctgtcgctgctttttgtcctctgccgtgtttgcgcggcctcagtgccctccctggtgcgtctgcgctggggccctcagtgctcggggccttggggtgcatgggcgccgccctgggcagctagagtgtctcagcccggtgctgggcctggccgaggggcggaggcacagctgcttccagcagccagcattcagtggccttgtcaccaagctccacacctcctcctggtgctggctttggtgacatcacaaggcccctccaggtgcaggggcttctgtttggcaggcccctgccagggaggacctggtggcctcctcattctcttttgccattggaatgtccccttgcagttctcttctcttttttttttttttggagatggagtttcactcttgctgcccaggctggagtgcagtggctcaatctcgggtcactgcaacctccgcctcccgggttcaagtgatcgtcctgccttaggctcctgagtagctggggattacaggtgcctaccagcatgctcggctaatttttttgtatttttagtagagaagggatttcaccatgttggccgggctggtctcaaactcctaaggtcatccacctgcctcggcctcccagagtgctgagattacaggcgtgagcctccgcgcccggcccccttgcagttctctctgatttggtttgttctgtctcaggcttctgtggcaggactggcccagggaggaggaagccagcagcacacctggggaatggggtcccggccgggaggcttggcctctgggcgacctcgtcctgttttgtttgtttgtttgtttgtttttttaaaggtaaacctcctgggccgcagatggcaaagggagtgcctgggcctggtgacccagggctggatccacccctgcggagccctgggccaggcaggtgtctgctgctcacctggctctggagggctgccctgcagctgggcctggggacaggtcggctgtggggcagctcagtaccctccctgaggctcacggtggctccgagcatgagctctgcctcctgggcgagacccagcagtggacagcacggtcctcacacccagctccctgcacacccaggccagccacccctcccgctcgtgcacaggcacgcagatgcgctcacacgtacacacacacaaatgcacgcccacttgcacatgctcacgcacacgttcacacatgcacactcacgctcacacatgctgtcacgcatacacacacgcacatactcctgcacatgttcccatgcatgtgtgtgcactcggaccgagcatctcccacgcacctctaccccaccccaagcacctctctccccccatgcacctctccccaacaacacacacagccccctgcaccgcccgccccccgcccccaccaaggccccagcctctggccatcagtcctggtgccagagctttgcgtgaagttcgggccgcagagtggcccgctgggactcccatgtgctgccgtctgatgtgctcagatgggctcatcgttggttcgtttttactgtatatttatagtaataaaatcatgcagcaaa

SEQ ID NO: 64460 - DNA, 5499 bp, Homo sapiens
  misc_feature (1733)..(1733): n is a, c, g, or t
ggaattctcctgctgctcatcttcttctacattttgctgtgcctctgtacctcctgcgccgacacgctgcgctaccaggccaacaactgccccatctgccggctgcctttccgggccctcctgcagatccgggcggtgcggaagaagccaggagccctgtcccccgtgtccttcagccccgtcctggcccagagcctggagcatgatgagcactcttgtccctttaaaaaatcaaagccgcaccccgcctccctggccagcaagaaacctaaaagggaaacaaactctgacagcgtcccacctggctacgagcccatctcgctgctcgaggcgctcaacggcctccgggctgtctccccggccatcccctcggcccctctttatgaagaaatcacctattcaggcatctcggacggcctgtcccaggccagctgtcccctcgcggctatcgaccacatcctggacagcagccgccagaagggcaggccgcagagcaaggcccccgacagcaccctacggtccccgtcttcccccatccacgaagaggatgaggagaagctctccgaggacgtggacgcccctcccccactgggtggcgcagagctggccctgcgggaaagcagctcccctgagagtttcataacagaagaggttgatgagtcgtcgtcaccacagcaagggacccgagcagcttccattgagaatgtcctgcaggacagcagccccgagcactgtggccgaggcccacctgctgacatctacctgccagccctggggcccgactcctgctctgttggtatagacgagtaagccggtacgtgaccttccagacgcgcttcgggggctctgacgcgcgtccttggagagaggagccctcccctgctctctggcgggggttccttctggtttttgggtcttcgtccgcatccgcatcttcccaggggccctggattccgaatccagagctctccagtggctgctgcaccttcccccagaaagtggcctcctggggggtcctgactttcggggccagaggtctctccatctggactaggcggccggtcaggctcttcttccagccttgaggggccctggaacagtcccagcccaggcagggagacagacacagcccaggtgcgccagagccactgtccactgcgggaggcaggagcttgagggatgagggcagcaccgtggagggaaccccagggagacatggggtgagcgtcccaaggggagaggcctgggcctggccttgttccggatggtcccaccatgagttcgcatcggtcctgcagcagacacgttaggacgctcagcaggtccactcccgtgttccggtcatggctttaacaattcatggggaaagaatgcgccccgattgggagagcccctggatcacgtcttcccaagctcagtccctgtctcttggagggagtccgtcctcgaggggccctctggtgcccaggggagagtatcttgcgtcctgtcctgagggcgtccgctcacacagccacctgctcccccgctccctccttcccttgtcagcatggccaccgtgggcctggcatcaccatgggcctggcacacagtccctcgtgggctgcctttgtgccatgagcccactgctgccgactcacctgtccctcccagtactggaaccttctggaacaccagcactaaaagataggaggccctgtgaggttggcatcccccatccccccccaagaggngccctctaccagggtggcccaggtgagtgttttacagaaggcggctctgtccaggcagtggttcgcacctataagcccggtactttgggagaccgaggggatagatcacttgagcccaggaattcaagatcagtgtagaaaacatagaccccctctctataaaaaataaaaaattggcttgggcgtggtagcttgtgcctgtggtcccagctactcaggggtgctgaggtgggaggattgccggagctggggaggtcaaggcccactccagcctgagacgctgtctcaataaaaaaaaatacacacacacccacccacccactccagcctgagaccctgtctcaagaaaaaaaaaatacacacacacacacacacacacacacacacacacacacacacacgggggagagagagaaggcagctccaggagtgccaccaaaatgtaggcagacggattggggaccctctgccttcccagagggtcttggcacacaagctgcgtgcagctctggtctgccgaggcccatgcagcctgctgggaggtgcctggccgggggtgcaggctctaagaggccctttccccttgggtggacttgagccgggtcagggagaacttcgcttcttttgactgcgctctgcattcccatgaacctctgtcttcttgagcccagcgagtccctctgttgacccctgtcctgagccattatacccctagattgaaacagtcagcacctttcagacggccccggcctgcgcatcggtggaaggtgccatgcgaatgtcacgattcaggtcaagcttccggagctggggagtgcaggtgtgatctagaacagggctcacagcctcggaaacctgctctcgccgcggcccccgaagaaaatagacgcccttcaccggagagtggggcctgggccgtgtctgctgggagccatgtgtcagggctggtggctgggtgtcaggcagccctgaggccatgctggccccgtcccaggctctgcaccagcaccattgcccaagccccagggacgccagacccatccggggacagcgcccggcggcgtcgtgcaggccacagtctgggcattggggctctgtgggaggctcctctctttgccttgcagtagccatccgggggctactctgagcacgggcttgttctcacccagggccgctcccgacccctgcaccctgggttgaccgagttccaccctaacccagccgtaagaaccttggcaggacagtggctggccacatcccaggaaaccggaaccagggcaagggcaggaggcccagagggcatccaccgcggtgccgtgtcgcgctctgactcggggctgcagatctgctgtgggtgtccggggatctgggatcgtctgtcccaagagggacacagcgtatttggcacagttagggagtccccgggcccttggtgtgctcacatctgagtgaatgctgttgtggccacaggcggcgggagtgggggtgctggatggcccagcccctctggggctccagatcggtaggagcgggtggcgtggcaccaggcatccgagtgtgaccctcctccctctgctcccacctgcaggacggcccacctccatggagacggcccacggcctcgccaccaccagccccacctggcctccacttggtggccccagccccgatcccagcgccgccgagctgaccccactctgagagcctggccgagctggcagcatggagccctcggctccccagactttgccgaggggctgctccggaccccgttgtgagccggcctcctgtctgcatgccccctgtggccaccaggctccgaggggccgtggtgactcttgatcaaagagcacagtgaactgtcccttctgagtctcccttttctacagttgatatatttgtaactggtacaagatgaaggacagcagctttccatccctagttcagagcccccgttccccagggtcctgtgggctgagcggctggggctggggctgcccacgtgtggcctccgctggctctgcctgctcctgcaacagtgcggtccctgcccggagaactcaggaggcctgcagaagagaactgattggtggtcgaagcaccatcttcacagatgttcaggggcagtggggggctccaggcacggtcaatgaaggaaacagtgcctgtccacccaccctgcgtgtcactgtggcggcctggctgtcgctgctttttgtcctctgccgtgtttgcgcggcctcagtgccctccctggtgcgtctgcgctggggccctcagtgctcggggccttggggtgcatgggcgccgccctgggcagctagagtgtctcagcccggtgctgggcctggccgaggggcggaggcacagctgcttccagcagccagcattcagtggccttgtcaccaagctccacacctcctcctggtgctggctttggtgacatcacaaggcccctccaggtgcaggggcttctgtttggcaggcccctgccagggaggacctggtggcctcctcattctcttttgccattggaatgtccccttgcagttctcttctcttttttttttttttggagatggagtttcactcttgctgcccaggctggagtgcagtggctcaatctcgggtcactgcaacctccgcctcccgggttcaagtgatcgtcctgccttaggctcctgagtagctggggattacaggtgcctaccagcatgctcggctaatttttttgtatttttagtagagaagggatttcaccatgttggccgggctggtctcaaactcctaaggtcatccacctgcctcggcctcccagagtgctgagattacaggcgtgagcctccgcgcccggcccccttgcagttctctctgatttggtttgttctgtctcaggcttctgtggcaggactggcccagggaggaggaagccagcagcacacctggggaatggggtcccggccgggaggcttggcctctgggcgacctcgtcctgttttgtttgtttgtttgtttgtttttttaaaggtaaacctcctgggccgcagatggcaaagggagtgcctgggcctggtgacccagggctggatccacccctgcggagccctgggccaggcaggtgtctgctgctcacctggctctggagggctgccctgcagctgggcctggggacaggtcggctgtggggcagctcagtaccctccctgaggctcacggtggctccgagcatgagctctgcctcctgggcgagacccagcagtggacagcacggtcctcacacccagctccctgcacacccaggccagccacccctcccgctcgtgcacaggcacgcagatgcgctcacacgtacacacacacaaatgcacgcccacttgcacatgctcacgcacacgttcacacatgcacactcacgctcacacatgctgtcacgcatacacacacgcacatactcctgcacatgttcccatgcatgtgtgtgcactcggaccgagcatctcccacgcacctctaccccaccccaagcacctctctccccccatgcacctctccccaacaacacacacagccccctgcaccgcccgccccccgcccccaccaaggccccagcctctggccatcagtcctggtgccagagctttgcgtgaagttcgggccgcagagtggcccgctgggactcccatgtgctgccgtctgatgtgctcagatgggctcatcgttggttcgtttttactgtatatttatagtaataaaatcatgcagcaaa

SEQ ID NO: 64461 - DNA, 3993 bp, Homo sapiens
gacgagcgtccgtgcggcctggtccgggccatgtccgcgtgaggaccccgccgctgtcgccgctcccgttccggccctggcccctctgcccggcagcgcggcgcaccatgggctccattctcagccgccgcatcgcgggggtggaggacatcgacatccaggcgaactcggcctatcgctaccctccgaagtccggaaactactttgcttcgcactttttcatgggaggagagaaattcgacaccccccaccctgaaggttacctctttggagagaacatggatctgaacttcctgggcagccgcccggtccagtttccctacgtcactcctgccccccacgagcccgtgaagacgctgcggagcctggtgaacatccgcaaagactccctgcggctggtgaggtacaaagacgatgccgacagccccaccgaggacggcgacaagccccgggtgctctacagcctggagttcaccttcgacgccgatgcccgcgtggccatcaccatctactgccaggcatcggaggagttcctgaacggcagggcagtatacagccccaagagcccctcgctacagtccgagaccgtccactacaagagaggggtgagccagcagttctccctgccctccttcaagattgacttctcggaatggaaggatgacgagctgaactttgacctggaccggggcgtgtttccagtagtcatccaggctgtggtggacgaaggagatgtggtggaagtgactggccacgcccacgtgctcttggctgcctttgaaaagcacatggacggcagcttctctgtgaagcctttaaagcagaagcaaattgtggaccgggtcagctacctcctgcaggagatctatggcattgagaacaagaacaaccaggagaccaagccctcggacgacgagaacagcgacaacagcaacgagtgtgtggtgtgcctgtccgacctgcgggacacgctgatcctgccctgccgccacctgtgcctctgtacctcctgcgccgacacgctgcgctaccaggccaacaactgccccatctgccggctgcctttccgggccctcctgcagatccgggcggtgcggaagaagccaggagccctgtcccccgtgtccttcagccccgtcctggcccagagcctggagcatgatgagcactcttgtccctttaaaaaatcaaagccgcaccccgcctccctggccagcaagaaacctaaaagggaaacaaactctgacagcgtcccacctggctacgagcccatctcgctgctcgaggcgctcaacggcctccgggctgtctccccggccatcccctcggcccctctttatgaagaaatcacctattcaggcatctcggacggcctgtcccaggccagctgtcccctcgcggctatcgaccacatcctggacagcagccgccagaagggcaggccgcagagcaaggcccccgacagcaccctacggtccccgtcttcccccatccacgaagaggatgaggagaagctctccgaggacgtggacgcccctcccccactgggtggcgcagagctggccctgcgggaaagcagctcccctgagagtttcataacagaagaggttgatgagtcgtcgtcaccacagcaagggacccgagcagcttccattgagaatgtcctgcaggacagcagccccgagcactgtggccgaggcccacctgctgacatctacctgccaggacggcccacctccatggagacggcccacggcctcgccaccaccagccccacctggcctccacttggtggccccagccccgatcccagcgccgccgagctgaccccactctgagagcctggccgagctggcagcatggagccctcggctccccagactttgccgaggggctgctccggaccccgttgtgagccggcctcctgtctgcatgccccctgtggccaccaggctccgaggggccgtggtgactcttgatcaaagagcacagtgaactgtcccttctgagtctcccttttctacagttgatatatttgtaactggtacaagatgaaggacagcagctttccatccctagttcagagcccccgttccccagggtcctgtgggctgagcggctggggctggggctgcccacgtgtggcctccgctggctctgcctgctcctgcaacagtgcggtccctgcccggagaactcaggaggcctgcagaagagaactgattggtggtcgaagcaccatcttcacagatgttcaggggcagtggggggctccaggcacggtcaatgaaggaaacagtgcctgtccacccaccctgcgtgtcactgtggcggcctggctgtcgctgctttttgtcctctgccgtgtttgcgcggcctcagtgccctccctggtgcgtctgcgctggggccctcagtgctcggggccttggggtgcatgggcgccgccctgggcagctagagtgtctcagcccggtgctgggcctggccgaggggcggaggcacagctgcttccagcagccagcattcagtggccttgtcaccaagctccacacctcctcctggtgctggctttggtgacatcacaaggcccctccaggtgcaggggcttctgtttggcaggcccctgccagggaggacctggtggcctcctcattctcttttgccattggaatgtccccttgcagttctcttctcttttttttttttttggagatggagtttcactcttgctgcccaggctggagtgcagtggctcaatctcgggtcactgcaacctccgcctcccgggttcaagtgatcgtcctgccttaggctcctgagtagctggggattacaggtgcctaccagcatgctcggctaatttttttgtatttttagtagagaagggatttcaccatgttggccgggctggtctcaaactcctaaggtcatccacctgcctcggcctcccagagtgctgagattacaggcgtgagcctccgcgcccggcccccttgcagttctctctgatttggtttgttctgtctcaggcttctgtggcaggactggcccagggaggaggaagccagcagcacacctggggaatggggtcccggccgggaggcttggcctctgggcgacctcgtcctgttttgtttgtttgtttgtttgtttttttaaaggtaaacctcctgggccgcagatggcaaagggagtgcctgggcctggtgacccagggctggatccacccctgcggagccctgggccaggcaggtgtctgctgctcacctggctctggagggctgccctgcagctgggcctggggacaggtcggctgtggggcagctcagtaccctccctgaggctcacggtggctccgagcatgagctctgcctcctgggcgagacccagcagtggacagcacggtcctcacacccagctccctgcacacccaggccagccacccctcccgctcgtgcacaggcacgcagatgcgctcacacgtacacacacacaaatgcacgcccacttgcacatgctcacgcacacgttcacacatgcacactcacgctcacacatgctgtcacgcatacacacacgcacatactcctgcacatgttcccatgcatgtgtgtgcactcggaccgagcatctcccacgcacctctaccccaccccaagcacctctctccccccatgcacctctccccaacaacacacacagccccctgcaccgcccgccccccgcccccaccaaggccccagcctctggccatcagtcctggtgccagagctttgcgtgaagttcgggccgcagagtggcccgctgggactcccatgtgctgccgtctgatgtgctcagatgggctcatcgttggttcgtttttactgtatatttatagtaataaaatcatgcagcaaatagaaaaagctgtaaaacaaaatcatagggcaagaagtgaagacaaaaagtcttgcccaatggaccgaagatagacccaacaaaacttgt

SEQ ID NO: 64462 - DNA, 2188 bp, Homo sapiens
tgaagtgatctagagatcccggagttagcgggtgagacggccacggccgcacacagccccacctggcctccacttggtggccccagccccgatcccagcgccgccgagctgaccccactctgagagcctggccgagctggcagcatggagccctcggctccccagactttgccgaggggctgctccggaccccgttgtgagccggcctcctgtctgcatgccccctgtggccaccaggctccgaggggccgtggtgactcttgatcaaagagcacagtgaactgtcccttctgagtctcccttttctacagttgatatatttgtaactggtacaagatgaaggacagcagctttccatccctagttcagagcccccgttccccagggtcctgtgggctgagcggctggggctggggctgcccacgtgtggcctccgctggctctgcctgctcctgcaacagtgcggtccctgcccggagaactcaggaggcctgcagaagagaactgattggtggtcgaagcaccatcttcacagatgttcaggggcagtggggggctccaggcacggtcaatgaaggaaacagtgcctgtccacccaccctgcgtgtcactgtggcggcctggctgtcgctgctttttgtcctctgccgtgtttgcgcggcctcagtgccctccctggtgcgtctgcgctggggccctcagtgctcggggccttggggtgcatgggcgccgccctgggcagctagagtgtctcagcccggtgctgggcctggccgaggggcggaggcacagctgcttccagcagccagcattcagtggccttgtcaccaagctccacacctcctcctggtgctggctttggtgacatcacaaggcccctccaggtgcaggggcttctgtttggcaggcccctgccagggaggacctggtggcctcctcattctcttttgccattggaatgtccccttgcagttctcttctcttttttttttttttggagatggagtttcactcttgctgcccaggctggagtgcagtggctcaatctcgggtcactgcaacctccgcctcccgggttcaagtgatcgtcctgccttaggctcctgagtagctggggattacaggtgcctaccagcatgctcggctaatttttttgtatttttagtagagaagggatttcaccatgttggccgggctggtctcaaactcctaaggtcatccacctgcctcggcctcccagagtgctgagattacaggcgtgagcctccgcgcccggcccccttgcagttctctctgatttggtttgttctgtctcaggcttctgtggcaggactggcccagggaggaggaagccagcagcacacctggggaatggggtcccggccgggaggcttggcctctgggcgacctcgtcctgttttgtttgtttgtttgtttgtttttttaaaggtaaacctcctgggccgcagatggcaaagggagtgcctgggcctggtgacccagggctggatccacccctgcggagccctgggccaggcaggtgtctgctgctcacctggctctggagggctgccctgcagctgggcctggggacaggtcggctgtggggcagctcagtaccctccctgaggctcacggtggctccgagcatgagctctgcctcctgggcgagacccagcagtggacagcacggtcctcacacccagctccctgcacacccaggccagccacccctcccgctcgtgcacaggcacgcagatgcgctcacacgtacacacacacaaatgcacgcccacttgcacatgctcacgcacacgttcacacatgcacactcacgctcacacatgctgtcacgcatacacacacgcacatactcctgcacatgttcccatgcatgtgtgtgcactcggaccgagcatctcccacgcacctctaccccaccccaagcacctctctccccccatgcacctctccccaacaacacacacagccccctgcaccgcccgccccccgcccccaccaaggccccagcctctggccatcagtcctggtgccagagctttgcgtgaagttcgggccgcagagtggcccgctgggactcccatgtgctgccgtctgatgtgctcagatgggctcatcgttggttcgtttttactgtatatttatagtaataaaatcatgcagcaaa

SEQ ID NO: 64463 - DNA, 3006 bp, Homo sapiens
gacgagcgtccgtgcggcctggtccgggccatgtccgcgtgaggaccccgccgctgtcgccgctcccgttccggccctggcccctctgcccggcagcgcggcgcaccatgggctccattctcagccgccgcatcgcgggggtggaggacatcgacatccaggcgaactcggcctatcgctaccctccgaagtccggaaactactttgcttcgcactttttcatgggaggagagaaattcgacaccccccaccctgaaggttacctctttggagagaacatggatctgaacttcctgggcagccgcccggtccagtttccctacgtcactcctgccccccacgagcccgtgaagacgctgcggagcctggtgaacatccgcaaagactccctgcggctggtgaggtacaaagacgatgccgacagccccaccgaggacggcgacaagccccgggtgctctacagcctggagttcaccttcgacgccgatgcccgcgtggccatcaccatctactgccaggcatcggaggagttcctgaacggcagggcagtatacagccccaagagcccctcgctacagtccgagaccgtccactacaagagaggggtgagccagcagttctccctgccctccttcaagattgacttctcggaatggaaggatgacgagctgaactttgacctggaccggggcgtgtttccagtagtcatccaggctgtggtggacgaaggagatgtggtggaagtgactggccacgcccacgtgctcttggctgcctttgaaaagcacatggacggcagcttctctgtgaagcctttaaagcagaagcaaattgtggaccgggtcagctacctcctgcaggagatctatggcattgagaacaagaacaaccaggagaccaagccctcggacgacgagaacagcgacaacagcaacgagtgtgtggtgtgcctgtccgacctgcgggacacgctgatcctgccctgccgccacctgtgcctctgtacctcctgcgccgacacgctgcgctaccaggccaacaactgccccatctgccggctgcctttccgggccctcctgcagatccgggcggtgcggaagaagccaggagccctgtcccccgtgtccttcagccccgtcctggcccagagcctggagcatgatgagcactcttgtccctttaaaaaatcaaagccgcaccccgcctccctggccagcaagaaacctaaaagggaaacaaactctgacagcgtcccacctggctacgagcccatctcgctgctcgaggcgctcaacggcctccgggctgtctccccggccatcccctcggcccctctttatgaagaaatcacctattcaggcatctcggacggcctgtcccaggccagctgtcccctcgcggctatcgaccacatcctggacagcagccgccagaagggcaggccgcagagcaaggcccccgacagcaccctacggtccccgtcttcccccatccacgaagaggatgaggagaagctctccgaggacgtggacgcccctcccccactgggtggcgcagagctggccctgcgggaaagcagctcccctgagagtttcataacagaagaggttgatgagtcgtcgtcaccacagcaagggacccgagcagcttccattgagaatgtcctgcaggacagcagccccgagcactgtggccgaggcccacctgctgacatctacctgccaggacggcccacctccatggagacggcccacggcctcgccaccaccagccccacctggcctccacttggtggccccagccccgatcccagcgccgccgagctgaccccactctgagagcctggccgagctggcagcatggagccctcggctccccagactttgccgaggggctgctccggaccccgttgtgagccggcctcctgtctgcatgccccctgtggccaccaggctccgaggggccgtggtgactcttgatcaaagagcacagtgaactgtcccttctgagtctcccttttctacagttgatatatttgtaactggtacaagatgaaggacagcagctttccatccctagttcagagcccccgttccccagggtcctgtgggctgagcggctggggctggggctgcccacgtgtggcctccgctggctctgcctgctcctgcaacagtgcggtccctgcccggagaactcaggaggcctgcagaagagaactgattggtggtcgaagcaccatcttcacagatgttcaggggcagtggggggctccaggcacggtcaatgaaggaaacagtgcctgtccacccaccctgcgtgtcactgtggcggcctggctgtcgctgctttttgtcctctgccgtgtttgcgcggcctcagtgccctccctggtgcgtctgcgctggggccctcagtgctcggggccttggggtgcatgggcgccgccctgggcagctagagtgtctcagccagcctctggccatcagtcctggtgccagagctttgcgtgaagttcgggccgcagagtggcccgctgggactcccatgtgctgccgtctgatgtgctcagatgggctcatcgttggttcgtttttactgtatatttatagtaataaaatcatgcagcaaatatcctgtctgctccttcctccgggtgcagccctcaggattgtggctgtttcctgacccggagttttgccgctgggtggttggcggtggctcccgcaccgtggcagctccacggcctctgcctggcttccctctggggtcagggcagtgagcaaggtgagggctaacgagaacgggcagctcccagccatccctgtcagggctagttgtctggttggagggaagccacaccctccagattgggctctctcgtgaacaggtggttggggagcccagggcctccaggtttgtgagtagtcgctccggtccccatctctagtcctgatcatctcaaggcatttgctgagcacctgctgtgcgtcagtggaggcagaa

SEQ ID NO: 64464 - DNA, 1010 bp, Homo sapiens
gacgagcgtccgtgcggcctggtccgggccatgtccgcgtgaggaccccgccgctgtcgccgctcccgttccggccctggcccctctgcccggcagcgcggcgcaccatgggctccattctcagccgccgcatcgcgggggtggaggacatcgacatccaggcgaactcggcctatcgctaccctccgaagtccggaaactactttgcttcgcactttttcatgggaggagagaaattcgacaccccccaccctgaaggttacctctttggagagaacatggatctgaacttcctgggcagccgcccggtccagtttccctacgtcactcctgccccccacgagcccgtgaagacgctgcggagcctggtgaacatccgcaaagactccctgcggctggtgaggtacaaagacgatgccgacagccccaccgaggacggcgacaagccccgggtgctctacagcctggagttcaccttcgacgccgatgcccgcgtggccatcaccatctactgccaggcatcggaggagttcctgaacggcagggcagtatacagccccaagagcccctcgctacagtccgagaccgtccactacaagagaggggtgagccagcagttctccctgccctccttcaagattgacttctcggaatggaaggatgacgagctgaactttgacctggaccggggcgtgtttccagtagtcatccaggctgtggtggacgaaggagatgtggtggaagtgactggccacgcccacgtgctcttggctgcctttgaaaagcacatggacggcagcttctctgtgaagcctttaaagcagaagcaaattgtaagtcatcagaggaaatatgacgtgcttgaattaaaagacacacatatacaatcactcacacgcatactcatgcatagacacacactcatacacacgcacatatactcatacacgctcatacacactcatacacattcacttgcacatatatacggacacacatacataccatca

SEQ ID NO: 64465 - DNA, 572 bp, Homo sapiens
atctgctccagtagaatgagttactttgtatgggatagaaggtgaaaaagagagaagaaattggcaacactcttagcccactgaaagcagcctgcttcagaacctaaggccttgtggttatttttactcgcttgcaaaagtgaggaaggatgttataggtctctttgagcctctttgcttttaccctttatttctatatgatctacatttatattaataaattattacatgccatataagttccagaatcattccttttgacagtcccatgggatttaatcccctcctaaatcccaaaatatagaaagagaaaatgtttgggtacagcactggggcatcatgcatactgaatattcaacaataaccatttgaatgagtggatgatttgggggtcattccttactatgtgactgctcttctctcaggcagtcttagtccctgtgtcactctcctagtgtgtagccgggctgctgcctgagtgtaatcctagcctttcaagataaccatttattatatggtgctgacccctaacaacacaagccagctccatcctctggtactcagcaaaaaaa

SEQ ID NO: 64466 - DNA, 2102 bp, Homo sapiens
  misc_feature (1119)..(1119): n is a, c, g, or t
gaagaaaaaggggtgcccaaacaagtcaccttaaaatttgatgcctgtgctgtcattaatagtaataagttaggaataaagtgtggttctcttaattagaaaagaggctatatggcagaaaataagtacatctgtcataaattaggactgtgtggaaataaatgtaaatactggtcttgtgtcatttaggccacttggattaaaaaaaatgaaaaggatccagtccaccttcagaaaggaaaaaaatggcccttcctgtgctaagggacaatgtaaccccttagagctagtaataaccaatccccttgatcctcgctggaaaaaagagtagcgtgtgaccttaggaatcaatggggctggactgaatccccgagtaaatatcttggttcgaggagaagtttacaaatgctctcttgagccagtgtttcaaactttctatgatgaactaaatgtgccaataacagaatttccaggaaaaacaagaaatttgtttttgcaattagccgagcatgtagcccagtctctcactgtcacttcatgttatgtatgtggaggaactgtaatagcagatcaatggccatgggaagcccgagaattagtacctacagacccagttcctgatgaattcccagctcaaaagaatcaccctgataatttctgggtcctaaaagcctcaatcattagacaatactatatagcaagagtggagaaggacttcacccttcctgtaggaagactacatggtggagttcaaaccacacagagaaaaatccattcagtaaatttccaaagttgcagaccgtttaggcccacccagaatcccaccgggactggacagcccccactgggctatactggatatgtggacatagagcctacactaagctgcctgacaagtagttgtgttattggcactattaaaccatctttcttcctactgtccataaaaacaggagaactcctgggcttccctgtctatgcttcccgtgaaaagcatagctataagaaattgaaacaatgataaatggccccctgagagaatcatacagtattatgggcctgctacttaggcacaagatggctcgtggggataccggatccccatttatatgatcaacngaatcatacggttacaagctgtcttaaaaataatcactgcaaccggcagagccttgactattctggcccagcaagaaactcagatgagaaatgctatctatcaaaatagattagctctcgactacttgctagcagctgaaggagaggtctgtaggaaatttaaccttactaattgctgcctacacatagataaccaagggcaagtagttgaagacatagttagagatatgacaaaagtggcacatgtgcccgtgcaagtgtggcatggatttgatcctggggccatgtttagaaaatggttcccagcgctaggaggatttaaaactcttataataagagttataatagtaataggaacctacttactgctccctcgtttgctacctgtacttcttcaaatgataaaaagcttcatcgctaccttagtataccaaaatgcatcagcacaagtgtactatataaatcactattgatctgtctagcaagaagacatgggtagtaaacatgaaacaactcctgctattgagtgagagtctcaaagtgggggaataagggaggagaccacccctcatattgtcttatgcccaatttctgcctccaaagaaagaaaaagtaaaaactaaaaggcagaaatgaaatccacaagcagacagcccgggcgccacaccctgggactggtagttgaaaatcaatcccggacctaatcggttatgttatctatagattacagacattgtatagaaaagcattgtgaaaatctcattcctgttttgttccaatctaattactggtgcgtgcagcccccagtcacgtacccacgtacctcctgcttgctcaatcgatcacgaccctctcacgcacacccccttagacttgtgagtccttaaaagggacaggaattgctcactcggggcgggggctcggctcttgagacaggagtcttgctgatgcctccggcctaataaaccccttccttctttaac

SEQ ID NO: 64467 - DNA, 318 bp, Homo sapiens
ggtgatttcactgtttaaaatggcccccaaaagcagtgctgaagtgccatgatgtgtcttaagaacaaaatacatgtgttagataagcttcattcgtctgagttatagtgctcttggctgtgaattcaaggttagtgcataagcagtatatattaaataagatgtctttcaacagaaacacataaaacaagattatgtgtcaattggttgttgaaaatgtgaccagaggcttgaaggaacctacacctgtatttcccctaggagcaatggttcagtatttgttaataaaacatttttttgcaacttgataaaacataa

SEQ ID NO: 64468 - DNA, 444 bp, Homo sapiens
atacacttccagagaaaattcagactttgagctggagtttatccctgatctgaagattggcttcaagagttgttcatcaagaggagtgaatcacagtcactaaaggcaccttcctgtgacattttggatggctcctggaataaatttctaccactgaggaaccttgctggtgaggcagaagtctctgtctccacagagaaaaagccaaaagaagggagttgtgcatctacttagaataagagaaaacggtttccagatggctaatgaatggttaggtttctccgtcacatggcaacaagtcttacttcctcaaatgctggttctaaggactactgtgaaatcctactattgagattcatctagatccaattccatctcattattgtggagatacggtgcagagaacaatacatgaataaatacaactggattctgctctactga

SEQ ID NO: 64469 - DNA, 435 bp, Homo sapiens
cggattgtcctgtggaccttattcctgcactttattctgttggagctagacagaaacgtcaaggttacagcaaaaaggaatggcccatcagcggaggtaattggggcttgggtgctcaaagttacccagaaataattattacagggcatgctgatgggtcagttaagttctgggatgcttctgcaataactctacaagtattatataagctaaagacatctaaagtatttgaaaagtcaagaaataaagatgacaggccaaacacagacattgtagatgaagatccatatgccattcagatcatctcctggtgtccagaaagtagaatgctgtgcatcgctggagtttcagctcatgtcattatttatagattcagcaagcaggaagtaatcacagaagtcattccggtaataacgtcttagttattttcatggt

SEQ ID NO: 64470 - DNA, 248 bp, Homo sapiens
tggtggaacccacctgggcctgcaaggccgtgctatgcttgttactagctgtgtgaccttgggcaagttaccttactgccaggtgcttcagggtacgcctctctcaagtggggattgcaatagtccctaccttataagattgctgcaaggattaaatgagtatatatacacacacacacatacacagcgagactctgtctcaaaaaaaaaattttcacatatattatttcatacatacacacacaaaa

SEQ ID NO: 64471 - DNA, 7662 bp, Homo sapiens
ccttcttgaggaatggagcttcgcagaggttgcatttagattcaacagttcacagcggcgggctgctgctgctgcctctccgaagagctcgcggagctccccagaggcggtggtccccgtgcttgtctggatgcggctctgagtctccgtgtgtctttctgcttgttgctgtgtgcgggtgttcggccgcgatcacctttgtgtgtcttctgtctgtttaaacctcaggatggctcgcttcggggaggcggtggtcgccaggccagggtccggcgatggagactcggaccagagcaggaaccggcaaggaacccccgtgccggcctcggggcaggcggccgcctacaagcagacgaaagcacagagggcgcggactatggctttgtacaaccccattcccgtccggcagaactgtttcaccgtcaacagatccctgttcatcttcggagaagataacattgtcaggaaatatgccaagaagctcatcgattggccgccatttgagtacatgatcctggccaccatcattgccaactgcatcgtcctggccctggagcagcatcttcctgaggatgacaagacccccatgtcccgaagactggagaagacagaaccttatttcattgggatcttttgctttgaagctgggatcaaaattgtggccctggggttcatcttccataagggctcttacctccgcaatggctggaatgtcatggacttcatcgtggtcctcagtggcatcctggccactgcaggaacccacttcaatactcacgtggacctgaggaccctccgggctgtgcgtgtcctgcggcctttgaagctcgtgtcagggatacctagcctgcagattgtgttgaagtccatcatgaaggccatggtacctcttctgcagattggccttctgctcttctttgccatcctgatgtttgctatcattggtttggagttctacagtggcaagttacatcgagcgtgcttcatgaacaattcaggtattctagaaggatttgacccccctcacccatgtggtgtgcagggctgcccagctggttatgaatgcaaggactggatcggccccaatgatgggatcacccagtttgataacatcctttttgctgtgctgactgtcttccagtgcatcaccatggaagggtggaccactgtgctgtacaataccaatgatgccttaggagccacctggaattggctgtacttcatccccctcatcatcattggatccttctttgttctcaacctagtcctgggagtgctttccggggaatttgccaaagagagagagagagtggagaaccgaagggctttcatgaagctgcggcgccagcagcagattgagcgtgagctgaatggctaccgtgcctggatagacaaagcagaggaagtcatgctcgctgaagaaaataaaaatgctggaacatccgccttagaagtgcttcgaagggcaaccatcaagaggagccggacagaggccatgactcgagactccagtgatgagcactgtgttgatatctcctctgtgggcacacctctggcccgagccagtatcaaaagtgcaaaggtagacggggtctcttatttccggcacaaggaaaggcttctgcgcatctccattcgccacatggttaaatcccaggtgttttactggattgtgctgagccttgtggcactcaacactgcctgtgtggccattgtccatcacaaccagccccagtggctcacccacctcctctactatgcagaatttctgtttctgggactcttcctcttggagatgtccctgaagatgtatggcatggggcctcgcctttattttcactcttcattcaactgctttgattttggggtcacagtgggcagtatctttgaagtggtctgggcaatcttcagacctggtacgtcttttggaatcagtgtcttgcgagccctccggcttctaagaatatttaaaataaccaagtattgggcttccctacggaatttggtggtctccttgatgagctcaatgaagtctatcatcagtttgcttttcctcctcttcctcttcatcgttgtctttgctctcctaggaatgcagttatttggaggcaggtttaactttaatgatgggactccttcggcaaattttgataccttccctgcagccatcatgactgtgttccagatcctgacgggtgaggactggaatgaggtgatgtacaatgggatccgctcccagggtggggtcagctcaggcatgtggtctgccatctacttcattgtgctcaccttgtttggcaactacacgctactgaatgtgttcttggctatcgctgtggataatctcgccaacgcccaggaactgaccaaggatgaacaggaggaagaagaggccttcaaccagaaacatgcactgcagaaggccaaggaggtcagcccgatgtctgcacccaacatgccttcgatcgaaagagacagaaggagaagacaccacatgtcgatgtgggagccacgcagcagccacctgagggagcggaggcgccggcaccacatgtccgtgtgggagcagcgtaccagccagctgaggaagcacatgcagatgtccagccaggaggccctcaacagagaggaggcgccgaccatgaacccgctcaaccccctcaacccgctcagctccctcaacccgctcaatgcccaccccagcctttatcggcgacccagggccattgagggcctggccctgggcctggccctggagaagttcgaggaggagcgcatcagccgtggggggtccctcaagggggatggaggggaccgatccagtgccctggacaaccagaggacccctttgtccctgggccagcgggagccaccatggctggccaggccctgtcatggaaactgtgacccgactcagcaggaggcagggggaggagaggctgtggtgacctttgaggaccgggccaggcacaggcagagccaacggcgcagccggcatcgccgcgtcaggacagaaggcaaggagtcctcttcagcctcccggagcaggtctgccagccaggaacgcagtctggatgaagccatgcccactgaaggggagaaggaccatgagctcaggggcaaccatggtgccaaggagccaacgatccaagaagagagagcccaggatttaaggaggaccaacagtctgatggtgtccagaggctccgggctggcaggaggccttgatgaggctgacacccccctagtcctgccccatcctgagctggaagtggggaagcacgtggtgctgacggagcaggagccagaaggcagcagtgagcaggccctgctggggaatgtgcagctagacatgggccgggtcatcagccagagcgagcctgacctctcctgcatcacggccaacacggacaaggccaccaccgagagcaccagcgtcaccgtcgccatccccgacgtggaccccttggtggactcaaccgtggtgcacattagcaacaagacggatggggaagccagtcccttgaaggaggcagagatcagagaggatgaggaggaggtggagaagaagaagcagaagaaggagaagcgtgagacaggcaaagccatggtgccccacagctcaatgttcatcttcagcaccaccaacccgatccggagggcctgccactacatcgtgaacctgcgctactttgagatgtgcatcctcctggtgattgcagccagcagcatcgccctggcggcagaggaccccgtcctgaccaactcggagcgcaacaaagtcctgaggtattttgactatgtgttcacgggcgtgttcacctttgagatggttataaagatgatagaccaaggcttgatcctgcaggatgggtcctacttccgagacttgtggaacatcctggactttgtggtggtcgttggcgcattggtggcctttgctctggcgaacgctttgggaaccaacaaaggacgggacatcaagaccatcaagtctctgcgggtgctccgagttctaaggccactgaaaaccatcaagcgcttgcccaagctcaaggccgtcttcgactgcgtagtgacctccttgaagaatgtcttcaacatactcattgtgtacaagctcttcatgttcatctttgctgtcatcgcagttcagctcttcaagggaaagttcttttattgcacggacagttccaaggacacagagaaggagtgcataggcaactatgtagatcacgagaaaaacaagatggaggtgaagggccgggaatggaagcgccatgaattccactacgacaacattatctgggccctgctgaccctcttcaccgtctccacaggggaaggatggcctcaagttctgcagcactctgtagatgtgacagaggaagaccgaggcccaagccgcagcaaccgcatggagatgtctatcttttatgtagtctactttgtggtcttccccttcttctttgtcaatatctttgtggctctcatcatcatcaccttccaggagcaaggggataagatgatggaggagtgcagcctggagaagaatgagagggcgtgcatcgacttcgccatcagcgccaaacctctcacccgctacatgccgcagaacagacacaccttccagtaccgcgtgtggcactttgtggtgtctccgtcctttgagtacaccattatggccatgatcgccttgaatactgttgtgctgatgatgaagtattattctgctccctgtacctatgagctggccctgaagtacctgaatatcgccttcaccatggtgttttccctggaatgtgtcctgaaggtcatcgcttttggctttttgaactatttccgagacacctggaatatctttgacttcatcaccgtgattggcagtatcacagaaattatcctgacagacagcaagctggtgaacaccagtggcttcaatatgagctttctgaagctcttccgagctgcccgcctcataaagctcctgcgtcagggctataccatacgcattttgctgtggacctttgtgcagtcctttaaggccctcccttatgtctgccttttaattgccatgcttttcttcatttatgccatcattgggatgcaggtatttggaaacataaaattagacgaggagagtcacatcaaccggcacaacaacttccggagtttctttgggtccctaatgctactcttcaggagtgccacaggtgaggcctggcaggagattatgctgtcatgccttggggagaagggctgtgagcctgacaccaccgcaccatcagggcagaacgagaatgaacgctgcggcaccgatctggcctacgtgtactttgtctccttcatcttcttctgctccttcttgatgctcaacctgtttgtggccgtcatcatggacaactttgagtacctgactcgggactcctccatcctggggcctcaccacttggacgagtttgtccgcgtctgggcagaatatgaccgagcagcatgtggccgcatccattacactgagatgtatgaaatgctgactctcatgtcacctccgctaggcctcggcaagagatgtccctccaaagtggcatataagaggttggtcctgatgaacatgccagtagctgaggacatgacggtccacttcacctccacacttatggctctgatccggacagctctggacattaaaattgccaaaggtggtgcagacaggcagcagctagactcagagctacaaaaggagaccctagccatctggcctcacctatcccagaagatgctggatctgcttgtgcccatgcccaaagcctctgacctgactgtgggcaaaatctatgcagcaatgatgatcatggactactataagcagagtaaggtgaagaagcagaggcagcagctggaggaacagaaaaatgcccccatgttccagcgcatggagccttcatctctgcctcaggagatcattgctaatgccaaagccctgccttacctccagcaggaccccgtttcaggcctgagtggccggagtggatacccttcgatgagtccactctctccccaggatatattccagttggcttgtatggaccccgccgatgacggacagttccaagaacggcagtctctggtggtgacagaccctagctccatgagacgttcattttccactattcgggataagcgttcaaattcctcgtggttggaggaattctccatggagcgaagcagtgaaaatacctacaagtcccgtcgccggagttaccactcctccttgcggctgtcagcccaccgcctgaactctgattcaggccacaagtctgacactcacccctcagggggcagggagcggcgacgatcaaaagagcgaaagcatcttctctctcctgatgtctcccgctgcaattcagaagagcgagggacccaggctgactgggagtccccagagcgccgtcaatccaggtcacccagtgagggcaggtcacagacgcccaacagacagggcacaggttccctaagtgagagctccatcccctctgtctctgacaccagcaccccaagaagaagtcgtcggcagctcccacccgtcccgccaaagccccggcccctcctttcctacagctccctgattcgacacgcgggcagcatctctccacctgctgatggaagcgaggagggctccccgctgacctcccaagctctggagagcaacaatgcttggctgaccgagtcttccaactctccgcacccccagcagaggcaacatgcctccccacagcgctacatctccgagccctacttggccctgcacgaagactcccacgcctcagactgtgttgaggaggagacgctcactttcgaagcagccgtggctactagcctgggccgttccaacaccatcggctcagccccacccctgcggcatagctggcagatgcccaacgggcactatcggcggcggaggcgcggggggcctgggccaggcatgatgtgtggggctgtcaacaacctgctaagtgacacggaagaagatgacaaatgctagaggctgctcccccctccgatgcatgctcttctctcacatggagaaaaccaagacagaattgggaagccagtgcggccccgcggggaggaagagggaaaaggaagatggaaggacaccatgcattatcagagaagaggaagtaaaggacaatcagaacaccagtcaaacccaccaaattgctttattcccctttgcaagatgggcactgccatagttctgcctctttgctggggaaagaaaccaggaacgtggagggttattactgcgggagaagggacacgaggatggctttgcttccccttgccccttcccacttttctaaaagctgtggagggatctagctggcctatgtctacactcagtgccctgagaagcctggaagactttctggctcttaactggggagtagtggagaccataggagaggactctcctccctcaccagctcttacgcctcagccagcaccactgccaccagggcaactgcagcagcatctcatgcataaccctgtggcttgcttcccccagggcagcacaggctaagtcaggaacatcggatgccagggagggaggagaaagccgaagcgaaaggggtcagggtgctgaggcaacagcagcaa

SEQ ID NO: 64472 - DNA, 7342 bp, Homo sapiens
ccttcttgaggaatggagcttcgcagaggttgcatttagattcaacagttcacagcggcgggctgctgctgctgcctctccgaagagctcgcggagctccccagaggcggtggtccccgtgcttgtctggatgcggctctgagtctccgtgtgtctttctgcttgttgctgtgtgcgggtgttcggccgcgatcacctttgtgtgtcttctgtctgtttaaacctcaggatggctcgcttcggggaggcggtggtcgccaggccagggtccggcgatggagactcggaccagagcaggaaccggcaaggaacccccgtgccggcctcggggcaggcggccgcctacaagcagacgaaagcacagagggcgcggactatggctttgtacaaccccattcccgtccggcagaactgtttcaccgtcaacagatccctgttcatcttcggagaagataacattgtcaggaaatatgccaagaagctcatcgattggccgccatttgagtacatgatcctggccaccatcattgccaactgcatcgtcctggccctggagcagcatcttcctgaggatgacaagacccccatgtcccgaagactggagaagacagaaccttatttcattgggatcttttgctttgaagctgggatcaaaattgtggccctggggttcatcttccataagggctcttacctccgcaatggctggaatgtcatggacttcatcgtggtcctcagtggcatcctggccactgcaggaacccacttcaatactcacgtggacctgaggaccctccgggctgtgcgtgtcctgcggcctttgaagctcgtgtcagggatacctagcctgcagattgtgttgaagtccatcatgaaggccatggtacctcttctgcagattggccttctgctcttctttgccatcctgatgtttgctatcattggtttggagttctacagtggcaagttacatcgagcgtgcttcatgaacaattcaggtattctagaaggatttgacccccctcacccatgtggtgtgcagggctgcccagctggttatgaatgcaaggactggatcggccccaatgatgggatcacccagtttgataacatcctttttgctgtgctgactgtcttccagtgcatcaccatggaagggtggaccactgtgctgtacaataccaatgatgccttaggagccacctggaattggctgtacttcatccccctcatcatcattggatccttctttgttctcaacctagtcctgggagtgctttccggggaatttgccaaagagagagagagagtggagaaccgaagggctttcatgaagctgcggcgccagcagcagattgagcgtgagctgaatggctaccgtgcctggatagacaaagcagaggaagtcatgctcgctgaagaaaataaaaatgctggaacatccgccttagaagtgcttcgaagggcaaccatcaagaggagccggacagaggccatgactcgagactccagtgatgagcactgtgttgatatctcctctgtgggcacacctctggcccgagccagtatcaaaagtgcaaaggtagacggggtctcttatttccggcacaaggaaaggcttctgcgcatctccattcgccacatggttaaatcccaggtgttttactggattgtgctgagccttgtggcactcaacactgcctgtgtggccattgtccatcacaaccagccccagtggctcacccacctcctctactatgcagaatttctgtttctgggactcttcctcttggagatgtccctgaagatgtatggcatggggcctcgcctttattttcactcttcattcaactgctttgattttggggtcacagtgggcagtatctttgaagtggtctgggcaatcttcagacctggtacgtcttttggaatcagtgtcttgcgagccctccggcttctaagaatatttaaaataaccaagtattgggcttccctacggaatttggtggtctccttgatgagctcaatgaagtctatcatcagtttgcttttcctcctcttcctcttcatcgttgtctttgctctcctaggaatgcagttatttggaggcaggtttaactttaatgatgggactccttcggcaaattttgataccttccctgcagccatcatgactgtgttccagatcctgacgggtgaggactggaatgaggtgatgtacaatgggatccgctcccagggtggggtcagctcaggcatgtggtctgccatctacttcattgtgctcaccttgtttggcaactacacgctactgaatgtgttcttggctatcgctgtggataatctcgccaacgcccaggaactgaccaaggatgaacaggaggaagaagaggccttcaaccagaaacatgcactgcagaaggccaaggaggtcagcccgatgtctgcacccaacatgccttcgatcgaaagagacagaaggagaagacaccacatgtcgatgtgggagccacgcagcagccacctgagggagcggaggcgccggcaccacatgtccgtgtgggagcagcgtaccagccagctgaggaagcacatgcagatgtccagccaggaggccctcaacagagaggaggcgccgaccatgaacccgctcaaccccctcaacccgctcagctccctcaacccgctcaatgcccaccccagcctttatcggcgacccagggccattgagggcctggccctgggcctggccctggagaagttcgaggaggagcgcatcagccgtggggggtccctcaagggggatggaggggaccgatccagtgccctggacaaccagaggacccctttgtccctgggccagcgggagccaccatggctggccaggccctgtcatggaaactgtgacccgactcagcaggaggcagggggaggagaggctgtggtgacctttgaggaccgggccaggcacaggcagagccaacggcgcagccggcatcgccgcgtcaggacagaaggcaaggagtcctcttcagcctcccggagcaggtctgccagccaggaacgcagtctggatgaagccatgcccactgaaggggagaaggaccatgagctcaggggcaaccatggtgccaaggagccaacgatccaagaagagagagcccaggatttaaggaggaccaacagtctgatggtgtccagaggctccgggctggcaggaggccttgatgaggctgacacccccctagtcctgccccatcctgagctggaagtggggaagcacgtggtgctgacggagcaggagccagaaggcagcagtgagcaggccctgctggggaatgtgcagctagacatgggccgggtcatcagccagagcgagcctgacctctcctgcatcacggccaacacggacaaggccaccaccgagagcaccagcgtcaccgtcgccatccccgacgtggaccccttggtggactcaaccgtggtgcacattagcaacaagacggatggggaagccagtcccttgaaggaggcagagatcagagaggatgaggaggaggtggagaagaagaagcagaagaaggagaagcgtgagacaggcaaagccatggtgccccacagctcaatgttcatcttcagcaccaccaacccgatccggagggcctgccactacatcgtgaacctgcgctactttgagatgtgcatcctcctggtgattgcagccagcagcatcgccctggcggcagaggaccccgtcctgaccaactcggagcgcaacaaagtcctgaggtattttgactatgtgttcacgggcgtgttcacctttgagatggttataaagatgatagaccaaggcttgatcctgcaggatgggtcctacttccgagacttgtggaacatcctggactttgtggtggtcgttggcgcattggtggcctttgctctggcgaacgctttgggaaccaacaaaggacgggacatcaagaccatcaagtctctgcgggtgctccgagttctaaggccactgaaaaccatcaagcgcttgcccaagctcaaggccgtcttcgactgcgtagtgacctccttgaagaatgtcttcaacatactcattgtgtacaagctcttcatgttcatctttgctgtcatcgcagttcagctcttcaagggaaagttcttttattgcacggacagttccaaggacacagagaaggagtgcataggcaactatgtagatcacgagaaaaacaagatggaggtgaagggccgggaatggaagcgccatgaattccactacgacaacattatctgggccctgctgaccctcttcaccgtctccacaggggaaggatggcctcaagttctgcagcactctgtagatgtgacagaggaagaccgaggcccaagccgcagcaaccgcatggagatgtctatcttttatgtagtctactttgtggtcttccccttcttctttgtcaatatctttgtggctctcatcatcatcaccttccaggagcaaggggataagatgatggaggagtgcagcctggagaagaatgagagggcgtgcatcgacttcgccatcagcgccaaacctctcacccgctacatgccgcagaacagacacaccttccagtaccgcgtgtggcactttgtggtgtctccgtcctttgagtacaccattatggccatgatcgccttgaatactgttgtgctgatgatgaagtattattctgctccctgtacctatgagctggccctgaagtacctgaatatcgccttcaccatggtgttttccctggaatgtgtcctgaaggtcatcgcttttggctttttgaactatttccgagacacctggaatatctttgacttcatcaccgtgattggcagtatcacagaaattatcctgacagacagcaagctggtgaacaccagtggcttcaatatgagctttctgaagctcttccgagctgcccgcctcataaagctcctgcgtcagggctataccatacgcattttgctgtggacctttgtgcagtcctttaaggccctcccttatgtctgccttttaattgccatgcttttcttcatttatgccatcattgggatgcaggtatttggaaacataaaattagacgaggagagtcacatcaaccggcacaacaacttccggagtttctttgggtccctaatgctactcttcaggagtgccacaggtgaggcctggcaggagattatgctgtcatgccttggggagaagggctgtgagcctgacaccaccgcaccatcagggcagaacgagaatgaacgctgcggcaccgatctggcctacgtgtactttgtctccttcatcttcttctgctccttcttgatgctcaacctgtttgtggccgtcatcatggacaactttgagtacctgactcgggactcctccatcctggggcctcaccacttggacgagtttgtccgcgtctgggcagaatatgaccgagcagcatgtggccgcatccattacactgagatgtatgaaatgctgactctcatgtcacctccgctaggcctcggcaagagatgtccctccaaagtggcatataagaggttggtcctgatgaacatgccagtagctgaggacatgacggtccacttcacctccacacttatggctctgatccggacagctctggacattaaaattgccaaaggtggtgcagacaggcagcagctagactcagagctacaaaaggagaccctagccatctggcctcacctatcccagaagatgctggatctgcttgtgcccatgcccaaagcctctgacctgactgtgggcaaaatctatgcagcaatgatgatcatggactactataagcagagtaaggtgaagaagcagaggcagcagctggaggaacagaaaaatgcccccatgttccagcgcatggagccttcatctctgcctcaggagatcattgctaatgccaaagccctgccttacctccagcaggaccccgtttcaggcctgagtggccggagtggatacccttcgatgagtccactctctccccaggatatattccagttggcttgtatggaccccgccgatgacggacagttccaagaacggcagtctctggagccagaggttagtgaattaaaaagcgtgcagccctctaaccatggcatctaccttccttcggacacccaggagcatgcgggatctgggagggcatcttctatgccacgtctgactgtggatccccaggtggtgacagaccctagctccatgagacgttcattttccactattcgggataagcgttcaaattcctcgtggttggaggaattctccatggagcgaagcagtgaaaatacctacaagtcccgtcgccggagttaccactcctccttgcggctgtcagcccaccgcctgaactctgattcaggccacaagtctgacactcacccctcagggggcagggagcggcgacgatcaaaagagcgaaagcatcttctctctcctgatgtctcccgctgcaattcagaagagcgagggacccaggctgactgggagtccccagagcgccgtcaatccaggtcacccagtgagggcaggtcacagacgcccaacagacagggcacaggttccctaagtgagagctccatcccctctgtctctgacaccagcaccccaagaagaagtcgtcggcagctcccacccgtcccgccaaagccccggcccctcctttcctacagctccctgattcgacacgcgggcagcatctctccacctgctgatggaagcgaggagggctccccgctgacctcccaagctctggagagcaacaatgcttggctgaccgagtcttccaactctccgcacccccagcagaggcaacatgcctccccacagcgctacatctccgagccctacttggccctgcacgaagactcccacgcctcagactgtgttgaggaggagacgctcactttcgaagcagccgtggctactagcctgggccgttccaacaccatcggctcagccccacccctgcggcatagctggcagatgcccaacgggcactatcggcggcggaggcgcggggggcctgggccaggcatgatgtgtggggctgtcaacaacctgctaagtgacacggaagaagatgacaaatgctagaggctgctcccccctccgatgcatgctcttctctcacatggagaaaaccaagacagaattgggaagccagtgcggccccgcggggaggaagagggaaaaggaagatggaaggacaccatgcaatagactcactggctcagaatggtcgtcctgttgtaggcctccccctag

SEQ ID NO: 64473 - DNA, 6139 bp, Homo sapiens
ccttcttgaggaatggagcttcgcagaggttgcatttagattcaacagttcacagcggcgggctgctgctgctgcctctccgaagagctcgcggagctccccagaggcggtggtccccgtgcttgtctggatgcggctctgagtctccgtgtgtctttctgcttgttgctgtgtgcgggtgttcggccgcgatcacctttgtgtgtcttctgtctgtttaaacctcaggatggctcgcttcggggaggcggtggtcgccaggccagggtccggcgatggagactcggaccagagcaggaaccggcaaggaacccccgtgccggcctcggggcaggcggccgcctacaagcagacgaaagcacagagggcgcggactatggctttgtacaaccccattcccgtccggcagaactgtttcaccgtcaacagatccctgttcatcttcggagaagataacattgtcaggaaatatgccaagaagctcatcgattggccgccatttgagtacatgatcctggccaccatcattgccaactgcatcgtcctggccctggagcagcatcttcctgaggatgacaagacccccatgtcccgaagactggagaagacagaaccttatttcattgggatcttttgctttgaagctgggatcaaaattgtggccctggggttcatcttccataagggctcttacctccgcaatggctggaatgtcatggacttcatcgtggtcctcagtggcatcctggccactgcaggaacccacttcaatactcacgtggacctgaggaccctccgggctgtgcgtgtcctgcggcctttgaagctcgtgtcagggatacctagcctgcagattgtgttgaagtccatcatgaaggccatggtacctcttctgcagattggccttctgctcttctttgccatcctgatgtttgctatcattggtttggagttctacagtggcaagttacatcgagcgtgcttcatgaacaattcaggtattctagaaggatttgacccccctcacccatgtggtgtgcagggctgcccagctggttatgaatgcaaggactggatcggccccaatgatgggatcacccagtttgataacatcctttttgctgtgctgactgtcttccagtgcatcaccatggaagggtggaccactgtgctgtacaataccaatgatgccttaggagccacctggaattggctgtacttcatccccctcatcatcattggatccttctttgttctcaacctagtcctgggagtgctttccggggaatttgccaaagagagagagagagtggagaaccgaagggctttcatgaagctgcggcgccagcagcagattgagcgtgagctgaatggctaccgtgcctggatagacaaagcagaggaagtcatgctcgctgaagaaaataaaaatgctggaacatccgccttagaagtgcttcgaagggcaaccatcaagaggagccggacagaggccatgactcgagactccagtgatgagcactgtgttgatatctcctctgtgggcacacctctggcccgagccagtatcaaaagtgcaaaggtagacggggtctcttatttccggcacaaggaaaggcttctgcgcatctccattcgccacatggttaaatcccaggtgttttactggattgtgctgagccttgtggcactcaacactgcctgtgtggccattgtccatcacaaccagccccagtggctcacccacctcctctactatgcagaatttctgtttctgggactcttcctcttggagatgtccctgaagatgtatggcatggggcctcgcctttattttcactcttcattcaactgctttgattttggggtcacagtgggcagtatctttgaagtggtctgggcaatcttcagacctggtacgtcttttggaatcagtgtcttgcgagccctccggcttctaagaatatttaaaataaccaagtattgggcttccctacggaatttggtggtctccttgatgagctcaatgaagtctatcatcagtttgcttttcctcctcttcctcttcatcgttgtctttgctctcctaggaatgcagttatttggaggcaggtttaactttaatgatgggactccttcggcaaattttgataccttccctgcagccatcatgactgtgttccagatcctgacgggtgaggactggaatgaggtgatgtacaatgggatccgctcccagggtggggtcagctcaggcatgtggtctgccatctacttcattgtgctcaccttgtttggcaactacacgctactgaatgtgttcttggctatcgctgtggataatctcgccaacgcccaggaactgaccaaggatgaacaggaggaagaagaggccttcaaccagaaacatgcactgcagaaggccaaggaggtcagcccgatgtctgcacccaacatgccttcgatcgagagggagcggaggcgccggcaccacatgtccgtgtgggagcagcgtaccagccagctgaggaagcacatgcagatgtccagccaggaggccctcaacagagaggaggcgccgaccatgaacccgctcaaccccctcaacccgctcagctccctcaacccgctcaatgcccaccccagcctttatcggcgacccagggccattgagggcctggccctgggcctggccctggagaagttcgaggaggagcgcatcagccgtggggggtccctcaagggggatggaggggaccgatccagtgccctggacaaccagaggacccctttgtccctgggccagcgggagccaccatggctggccaggccctgtcatggaaactgtgacccgactcagcaggaggcagggggaggagaggctgtggtgacctttgaggaccgggccaggcacaggcagagccaacggcgcagccggcatcgccgcgtcaggacagaaggcaaggagtcctcttcagcctcccggagcaggtctgccagccaggaacgcagtctggatgaagccatgcccactgaaggggagaaggaccatgagctcaggggcaaccatggtgccaaggagccaacgatccaagaagagagagcccaggatttaaggaggaccaacagtctgatggtgtccagaggctccgggctggcaggaggccttgatgaggctgacacccccctagtcctgccccatcctgagctggaagtggggaagcacgtggtgctgacggagcaggagccagaaggcagcagtgagcaggccctgctggggaatgtgcagctagacatgggccgggtcatcagccagagcgagcctgacctctcctgcatcacggccaacacggacaaggccaccaccgagagcaccagcgtcaccgtcgccatccccgacgtggaccccttggtggactcaaccgtggtgcacattagcaacaagacggatggggaagccagtcccttgaaggaggcagagatcagagaggatgaggaggaggtggagaagaagaagcagaagaaggagaagcgtgagacaggcaaagccatggtgccccacagctcaatgttcatcttcagcaccaccaacccgatccggagggcctgccactacatcgtgaacctgcgctactttgagatgtgcatcctcctggtgattgcagccagcagcatcgccctggcggcagaggaccccgtcctgaccaactcggagcgcaacaaagtcctgaggtattttgactatgtgttcacgggcgtgttcacctttgagatggttataaagatgatagaccaaggcttgatcctgcaggatgggtcctacttccgagacttgtggaacatcctggactttgtggtggtcgttggcgcattggtggcctttgctctggcgaacgctttgggaaccaacaaaggacgggacatcaagaccatcaagtctctgcgggtgctccgagttctaaggccactgaaaaccatcaagcgcttgcccaagctcaaggccgtcttcgactgcgtagtgacctccttgaagaatgtcttcaacatactcattgtgtacaagctcttcatgttcatctttgctgtcatcgcagttcagctcttcaagggaaagttcttttattgcacggacagttccaaggacacagagaaggagtgcataggcaactatgtagatcacgagaaaaacaagatggaggtgaagggccgggaatggaagcgccatgaattccactacgacaacattatctgggccctgctgaccctcttcaccgtctccacaggggaaggatggcctcaagttctgcagcactctgtagatgtgacagaggaagaccgaggcccaagccgcagcaaccgcatggagatgtctatcttttatgtagtctactttgtggtcttccccttcttctttgtcaatatctttgtggctctcatcatcatcaccttccaggagcaaggggataagatgatggaggagtgcagcctggagaagaatgagagggcgtgcatcgacttcgccatcagcgccaaacctctcacccgctacatgccgcagaacagacacaccttccagtaccgcgtgtggcactttgtggtgtctccgtcctttgagtacaccattatggccatgatcgccttgaatactgttgtgctgatgatgaagtattattctgctccctgtacctatgagctggccctgaagtacctgaatatcgccttcaccatggtgttttccctggaatgtgtcctgaaggtcatcgcttttggctttttgaactatttccgagacacctggaatatctttgacttcatcaccgtgattggcagtatcacagaaattatcctgacagacagcaagctggtgaacaccagtggcttcaatatgagctttctgaagctcttccgagctgcccgcctcataaagctcctgcgtcagggctataccatacgcattttgctgtggacctttgtgcagtcctttaaggccctcccttatgtctgccttttaattgccatgcttttcttcatttatgccatcattgggatgcaggtatttggaaacataaaattagacgaggagagtcacatcaaccggcacaacaacttccggagtttctttgggtccctaatgctactcttcaggagtgccacaggtgaggcctggcaggagattatgctgtcatgccttggggagaagggctgtgagcctgacaccaccgcaccatcagggcagaacgagaatgaacgctgcggcaccgatctggcctacgtgtactttgtctccttcatcttcttctgctccttcttgatgctcaacctgtttgtggccgtcatcatggacaactttgagtacctgactcgggactcctccatcctggggcctcaccacttggacgagtttgtccgcgtctgggcagaatatgaccgagcagcatggtgcgtaggcccctcggccgccccagcggggcccagagcaaaggtctctggagttcccagggaagaggctggaattggagccacccaaatgcctgcctgttacagaaggaaaggagattcctcttgattgtggcccatagaagaggctctggtatcaagccagtcaccaaggacttctgtatcctcctttcccctctctttccttctgtgacagggttttccctttgtgggctggtctcatcatccagtcctcacctcagattatttgggctcagtcccaagagaactttccaataatctttttctgccaatggttagtggactcctttgagttatcagggggtttgacaagggtttttggccagctggacatctggccaccatgatcagtgactgtgttttctctttctcgttcctctcaacagatacagttggatataactctgaaattattttttaaaaaccaaacaagttgttcttccaactgttcccttaaatatttgtggatttttattacatggaactaaattaaatggtaggaattggtgaagataacttctttactgtctcttttgctgtttagtagttctgaagtgatagcgtgccttctaggctctagagcagggattggcaaactacatcccatgggcaaaattcagcccattgtctgtttttgcaaataaagttttattgaaagaca

SEQ ID NO: 64474 - DNA, 534 bp, Homo sapiens
gagccagaggttagtgaattaaaaagcgtgcagccctctaaccatggcatctaccttccttcggacacccaggagcatgcgggatctgggagggcatcttctatgccacgtctgactgtggatccccaggtaaaaagcaaccacctacattaatgcagtggcatccgggctgtattagctgggttatggaataatatctgatatttgcaggtgagccgttgacttgcccgcaccccttccctataaataaaacctggctcatgggtcgtctctaatagagcctgcttctccggtgttttcaatgaccccccctaaccacaacagcccagcgaacaaaattgcatacttcactccggacgggttaaacattctcaagattcaaccagccatgcaagaaatattttccaggattttctctgtgtacttctccatcctttttttgtttcctgactcctccagcacatatgcagttacttacacacacaggtctgtgtcaggactgtctgtcctaaccagtgcaggccacatctcatt

SEQ ID NO: 64475 - DNA, 517 bp, Homo sapiens
cggccgcctacaagcagacgaaagcacagagggcgcggactatggctttgtacaaccccattcccgtccggcagaactgtttcaccgtcaacagatccctgttcatcttcggagaagataacattgtcaggaaatatgccaagaagctcatcgattggccatatcctttcttgcccaccataactccctctccccctttgcatttcttcgggtgaaggggggtacctagcatggaatgtatcccccaccccttcctggtgccaatttgcccctttgctgaagcacactcttcggtgcatctaaggggcaagcttggtgccgtggagacccgtttgggcactagtgtttttcaaggtaagacttttggttttttatttttcctatgtggaaatctttagtgtccctgggtgcatccctttctgggctgggctttgtctgattcccagccccctccccacccctactcccttcacatgccgccctctacatagattgggttgccccaatgcttcctttc

SEQ ID NO: 64476 - DNA, 7605 bp, Homo sapiens
ccttcttgaggaatggagcttcgcagaggttgcatttagattcaacagttcacagcggcgggctgctgctgctgcctctccgaagagctcgcggagctccccagaggcggtggtccccgtgcttgtctggatgcggctctgagtctccgtgtgtctttctgcttgttgctgtgtgcgggtgttcggccgcgatcacctttgtgtgtcttctgtctgtttaaacctcaggatggctcgcttcggggaggcggtggtcgccaggccagggtccggcgatggagactcggaccagagcaggaaccggcaaggaacccccgtgccggcctcggggcaggcggccgcctacaagcagacgaaagcacagagggcgcggactatggctttgtacaaccccattcccgtccggcagaactgtttcaccgtcaacagatccctgttcatcttcggagaagataacattgtcaggaaatatgccaagaagctcatcgattggccgccatttgagtacatgatcctggccaccatcattgccaactgcatcgtcctggccctggagcagcatcttcctgaggatgacaagacccccatgtcccgaagactggagaagacagaaccttatttcattgggatcttttgctttgaagctgggatcaaaattgtggccctggggttcatcttccataagggctcttacctccgcaatggctggaatgtcatggacttcatcgtggtcctcagtggcatcctggccactgcaggaacccacttcaatactcacgtggacctgaggaccctccgggctgtgcgtgtcctgcggcctttgaagctcgtgtcagggatacctagcctgcagattgtgttgaagtccatcatgaaggccatggtacctcttctgcagattggccttctgctcttctttgccatcctgatgtttgctatcattggtttggagttctacagtggcaagttacatcgagcgtgcttcatgaacaattcaggtattctagaaggatttgacccccctcacccatgtggtgtgcagggctgcccagctggttatgaatgcaaggactggatcggccccaatgatgggatcacccagtttgataacatcctttttgctgtgctgactgtcttccagtgcatcaccatggaagggtggaccactgtgctgtacaataccaatgatgccttaggagccacctggaattggctgtacttcatccccctcatcatcattggatccttctttgttctcaacctagtcctgggagtgctttccggggaatttgccaaagagagagagagagtggagaaccgaagggctttcatgaagctgcggcgccagcagcagattgagcgtgagctgaatggctaccgtgcctggatagacaaagcagaggaagtcatgctcgctgaagaaaataaaaatgctggaacatccgccttagaagtgcttcgaagggcaaccatcaagaggagccggacagaggccatgactcgagactccagtgatgagcactgtgttgatatctcctctgtgggcacacctctggcccgagccagtatcaaaagtgcaaaggtagacggggtctcttatttccggcacaaggaaaggcttctgcgcatctccattcgccacatggttaaatcccaggtgttttactggattgtgctgagccttgtggcactcaacactgcctgtgtggccattgtccatcacaaccagccccagtggctcacccacctcctctactatgcagaatttctgtttctgggactcttcctcttggagatgtccctgaagatgtatggcatggggcctcgcctttattttcactcttcattcaactgctttgattttggggtcacagtgggcagtatctttgaagtggtctgggcaatcttcagacctggtacgtcttttggaatcagtgtcttgcgagccctccggcttctaagaatatttaaaataaccaagtattgggcttccctacggaatttggtggtctccttgatgagctcaatgaagtctatcatcagtttgcttttcctcctcttcctcttcatcgttgtctttgctctcctaggaatgcagttatttggaggcaggtttaactttaatgatgggactccttcggcaaattttgataccttccctgcagccatcatgactgtgttccagatcctgacgggtgaggactggaatgaggtgatgtacaatgggatccgctcccagggtggggtcagctcaggcatgtggtctgccatctacttcattgtgctcaccttgtttggcaactacacgctactgaatgtgttcttggctatcgctgtggataatctcgccaacgcccaggaactgaccaaggatgaacaggaggaagaagaggccttcaaccagaaacatgcactgcagaaggccaaggaggtcagcccgatgtctgcacccaacatgccttcgatcgagagggagcggaggcgccggcaccacatgtccgtgtgggagcagcgtaccagccagctgaggaagcacatgcagatgtccagccaggaggccctcaacagagaggaggcgccgaccatgaacccgctcaaccccctcaacccgctcagctccctcaacccgctcaatgcccaccccagcctttatcggcgacccagggccattgagggcctggccctgggcctggccctggagaagttcgaggaggagcgcatcagccgtggggggtccctcaagggggatggaggggaccgatccagtgccctggacaaccagaggacccctttgtccctgggccagcgggagccaccatggctggccaggccctgtcatggaaactgtgacccgactcagcaggaggcagggggaggagaggctgtggtgacctttgaggaccgggccaggcacaggcagagccaacggcgcagccggcatcgccgcgtcaggacagaaggcaaggagtcctcttcagcctcccggagcaggtctgccagccaggaacgcagtctggatgaagccatgcccactgaaggggagaaggaccatgagctcaggggcaaccatggtgccaaggagccaacgatccaagaagagagagcccaggatttaaggaggaccaacagtctgatggtgtccagaggctccgggctggcaggaggccttgatgaggctgacacccccctagtcctgccccatcctgagctggaagtggggaagcacgtggtgctgacggagcaggagccagaaggcagcagtgagcaggccctgctggggaatgtgcagctagacatgggccgggtcatcagccagagcgagcctgacctctcctgcatcacggccaacacggacaaggccaccaccgagagcaccagcgtcaccgtcgccatccccgacgtggaccccttggtggactcaaccgtggtgcacattagcaacaagacggatggggaagccagtcccttgaaggaggcagagatcagagaggatgaggaggaggtggagaagaagaagcagaagaaggagaagcgtgagacaggcaaagccatggtgccccacagctcaatgttcatcttcagcaccaccaacccgatccggagggcctgccactacatcgtgaacctgcgctactttgagatgtgcatcctcctggtgattgcagccagcagcatcgccctggcggcagaggaccccgtcctgaccaactcggagcgcaacaaagtcctgaggtattttgactatgtgttcacgggcgtgttcacctttgagatggttataaagatgatagaccaaggcttgatcctgcaggatgggtcctacttccgagacttgtggaacatcctggactttgtggtggtcgttggcgcattggtggcctttgctctggcgaacgctttgggaaccaacaaaggacgggacatcaagaccatcaagtctctgcgggtgctccgagttctaaggccactgaaaaccatcaagcgcttgcccaagctcaaggccgtcttcgactgcgtagtgacctccttgaagaatgtcttcaacatactcattgtgtacaagctcttcatgttcatctttgctgtcatcgcagttcagctcttcaagggaaagttcttttattgcacggacagttccaaggacacagagaaggagtgcataggcaactatgtagatcacgagaaaaacaagatggaggtgaagggccgggaatggaagcgccatgaattccactacgacaacattatctgggccctgctgaccctcttcaccgtctccacaggggaaggatggcctcaagttctgcagcactctgtagatgtgacagaggaagaccgaggcccaagccgcagcaaccgcatggagatgtctatcttttatgtagtctactttgtggtcttccccttcttctttgtcaatatctttgtggctctcatcatcatcaccttccaggagcaaggggataagatgatggaggagtgcagcctggagaagaatgagagggcgtgcatcgacttcgccatcagcgccaaacctctcacccgctacatgccgcagaacagacacaccttccagtaccgcgtgtggcactttgtggtgtctccgtcctttgagtacaccattatggccatgatcgccttgaatactgttgtgctgatgatgaagtattattctgctccctgtacctatgagctggccctgaagtacctgaatatcgccttcaccatggtgttttccctggaatgtgtcctgaaggtcatcgcttttggctttttgaactatttccgagacacctggaatatctttgacttcatcaccgtgattggcagtatcacagaaattatcctgacagacagcaagctggtgaacaccagtggcttcaatatgagctttctgaagctcttccgagctgcccgcctcataaagctcctgcgtcagggctataccatacgcattttgctgtggacctttgtgcagtcctttaaggccctcccttatgtctgccttttaattgccatgcttttcttcatttatgccatcattgggatgcaggtatttggaaacataaaattagacgaggagagtcacatcaaccggcacaacaacttccggagtttctttgggtccctaatgctactcttcaggagtgccacaggtgaggcctggcaggagattatgctgtcatgccttggggagaagggctgtgagcctgacaccaccgcaccatcagggcagaacgagaatgaacgctgcggcaccgatctggcctacgtgtactttgtctccttcatcttcttctgctccttcttgatgctcaacctgtttgtggccgtcatcatggacaactttgagtacctgactcgggactcctccatcctggggcctcaccacttggacgagtttgtccgcgtctgggcagaatatgaccgagcagcatgtggccgcatccattacactgagatgtatgaaatgctgactctcatgtcacctccgctaggcctcggcaagagatgtccctccaaagtggcatataagaggttggtcctgatgaacatgccagtagctgaggacatgacggtccacttcacctccacacttatggctctgatccggacagctctggacattaaaattgccaaaggtggtgcagacaggcagcagctagactcagagctacaaaaggagaccctagccatctggcctcacctatcccagaagatgctggatctgcttgtgcccatgcccaaagcctctgacctgactgtgggcaaaatctatgcagcaatgatgatcatggactactataagcagagtaaggtgaagaagcagaggcagcagctggaggaacagaaaaatgcccccatgttccagcgcatggagccttcatctctgcctcaggagatcattgctaatgccaaagccctgccttacctccagcaggaccccgtttcaggcctgagtggccggagtggatacccttcgatgagtccactctctccccaggatatattccagttggcttgtatggaccccgccgatgacggacagttccaagaacggcagtctctggtggtgacagaccctagctccatgagacgttcattttccactattcgggataagcgttcaaattcctcgtggttggaggaattctccatggagcgaagcagtgaaaatacctacaagtcccgtcgccggagttaccactcctccttgcggctgtcagcccaccgcctgaactctgattcaggccacaagtctgacactcacccctcagggggcagggagcggcgacgatcaaaagagcgaaagcatcttctctctcctgatgtctcccgctgcaattcagaagagcgagggacccaggctgactgggagtccccagagcgccgtcaatccaggtcacccagtgagggcaggtcacagacgcccaacagacagggcacaggttccctaagtgagagctccatcccctctgtctctgacaccagcaccccaagaagaagtcgtcggcagctcccacccgtcccgccaaagccccggcccctcctttcctacagctccctgattcgacacgcgggcagcatctctccacctgctgatggaagcgaggagggctccccgctgacctcccaagctctggagagcaacaatgcttggctgaccgagtcttccaactctccgcacccccagcagaggcaacatgcctccccacagcgctacatctccgagccctacttggccctgcacgaagactcccacgcctcagactgtgttgaggaggagacgctcactttcgaagcagccgtggctactagcctgggccgttccaacaccatcggctcagccccacccctgcggcatagctggcagatgcccaacgggcactatcggcggcggaggcgcggggggcctgggccaggcatgatgtgtggggctgtcaacaacctgctaagtgacacggaagaagatgacaaatgctagaggctgctcccccctccgatgcatgctcttctctcacatggagaaaaccaagacagaattgggaagccagtgcggccccgcggggaggaagagggaaaaggaagatggaaggacaccatgcattatcagagaagaggaagtaaaggacaatcagaacaccagtcaaacccaccaaattgctttattcccctttgcaagatgggcactgccatagttctgcctctttgctggggaaagaaaccaggaacgtggagggttattactgcgggagaagggacacgaggatggctttgcttccccttgccccttcccacttttctaaaagctgtggagggatctagctggcctatgtctacactcagtgccctgagaagcctggaagactttctggctcttaactggggagtagtggagaccataggagaggactctcctccctcaccagctcttacgcctcagccagcaccactgccaccagggcaactgcagcagcatctcatgcataaccctgtggcttgcttcccccagggcagcacaggctaagtcaggaacatcggatgccagggagggaggagaaagccgaagcgaaaggggtcagggtgctgaggcaacagcagcaa

SEQ ID NO: 64477 - DNA, 7536 bp, Homo sapiens
atgcgtggactgagcccagaccgcaggctgcccgagcccgccccctgcccggctgcggggagccctgagcccaggtccgcgggccgccgccaacgccacgtcctggccctgccggaagaagaggcatggcggccccagcagtgcgctctgctcgaggccgacgcctcggacgaggtgggcatgctgccggcttccccgcgcgccgcctctggcttcgacaacttcttccaggtgcaggagggcgagggccagggctgggagggcgccatggcactggaggcgggctccagccctttcctgccggtgagccccgaggtcatgaagcggcggcgcgggggcctcatcgagcagcgcgacatcatcaaggcccacgaggcgcacaagatgcagagcaccccgcaggcccggcgcaaggaatgggagatggctcgcttcggggaggcggtggtcgccaggccagggtccggcgatggagactcggaccagagcaggaaccggcaaggaacccccgtgccggcctcggggcaggcggccgcctacaagcagacgaaagcacagagggcgcggactatggctttgtacaaccccattcccgtccggcagaactgtttcaccgtcaacagatccctgttcatcttcggagaagataacattgtcaggaaatatgccaagaagctcatcgattggccgccatttgagtacatgatcctggccaccatcattgccaactgcatcgtcctggccctggagcagcatcttcctgaggatgacaagacccccatgtcccgaagactggagaagacagaaccttatttcattgggatcttttgctttgaagctgggatcaaaattgtggccctggggttcatcttccataagggctcttacctccgcaatggctggaatgtcatggacttcatcgtggtcctcagtggcatcctggccactgcaggaacccacttcaatactcacgtggacctgaggaccctccgggctgtgcgtgtcctgcggcctttgaagctcgtgtcagggatacctagcctgcagattgtgttgaagtccatcatgaaggccatggtacctcttctgcagattggccttctgctcttctttgccatcctgatgtttgctatcattggtttggagttctacagtggcaagttacatcgagcgtgcttcatgaacaattcaggtattctagaaggatttgacccccctcacccatgtggtgtgcagggctgcccagctggttatgaatgcaaggactggatcggccccaatgatgggatcacccagtttgataacatcctttttgctgtgctgactgtcttccagtgcatcaccatggaagggtggaccactgtgctgtacaataccaatgatgccttaggagccacctggaattggctgtacttcatccccctcatcatcattggatccttctttgttctcaacctagtcctgggagtgctttccggggaatttgccaaagagagagagagagtggagaaccgaagggctttcatgaagctgcggcgccagcagcagattgagcgtgagctgaatggctaccgtgcctggatagacaaagcagaggaagtcatgctcgctgaagaaaataaaaatgctggaacatccgccttagaagtgcttcgaagggcaaccatcaagaggagccggacagaggccatgactcgagactccagtgatgagcactgtgttgatatctcctctgtgggcacacctctggcccgagccagtatcaaaagtgcaaaggtagacggggtctcttatttccggcacaaggaaaggcttctgcgcatctccattcgccacatggttaaatcccaggtgttttactggattgtgctgagccttgtggcactcaacactgcctgtgtggccattgtccatcacaaccagccccagtggctcacccacctcctctactatgcagaatttctgtttctgggactcttcctcttggagatgtccctgaagatgtatggcatggggcctcgcctttattttcactcttcattcaactgctttgattttggggtcacagtgggcagtatctttgaagtggtctgggcaatcttcagacctggtacgtcttttggaatcagtgtcttgcgagccctccggcttctaagaatatttaaaataaccaagtattgggcttccctacggaatttggtggtctccttgatgagctcaatgaagtctatcatcagtttgcttttcctcctcttcctcttcatcgttgtctttgctctcctaggaatgcagttatttggaggcaggtttaactttaatgatgggactccttcggcaaattttgataccttccctgcagccatcatgactgtgttccagatcctgacgggtgaggactggaatgaggtgatgtacaatgggatccgctcccagggtggggtcagctcaggcatgtggtctgccatctacttcattgtgctcaccttgtttggcaactacacgctactgaatgtgttcttggctatcgctgtggataatctcgccaacgcccaggaactgaccaaggatgaacaggaggaagaagaggccttcaaccagaaacatgcactgcagaaggccaaggaggtcagcccgatgtctgcacccaacatgccttcgatcgaaagagacagaaggagaagacaccacatgtcgatgtgggagccacgcagcagccacctgagggagcggaggcgccggcaccacatgtccgtgtgggagcagcgtaccagccagctgaggaagcacatgcagatgtccagccaggaggccctcaacagagaggaggcgccgaccatgaacccgctcaaccccctcaacccgctcagctccctcaacccgctcaatgcccaccccagcctttatcggcgacccagggccattgagggcctggccctgggcctggccctggagaagttcgaggaggagcgcatcagccgtggggggtccctcaagggggatggaggggaccgatccagtgccctggacaaccagaggacccctttgtccctgggccagcgggagccaccatggctggccaggccctgtcatggaaactgtgacccgactcagcaggaggcagggggaggagaggctgtggtgacctttgaggaccgggccaggcacaggcagagccaacggcgcagccggcatcgccgcgtcaggacagaaggcaaggagtcctcttcagcctcccggagcaggtctgccagccaggaacgcagtctggatgaagccatgcccactgaaggggagaaggaccatgagctcaggggcaaccatggtgccaaggagccaacgatccaagaagagagagcccaggatttaaggaggaccaacagtctgatggtgtccagaggctccgggctggcaggaggccttgatgaggctgacacccccctagtcctgccccatcctgagctggaagtggggaagcacgtggtgctgacggagcaggagccagaaggcagcagtgagcaggccctgctggggaatgtgcagctagacatgggccgggtcatcagccagagcgagcctgacctctcctgcatcacggccaacacggacaaggccaccaccgagagcaccagcgtcaccgtcgccatccccgacgtggaccccttggtggactcaaccgtggtgcacattagcaacaagacggatggggaagccagtcccttgaaggaggcagagatcagagaggatgaggaggaggtggagaagaagaagcagaagaaggagaagcgtgagacaggcaaagccatggtgccccacagctcaatgttcatcttcagcaccaccaacccgatccggagggcctgccactacatcgtgaacctgcgctactttgagatgtgcatcctcctggtgattgcagccagcagcatcgccctggcggcagaggaccccgtcctgaccaactcggagcgcaacaaagtcctgaggtattttgactatgtgttcacgggcgtgttcacctttgagatggttataaagatgatagaccaaggcttgatcctgcaggatgggtcctacttccgagacttgtggaacatcctggactttgtggtggtcgttggcgcattggtggcctttgctctggcgaacgctttgggaaccaacaaaggacgggacatcaagaccatcaagtctctgcgggtgctccgagttctaaggccactgaaaaccatcaagcgcttgcccaagctcaaggccgtcttcgactgcgtagtgacctccttgaagaatgtcttcaacatactcattgtgtacaagctcttcatgttcatctttgctgtcatcgcagttcagctcttcaagggaaagttcttttattgcacggacagttccaaggacacagagaaggagtgcataggcaactatgtagatcacgagaaaaacaagatggaggtgaagggccgggaatggaagcgccatgaattccactacgacaacattatctgggccctgctgaccctcttcaccgtctccacaggggaaggatggcctcaagttctgcagcactctgtagatgtgacagaggaagaccgaggcccaagccgcagcaaccgcatggagatgtctatcttttatgtagtctactttgtggtcttccccttcttctttgtcaatatctttgtggctctcatcatcatcaccttccaggagcaaggggataagatgatggaggagtgcagcctggagaagaatgagagggcgtgcatcgacttcgccatcagcgccaaacctctcacccgctacatgccgcagaacagacacaccttccagtaccgcgtgtggcactttgtggtgtctccgtcctttgagtacaccattatggccatgatcgccttgaatactgttgtgctgatgatgaagtattattctgctccctgtacctatgagctggccctgaagtacctgaatatcgccttcaccatggtgttttccctggaatgtgtcctgaaggtcatcgcttttggctttttgaactatttccgagacacctggaatatctttgacttcatcaccgtgattggcagtatcacagaaattatcctgacagacagcaagctggtgaacaccagtggcttcaatatgagctttctgaagctcttccgagctgcccgcctcataaagctcctgcgtcagggctataccatacgcattttgctgtggacctttgtgcagtcctttaaggccctcccttatgtctgccttttaattgccatgcttttcttcatttatgccatcattgggatgcaggtatttggaaacataaaattagacgaggagagtcacatcaaccggcacaacaacttccggagtttctttgggtccctaatgctactcttcaggagtgccacaggtgaggcctggcaggagattatgctgtcatgccttggggagaagggctgtgagcctgacaccaccgcaccatcagggcagaacgagaatgaacgctgcggcaccgatctggcctacgtgtactttgtctccttcatcttcttctgctccttcttgatgctcaacctgtttgtggccgtcatcatggacaactttgagtacctgactcgggactcctccatcctggggcctcaccacttggacgagtttgtccgcgtctgggcagaatatgaccgagcagcatgtggccgcatccattacactgagatgtatgaaatgctgactctcatgtcacctccgctaggcctcggcaagagatgtccctccaaagtggcatataagaggttggtcctgatgaacatgccagtagctgaggacatgacggtccacttcacctccacacttatggctctgatccggacagctctggacattaaaattgccaaaggtggtgcagacaggcagcagctagactcagagctacaaaaggagaccctagccatctggcctcacctatcccagaagatgctggatctgcttgtgcccatgcccaaagcctctgacctgactgtgggcaaaatctatgcagcaatgatgatcatggactactataagcagagtaaggtgaagaagcagaggcagcagctggaggaacagaaaaatgcccccatgttccagcgcatggagccttcatctctgcctcaggagatcattgctaatgccaaagccctgccttacctccagcaggaccccgtttcaggcctgagtggccggagtggatacccttcgatgagtccactctctccccaggatatattccagttggcttgtatggaccccgccgatgacggacagttccaagaacggcagtctctggagccagaggttagtgaattaaaaagcgtgcagccctctaaccatggcatctaccttccttcggacacccaggagcatgcgggatctgggagggcatcttctatgccacgtctgactgtggatccccaggtggtgacagaccctagctccatgagacgttcattttccactattcgggataagcgttcaaattcctcgtggttggaggaattctccatggagcgaagcagtgaaaatacctacaagtcccgtcgccggagttaccactcctccttgcggctgtcagcccaccgcctgaactctgattcaggccacaagtctgacactcacccctcagggggcagggagcggcgacgatcaaaagagcgaaagcatcttctctctcctgatgtctcccgctgcaattcagaagagcgagggacccaggctgactgggagtccccagagcgccgtcaatccaggtcacccagtgagggcaggtcacagacgcccaacagacagggcacaggttccctaagtgagagctccatcccctctgtctctgacaccagcaccccaagaagaagtcgtcggcagctcccacccgtcccgccaaagccccggcccctcctttcctacagctccctgattcgacacgcgggcagcatctctccacctgctgatggaagcgaggagggctccccgctgacctcccaagctctggagagcaacaatgcttggctgaccgagtcttccaactctccgcacccccagcagaggcaacatgcctccccacagcgctacatctccgagccctacttggccctgcacgaagactcccacgcctcagactgtgttgaggaggagacgctcactttcgaagcagccgtggctactagcctgggccgttccaacaccatcggctcagccccacccctgcggcatagctggcagatgcccaacgggcactatcggcggcggaggcgcggggggcctgggccaggcatgatgtgtggggctgtcaacaacctgctaagtgacacggaagaagatgacaaatgctagaggctgctcccccctccgatgcatgctcttctctcacatggagaaaaccaagacagaattgggaagccagtgcggccccgcggggaggaagagggaaaaggaagatggaaggacaccatgcaatagactcactggctcagaatggtcgtcctgttgtaggcctccccctag

SEQ ID NO: 64478 - DNA, 4020 bp, Homo sapiens
ccttcttgaggaatggagcttcgcagaggttgcatttagattcaacagttcacagcggcgggctgctgctgctgcctctccgaagagctcgcggagctccccagaggcggtggtccccgtgcttgtctggatgcggctctgagtctccgtgtgtctttctgcttgttgctgtgtgcgggtgttcggccgcgatcacctttgtgtgtcttctgtctgtttaaacctcaggatggctcgcttcggggaggcggtggtcgccaggccagggtccggcgatggagactcggaccagagcaggaaccggcaaggaacccccgtgccggcctcggggcaggcggccgcctacaagcagacgaaagcacagagggcgcggactatggctttgtacaaccccattcccgtccggcagaactgtttcaccgtcaacagatccctgttcatcttcggagaagataacattgtcaggaaatatgccaagaagctcatcgattggccgccatttgagtacatgatcctggccaccatcattgccaactgcatcgtcctggccctggagcagcatcttcctgaggatgacaagacccccatgtcccgaagactggagaagacagaaccttatttcattgggatcttttgctttgaagctgggatcaaaattgtggccctggggttcatcttccataagggctcttacctccgcaatggctggaatgtcatggacttcatcgtggtcctcagtggcatcctggccactgcaggaacccacttcaatactcacgtggacctgaggaccctccgggctgtgcgtgtcctgcggcctttgaagctcgtgtcagggatacctagcctgcagattgtgttgaagtccatcatgaaggccatggtacctcttctgcagattggccttctgctcttctttgccatcctgatgtttgctatcattggtttggagttctacagtggcaagttacatcgagcgtgcttcatgaacaattcaggtattctagaaggatttgacccccctcacccatgtggtgtgcagggctgcccagctggttatgaatgcaaggactggatcggccccaatgatgggatcacccagtttgataacatcctttttgctgtgctgactgtcttccagtgcatcaccatggaagggtggaccactgtgctgtacaataccaatgatgccttaggagccacctggaattggctgtacttcatccccctcatcatcattggatccttctttgttctcaacctagtcctgggagtgctttccggggaatttgccaaagagagagagagagtggagaaccgaagggctttcatgaagctgcggcgccagcagcagattgagcgtgagctgaatggctaccgtgcctggatagacaaagcagaggaagtcatgctcgctgaagaaaataaaaatgctggaacatccgccttagaagtgcttcgaagggcaaccatcaagaggagccggacagaggccatgactcgagactccagtgatgagcactgtgttgatatctcctctgtgggcacacctctggcccgagccagtatcaaaagtgcaaaggtagacggggtctcttatttccggcacaaggaaaggcttctgcgcatctccattcgccacatggttaaatcccaggtgttttactggattgtgctgagccttgtggcactcaacactgcctgtgtggccattgtccatcacaaccagccccagtggctcacccacctcctctactatgcagaatttctgtttctgggactcttcctcttggagatgtccctgaagatgtatggcatggggcctcgcctttattttcactcttcattcaactgctttgattttggggtcacagtgggcagtatctttgaagtggtctgggcaatcttcagacctggtacgtcttttggaatcagtgtcttgcgagccctccggcttctaagaatatttaaaataaccaagtattgggcttccctacggaatttggtggtctccttgatgagctcaatgaagtctatcatcagtttgcttttcctcctcttcctcttcatcgttgtctttgctctcctaggaatgcagttatttggaggcaggtttaactttaatgatgggactccttcggcaaattttgataccttccctgcagccatcatgactgtgttccagatcctgacgggtgaggactggaatgaggtgatgtacaatgggatccgctcccagggtggggtcagctcaggcatgtggtctgccatctacttcattgtgctcaccttgtttggcaactacacgctactgaatgtgttcttggctatcgctgtggataatctcgccaacgcccaggaactgaccaaggatgaacaggaggaagaagaggccttcaaccagaaacatgcactgcagaaggccaaggaggtcagcccgatgtctgcacccaacatgccttcgatcgagagggagcggaggcgccggcaccacatgtccgtgtgggagcagcgtaccagccagctgaggaagcacatgcagatgtccagccaggaggccctcaacagagaggaggcgccgaccatgaacccgctcaaccccctcaacccgctcagctccctcaacccgctcaatgcccaccccagcctttatcggcgacccagggccattgagggcctggccctgggcctggccctggagaagttcgaggaggagcgcatcagccgtggggggtccctcaagggggatggaggggaccgatccagtgccctggacaaccagaggacccctttgtccctgggccagcgggagccaccatggctggccaggccctgtcatggaaactgtgacccgactcagcaggaggcagggggaggagaggctgtggtgacctttgaggaccgggccaggcacaggcagagccaacggcgcagccggcatcgccgcgtcaggacagaaggcaaggagtcctcttcagcctcccggagcaggtctgccagccaggaacgcagtctggatgaagccatgcccactgaaggggagaaggaccatgagctcaggggcaaccatggtgccaaggagccaacgatccaagaagagagagcccaggatttaaggaggaccaacagtctgatggtgtccagaggctccgggctggcaggaggccttgatgaggctgacacccccctagtcctgccccatcctgagctggaagtggggaagcacgtggtgctgacggagcaggagccagaaggcagcagtgagcaggccctgctggggaatgtgcagctagacatgggccgggtcatcagccagagcgagcctgacctctcctgcatcacggccaacacggacaaggccaccaccgagagcaccagcgtcaccgtcgccatccccgacgtggaccccttggtggactcaaccgtggtgcacattagcaacaagacggatggggaagccagtcccttgaaggaggcagagatcagagaggatgaggaggaggtggagaagaagaagcagaagaaggagaagcgtgagacaggcaaagccatggtgccccacagctcaatgttcatcttcagcaccaccaacccgatccggagggcctgccactacatcgtgaacctgcgctactttgagatgtgcatcctcctggtgattgcagccagcagcatcgccctggcggcagaggaccccgtcctgaccaactcggagcgcaacaaagtcctgaggtattttgactatgtgttcacgggcgtgttcacctttgagatggttataaagatgatagaccaaggcttgatcctgcaggatgggtcctacttccgagacttgtggaacatcctggactttgtggtggtcgttggcgcattggtggcctttgctctggcgaacgctttgggaaccaacaaaggacgggacatcaagaccatcaagtctctgcgggtgctccgagttctaaggccactgagcccaagccaaaccatgcatccctgtacctgcacgtagggttaagggct

SEQ ID NO: 64479 - DNA, 1104 bp, Homo sapiens
catttgtttttttttaatcaacttttattttagattcaggaggtacatgtacaggtcatttgtttttatttataaagaaaaatatatttagctctagattctatttaaagaaaaaataggattagcctttttataggaaagtgaacaaaataacaagctggtaggttaaattgttccaataataaacattccctgagcgtatgaccttattccatttgagaaataaggcagcaataagaaattgatgataaaaatgaggttcacactgaggcctgtgtgttgtcttccaggaccaggtctgcgaggtgtacccccaggagccgtagaaataatgtacccaatgatcgaagaagaacctcagatattgcaagtgaaagagatagtccggaagtacttccctgagacctggatctgggatttggtggtagttgagtaagttgtgtgttgcctggaatttagtttaggagagggtttgaatcctgctgtatgactgatgttatcctggattcctgatccttttagttctgctctgctcttttctggtaaatatttaggtttatagttcatttatctcataattaaacaatgctaattttttttctaatttagtctattgataactaagataatagaaagtaggatgctaccagccctcttaaataaaggaaagggaaggggaggggagggagattgaaagaaagaacaaaaggaaggaaagaatgaaagaaaagaggaagaaataaagggagggagggaaggagggagtaagggaggtagggagaaaaaaaactttaaacctcaccaggagcaccaacccttagatcaagtttagcatttaccacactaggttactgagttatcatgttctaggatcagccatgctttgtgttaaaaaaaaaaaaaaaagatttgcttatactcctcttctctgctccttcactagctcattaggtataagtgagctggtgaccaggtccctgaaaccatcacagagtggaaggccagcgcattctgcttgtctggaaccacagggtttggcctctctcctatcgtgtctcttcaagccttccagcctttcttcctagaactcacccttccttattc

SEQ ID NO: 64480 - DNA, 1736 bp, Homo sapiens
atgcggtgactgccgctgtcaacccgagcctgagcgatcatggcaacgggctcgggcggggaacgcgtggcagcggctgcagcggcggcagtttggtggcggactggggcggcggagcggcggcggcggcggcggtggcactggcactggccccggccctgagcaccatgcggcggggcagctccgagagcgagctggcggcccggtgggaggcggaggcggtggctgcggccaaagcggcggccaaagctgaggccgaggccacagcggagacggtggcggaacaggtccgcgtggacgcgggcgcggccggggaaccggagtgcaaggcaggggaggagcagcccaaggtcctggccccggccccggcgcagcccagtgcggctgaggaggggaacacccaggtccttcagcggccgccgcccacgctgcccccgtccaagccgaagccggtgcagggcctctgcccgcacgggaagccccgggacaagggccgaagctgcaagcggagctcgggccacggttccggcgagaacggctcccagcggccggtcaccgtggacagctccaaggccaggacctccctggatgccctgaagatcagcatccgccagctcaagtggaaggagttcccatttggccggcgcttgccttgtgacatctactggcatggagtttcatttcacgacaatgacatattctccggtcaagtgaacaagtttccaggcatgacggagatggtgcgtaaaattactctgagcagagcagtgagaaccatgcagaatctctttcctgaggagtacaacttctaccctcgctcatggattctgcctgacgagttccagctctttgttgctcaggttcaaatggtgaaagacgatgacccctcctggaagcccacttttatcgtgaaacctgatggtggttgtcagggtgatggaatctacctcattaaagaccccagtgacatccgcctggcagggaccctccagagcaggccagcggtggtccaggagtacatctgcaaacctctccttatcgacaagctcaagtttgatattcgtctgtatgtcttactcaagtccttagaccccttagagatttatatagccaaagacggactctctaggttttgtaccgagccatatcaggagcccacccccaaaaacctgcaccgcatctttatgcacttaaccaactattcactgaacatccacagcggcaacttcatccactcggacagtgctagcactggcagcaaaaggactttttccagcatcctttgtagactgtcttccaaaggcgttgacatcaagaaggtctggtctgacatcatctccgtggtgattaagacggtcatcgcgctgactccagagctcaaagtcttctaccagtcagacatccccacggggaggccgggccccacgtgcttccaggtaaccattgccagttcccagcctgcgtttccagccttgaccggcctcaagagggctctctggcttcgtgtaggatgagtgatcggggtgggatggccagaggaggggacagtgttggtggtgctgtgggcttgggtgttaaacctgggcccaacttccaagctttctgtttgctccctgtgtgatttggggcaagctacttcccctctgttacctgtaaaatgaaatgaagaatacctatcttaaaaggttcttgtaagaattaaatgagataacacatgtaaagcagagttttacatt

SEQ ID NO: 64481 - DNA, 1615 bp, Homo sapiens
atgcggtgactgccgctgtcaacccgagcctgagcgatcatggcaacgggctcgggcggggaacgcgtggcagcggctgcagcggcggcagtttggtggcggactggggcggcggagcggcggcggcggcggcggtggcactggcactggccccggccctgagcaccatgcggcggggcagctccgagagcgagctggcggcccggtgggaggcggaggcggtggctgcggccaaagcggcggccaaagctgaggccgaggccacagcggagacggtggcggaacaggtccgcgtggacgcgggcgcggccggggaaccggagtgcaaggcaggggaggagcagcccaaggtcctggccccggccccggcgcagcccagtgcggctgaggaggggaacacccaggtccttcagcggccgccgcccacgctgcccccgtccaagccgaagccggtgcagggcctctgcccgcacgggaagccccgggacaagggccgaagctgcaagcggagctcgggccacggttccggcgagaacggctcccagcggccggtcaccgtggacagctccaaggccaggacctccctggatgccctgaagatcagcatccgccagctcaagtggaaggagttcccatttggccggcgcttgccttgtgacatctactggcatggagtttcatttcacgacaatgacatattctccggtcaagtgaacaagtttccaggcatgacggagatggtgcgtaaaattactctgagcagagcagtgagaaccatgcagaatctctttcctgaggagtacaacttctaccctcgctcatggattctgcctgacgagttccagctctttgttgctcaggttcaaatggtgaaagacgatgacccctcctggaagcccacttttatcgtgaaacctgatggtggttgtcagggtgatggaatctacctcattaaagaccccagtgacatccgcctggcagggaccctccagagcaggccagcggtggtccaggagtacatctgcaaacctctccttatcgacaagctcaagtttgatattcgtctgtatgtcttactcaagtccttagaccccttagagatttatatagccaaagacggactctctaggttttgtaccgagccatatcaggagcccacccccaaaaacctgcaccgcatctttatgcacttaaccaactattcactgaacatccacagcggcaacttcatccactcggacagtgctagcactggcagcaaaaggactttttccagcatcctttgtagactgtcttccaaaggcgttgacatcaagaaggtctggtctgacatcatctccgtggtgattaagacggtcatcgcgctgactccagagctcaaagtcttctaccagtcagacatccccacggggaggccgggccccacgtgcttccagattttaggctttgacattcttctaatgaaaaatctgaagcctatactacttgaagtaaatgcaaatcccagtatgagaatcgaacatgagcacgaactttctccaggggtgtttgaaaatgtccccagcctcgttgatgaagaagtgaaagtggctgtgatcagagacactctgcgcct

SEQ ID NO: 64482 - DNA, 1602 bp, Homo sapiens
atgcggtgactgccgctgtcaacccgagcctgagcgatcatggcaacgggctcgggcggggaacgcgtggcagcggctgcagcggcggcagtttggtggcggactggggcggcggagcggcggcggcggcggcggtggcactggcactggccccggccctgagcaccatgcggcggggcagctccgagagcgagctggcggcccggtgggaggcggaggcggtggctgcggccaaagcggcggccaaagctgaggccgaggccacagcggagacggtggcggaacaggtccgcgtggacgcgggcgcggccggggaaccggagtgcaaggcaggggaggagcagcccaaggtcctggccccggccccggcgcagcccagtgcggctgaggaggggaacacccaggtccttcagcggccgccgcccacgctgcccccgtccaagccgaagccggtgcagggcctctgcccgcacgggaagccccgggacaagggccgaagctgcaagcggagctcgggccacggttccggcgagaacggctcccagcggccggtcaccgtggacagctccaaggccaggacctccctggatgccctgaagatcagcatccgccagctcaagtggaaggagttcccatttggccggcgcttgccttgtgacatctactggcatggagtttcatttcacgacaatgacatattctccggtcaagtgaacaagtttccaggttcaaatggtgaaagacgatgacccctcctggaagcccacttttatcgtgaaacctgatggtggttgtcagggtgatggaatctacctcattaaagaccccagtgacatccgcctggcagggaccctccagagcaggccagcggtggtccaggagtacatctgcaaacctctccttatcgacaagctcaagtttgatattcgtctgtatgtcttactcaagtccttagaccccttagagatttatatagccaaagacggactctctaggttttgtaccgagccatatcaggagcccacccccaaaaacctgcaccgcatctttatgcacttaaccaactattcactgaacatccacagcggcaacttcatccactcggacagtgctagcactggcagcaaaaggactttttccagcatcctttgtagactgtcttccaaaggcgttgacatcaagaaggtctggtctgacatcatctccgtggtgattaagacggtcatcgcgctgactccagagctcaaagtcttctaccagtcagacatccccacggggaggccgggccccacgtgcttccaggtaaccattgccagttcccagcctgcgtttccagccttgaccggcctcaagagggctctctggcttcgtgtaggatgagtgatcggggtgggatggccagaggaggggacagtgttggtggtgctgtgggcttgggtgttaaacctgggcccaacttccaagctttctgtttgctccctgtgtgatttggggcaagctacttcccctctgttacctgtaaaatgaaatgaagaatacctatcttaaaaggttcttgtaagaattaaatgagataacacatgtaaagcagagttttacatt

SEQ ID NO: 64483 - DNA, 381 bp, Homo sapiens
cggccgccgcccacgctgcccccgtccaagccgaagccggtgcagggcctctgcccgcacgggaagccccgggacaagggccgaagctgcaagcggagctcgggccacggttccggcgagaacggctcccagcggccggtcaccgtggacagctccaaggccaggacctccctggatgccctgaagatcagcatccgccagctcaagtggaaggaggtgaggcccggcccgacccggccgcgtgggcacagtggggtggacaggacgacctcagaggtctcggcacggcccaggtcaggtcggcgggcgagggctgagctcctgcggtgcaccacgctcgggcctgcttgtcagccgcaaagtgctcatccttcaaggcct

SEQ ID NO: 64484 - DNA, 1352 bp, Homo sapiens
  misc_feature (33)..(33): n is a, c, g, or t
  misc_feature (69)..(69): n is a, c, g, or t
  misc_feature (326)..(326): n is a, c, g, or t
  misc_feature (343)..(343): n is a, c, g, or t
gtccctcatctgcgtccggaaggaagtcatccncccgtccctcatctgcgtccggaaggaagtcatccncccgtccctcatctgcgtccggaaggaagtcatccgcccgtccctcatctgcgtccggaaggaatcatccacccgtccctcatctgcgtcctgaaggaatcatccacccgtttctcatcaggctgtgctggacggggcatgactagcgcttcctctgcaggctcatggagtatgttccgggctgtgagctcttcagctacctgcgcaaccgggggctcttctactctgcagagatcatctgtgccatcctgcactcnaaggagatcatctacanggacttgaagccggagaacatcctgctggatagggacggacacatcaagctcacggactttgggttcgccaagaagctggtagacaggacttggaccctctgcggaatacccgagtacctggcccccgaagtcattcagagcgagggtcacggaagggctgtggactggtgggccctcagcatcctgatattcgagatgctctcgggatttcctccatttgtgtgtgtgtgtgtgtgtgtgtgtgtgtgtgtgtgtgtgtgtgacaacatgtttggcatttatcagaaaattcttgcagacaagatagatttccccagacatttggatttccatgtgaaagatctcattaagaaactgctcgtggttgacagaacaaggtggttaggaaatatgaagaacggggcgaatgatgtgaaacgccatcggtggttccgctctgtggactgggaagctgttcctcagagaaaactgaagcctcccatcgtgcccaagatagcccgcgaaggcgacacctccaacttcggaacttaccccgagaatgactgggacacagccgcgaccgtgccacagaagggtttagaaatcttcaagaatttctgaggacaggagctcacatctggaagaagcaggaaggctggaatctgcctgcaacaaagagctgctcctgagcagaccagtagcaatgtcttcttcacgtgataaggacatttccacttttctgtctttgtgcctgtatgtatagaaacagatcagagcacagttgaaattaatgtaactggcattatttaagcaactggaattccacactgtaggaaggttttgaaaattgtttgcttgtagattttatcttatcctttagtgttgtgttcctactgtgatgtcttggtttttctcatagacttaagtttataagtttgaactggacttgttcaattataaccacaaattgtgtgtgtgtgtgtgtgtgtgtgcatgcgcgcgcctgtgtgtatatatagaagtcattat

SEQ ID NO: 64485 - DNA, 1497 bp, Homo sapiens
agtctgggcgtagagggtgcagggagcagacgggaggatctcaggccagggacgatggcggctctgcaggagaagaagacgtgtggccagcgcatggaggagttccagcgttactgctggaacccggacacggggcagatgctgggccgcaccctgtcccggtgggtgtggatcagcctgtactacgtggccttctacgtggtgatgactgggctcttcgccctgtgcctctatgtgctgatgcagacagtggacccgtacacaccggactaccaagaccagctacggtcaccaggggtaaccttaaggccggatgtttacggggagaaaggcctggaaattgtctacaacgtctctgataacagaacctgggcagacctcacacagactctccacgccttcctagcaggctactctccagcagcccaggaggacagcatcaactgcacctccgagcagtacttcttccaggagagtttccgcgctcccaaccacaccaagttctcctgcaagttcacggcagatatgctgcagaactgctcaggcctggcggatcccaacttcggctttgaagaaggaaagccatgttttattattaaaatgaacaggatcgtcaagttcctccccagcaacggctcggcccccagagtggactgcgccttcctggaccagccccgcgagctcggccagccgctgcaggtcaagtactaccctcccaacggcaccttcagtctgcactacttcccttattacgggaagaaagcccagccccactacagcaaccccctggtggcagcgaagctcctcaacatccccaggaacgctgaggtcgccatcgtgtgcaaggtcatggcagagcacgtgaccttcaacaatccccacgacccgtatgaagggaaagtggagttcaaactcaagattgagaagtgaaacggtttgcgcaggggtcctgggcacgcctgcggggtcgctcaaggacaccctcctggttgggcttaccttgcccgtcagttccctgccaaatcatccccaaagtggtttggagcaacggtgttgtcagtgtgcgaactccagagaagcgcccacatctgaaggacctgctcgcgagtatcagttcttccttgttgaattcttacagtttttagatggaatttgctgctataagaatgtccagctaccatgggaacgcaaggcagcaactctctaattaaccaggtcataaaaacgattcgtcttctatgtagacatcactttcttactataatttatttttctacacttcaatatgaactgccccccccacattaatataaaaactactaatgcactgatatgaaacacggcttacactaatgacattctgaattcttgcttttaaaattgcaattcctaagttgtaaacataaaatatattaaagttactcttattgtatgtaaaaaaagaaatcgtgtttcctgatatgggagaaattaaataaaaaccaaacgcttccttaa

SEQ ID NO: 64486 - DNA, 117 bp, Homo sapiens
tttgaactgtctggatttcatggaagttggtaagatgcacttacatggaacattgttcatgccaaacaaactcatctttattgtatctatttgtcacataaatccttacatggaatg

SEQ ID NO: 64487 - DNA, 491 bp, Homo sapiens
aaaaaatagctgggcgtggtggtgcatgcctgtaatctcagctactcgggaggctgaggcaggagaatcacttgaactggggaggcagagggcagaggttgcagtgagttgagatcatgtcactgaactccagcctgggcgagaaaaaaaaaaagcctttagaaccaggaaagatctggatttgaattctagttctgccacagtatatctgtgcaaccctggacaagtcaattgacctcactgagcctcagttgtactcatgtggaaagtggggataaccctcagggactggcagggctttctgtgattatttgagaaaatgtatgcaaggcacatggcatagaatgaaggctcattaaaatatatagccaggtgcagtggttcatgcctgcaatcccccagcactttgggaagctgaggtgaaaggatcggttgagcccaggagttcaagaccagcctcagaaacatagtgaactccatctctacaaaaa

SEQ ID NO: 64488 - DNA, 137 bp, Homo sapiens
gaacattgagaagagatttcttggacatcgtggtttgcaagcttaatctttctttacatgtgagcaatttatatacataaatggcatgtgatattatatctgtaatttttgtttggatatttaaaggacaaaattat

SEQ ID NO: 64489 - DNA, 306 bp, Homo sapiens
actccagcctgggtgacagagtgacactccgtctcaaaaaaaaaaacttacaataatatgaggtctttgtaaaatgtgagaataaaacttttggagataagcgaacatctgagtaaattgaaatagcatgtctctgtacagaatattgtaaagatgttaggtaaatttattttttaaaatgttctatcagtaattccaatgtaatttttgtttaaaatttgatgaaattactgtgaagttatctgtatgaataaactaagcaatattataagttctgggaggtcagtaaattggcactttatgaaa

SEQ ID NO: 64490 - DNA, 275 bp, Homo sapiens
tttaagtggctttgaaaatggtaagacgtttatccttcaataatcactacttatgaaaaatataaaattttgacaacttgcacctgaaaaatttcaacatttagctgaagtctagttggaaagaagtcagtactgtaaggataccatactacttccagcaaaaaattgtggataacatttgagcagtttctagtgccagggactttatttgatcttcgcactcactctatgaagtagggaatttattttaacaataagaacactgaggctttgaa

SEQ ID NO: 64491 - DNA, 937 bp, Homo sapiens
ctcttctcagagggcatcttatcctacctgtgaactttcattatggggaagcaagacaggctcctccaacttgcaacccacatatgcaataatgtgatggacatctctctatgatgacacagcagacaccttcaggtcccaacatccactgccccgttgtcatccctcacacaagagatagcctgaccagacagggcttccatccagcagtgcccatgcctagatatacctggcgcaccgcacaacatcccagcccacacaaggccctgctacctccatccaacatactgctagactgaccctactgaatccacattcccacatattaccctgactcatatcacctagatcatgacagacaccagatgtggccttgaaccacacctctgaacctccaatctaccattctctcttgcctcctgactccaggcagggggctcacaagttagcagagcagggcctaacccaattacatagccatagactgctatgggttgtgtttctacagaagtcaaatgttgaagtcctaacttccactatttcagaatatgactgtttttgagatagggcctttaaagaggtgattaatgctaaatgggatcacaagggtggtatctaatccaatataaatgctgtccttataagaaaaggagattaggacacaaacagagaaggaccagtgaagacacagagaaaatggctgtctacaagcaaaggagagaggcctcagaaggagccaaccgtactgacacctggatctcaaccatctagcctccagaatggaacgtctatcctatgcctgcaccaccactgcattttggaagcacaaaacttgtctggttccatgcttcacaactgaagaagaattttgccttggaatgactcatacttcacctccctcatgcttgacttagatgcattcagatgagattttgat

SEQ ID NO: 64492 - DNA, 465 bp, Homo sapiens
atcagaaatgagaataatcagcgtaggagtctggatttaagcaaacgctggtgtgttttttatcctccaatgcagccaagcaagatcgccaacacaattaagcagctgtttaagagaaagcaacaaaaaagaagtccacttgcacccagaaaataaaatgggccgtttttcacactttattcctgttataattgttcattttcagtaggcccttagaagactattttaagaagagatttcatccagtatggtcagagagcagtgcttctccaccgccttccaggctaaaagttggcttttgttttaaacaacactcagggaaactgctacgtgactaggacgatggtggccaatgcaagtggcggcacccacctccccttgtgtgcagtgggaagagctgctctccttgctctgaggccacgcaaggacacaagggcaagggctcaatttcataggaggagggtc

SEQ ID NO: 64493 - DNA, 3655 bp, Homo sapiens
cagaaccaagtgataagagagagagagagagagagagtgccatacagaagctgtccattctgtgacctagccttggaagccagaccccatctcttccataatatcttggtggtcacacaccagcccaactcagcatggggagagacatcacaagggcatgagaaacgggagctggggctcatgagggctattgtggagtctggcagtcacaccagccttctctccattttcatctctttatcagccactcaaaatttctgccctgggctggtctggcttcctcatcctgtcctttccaaccttcctgtccatcctcttttttgagggctgccagagtctcaccccatcaattttattgctttgttctccttccagtccttttgttcgtcagactgctgactccctactcattctttttccttctcttcaaatcctagaatcccacccctgtggacctcgtttgcttcttttaatgctcgtcttcctgattctccatttttctgcttgaccccaacctatgatcttctgttccctctgtgcaagttcctcagagtctcttcaatctagctgataacttttcccataggaatatttgctatgcttaaatcacagcattttctttgggacagataggcaataaagagtagtaaatgtgtcatcagctaccagatggatgaagaaagcatttccctgaactttaattcatcattcatgttccagtttaagacttttaaggcaatagtaacttcaggcttcagagtcacagcacatctgtggacactgagggataaaatgtttcgtgttttgatgctgaagtgtatgcctggaggctctctgctgtgagcattcttgccggttgaaagaaggaagaaaaaagtacatttggaacattatccaacatcttgagattatgaactgtctgatgtgctgatattttatctgatgatgtctcctgggtctgctggtggtgaaagattttccagatttgtgaagtgtgatgaaagggctggtagtatctcatcctgactggcagagctaaaatgtaactcttcgaccttctgaacttgaacacttcttttcgaagctgtgaaatgtaaatccacagtagctgctgaccttagacatttttgcttttccctggagctttggcttttcttttgtaattaagactagttgataaccttcaatactaagaaactgaccacttctcattactccagagatggatggtgacttcatctttccatataattgattttgtagaacaaaaaccaaaagaggggctaagcagttttgaagtgccctaacaaaataagtcataatgcatctcacactttgaggacagtgatttgcacattgtagttgctcagtcaaatctggtgcacttgggaagtaaatgactcacctgggctgaagcctatctttctgaggatgcagggagggtttaccaagtaaatcagtgtataaataggatcaattgtaagaatttcatttgaatacaactggcatatgtgttaaacttaaatgccccattattcatgaaagtgggcccagaaattcttcttggtagtgcattataggtaactggatggagttaaagacttagagattgtcattgtggctgcttgtagtagcctccatagttataacagaagaggcagacacctctctcatcaccctggcatcctagaaatcagtgaaacctcacagtgaaagcatgcaggtatttttagcaagtaggcatggtcacaccacctgtctgttggtcacaatccagtaagccaacaccttactcgaaaggcttactcagaggggtgcgatgagattctctgctggttttggcaagccatgtagtcacctgtggtggtttctgtatttggaagaacaggaaagcagaagttgggctccacactgcccctttgatagactgtagagatggctgttgttttaagccatattcatgttcaggcagtggattctatttaacactgttaaccaaccacaagtcttaagtgccactgtttttgccaaacgaaaccaaatctaagcatgcagcctgtgttaccaccctctgggtgctgattccgattgttttcatatctcatactgaagtatttcaaattatcagaaatccaatatgaaaataataaaggtttctgttcttggatacattcctaattcagcatttataatactttacactggattttattctagttagtggaaacaatgttcctaatgttgaaaaaacccacaaaaatgccaatgatgcaaatctatttacaagtactatctagtgtatttttttttaaaaaaaaattcagtaaacttcagaagttacctttttaaagaaaaaatttatcttaaattctatttgaggaaaggctgtgaatttatcaatttgtgtatcatatgactgaattacaggaatgttactctagttatataatcataaaacatgttctagatataccatagtgtatattttgatcagcaagtctagaattaggtgacttcctttagttggttcaatagccttgcaggacttttctcataaacttagaggataggacagtgtgagaatcgccaagaagctcttgggctctggagtcagccctgggtttggattctgattccacatttgctgtggtgatgggcaagttatataacctctctaagctctgatttcttcacaggtcaatggagatgatgaccatacctaactcattcaatgcaaaatactcacttcatgacttggtacaaagtaggattcagtaaaccatgtgggtgtcctccttccttttcttacaaagacaagattgtttggctatagatgacttgcagtggttagagtgacagagtgaacttacacagattatggtagctgaacagttaattaaaattgctgccagaaacttcatccacagatgttctcaaccttggctgcatgttggatcatctgcagaccttttaaaaaatcctgatacctgagattctttaatcaacttgggattcagattgacaatagaatttttgaaatcttcctatgtgattctaagatgtgaggaaagaatggctgctttatagcaacaaccatatcctaaaggttgttctgttttagagtttaaaagtgcaagaattatcttggaggaaaagctttcctaagaaagttcttgctcaccaggagtttgcctgctggccaaattcagccaatcacctgtttttctgaataaatgttattggaacatatccatgctcatctgttcatatatggccgttttcatactccagcagcagagccaaagagttgccacagagaacctgtgacccatgaagcctaaaatattactttctggtctttcatagaaaatgtttctgacctgccgggcacgatggctcacacctgtaaactcagcactttgggaggccaaggtgggtggatcacttggggtcaagagttcaagaccagcctggccaacatgatgaaaccccatctctactaaaaatacaaaaattagccaggcgtggtggcacacgcctgtaatcccagctactcgggaggccaaggcaggagaatcacttgcacctgggaggcagaggttgcagtgagcagagatcgtgccactgcactccaccctgggtgacagagtgtctc

SEQ ID NO: 64494 - DNA, 135 bp, Homo sapiens
tttaactctgcttaaaatgaaaggctcaccctagttcaatcagaccttttcttgcacgcaaacaaagatgacttttgcccgctagaacaagcaagagaggagttctttgcacaggttgttaacacacaaagatca

SEQ ID NO: 64495 - DNA, 490 bp, Homo sapiens
acctctccatgatcccagtctggggctgccagctcacattcctggcagatggaccatctaggattttctgtagccagagctgaaatggggagggaggcaggctcactggccctcagaatagaaatcctggctgccaatgatcaaacacctactgtgtatggagtgtaacaacgcagctctgttattatcccacctttcgcaaacagtgaggctgaaagaggttaagtaacttgcctaaggtcacaccacaggcagtcaggagtagccagaaatccaaaccgagtgttctttctataatgatcaagtgccgcagcctcctccccagtctcccggcttccacttttgcccctgcaatccattccccacatagcagccaaagtgagcttttcaaaatgtaaattggatcacattattcatctgcttaaaatcctccagaagtttcccatcacactcaaaataaaattcagacttttcatcctggcatacaagg

SEQ ID NO: 64496 - DNA, 3970 bp, Homo sapiens
  misc_feature (1022)..(1022): n is a, c, g, or t
  misc_feature (1067)..(1067): n is a, c, g, or t
  misc_feature (1214)..(1214): n is a, c, g, or t
agtaggtataaactaaacctgggccatcaagagtctccaaggaaaacttgcaatgatggagtccctgttaaaggtcaaaaatctccccgaccctcaagatccagtgcaagtgaagcagccagttgtctggggtaaatacccggggtttgccatcccatgccaggaaaatgtaggacacggacacacgcgaggagtcgcgaggagtttaagagggaaggtttaataggcaaaagaaagagaaaggaaaacagctctctctctagtgagagaggggacttccgagagaaaaggggcagctggaggcagatgagccgaatttatagtccagcttgaggaggcggcgtctgatttacttaggactcacagattggtttgatcaggtgtttgtttacatagctgggaaggctggccgccccaccctaagcttattatgcaaatgaactctctcggagggtgccattttgtcggctccttactgcacctgtggctgacagagaagggatgatggggccgccattttgaacacgattggcacaactgccgtcatctatgtctgcagcccgattttacaggctgctctttgttagaaggaaaaatgatttgggcctgctttccattaaaagagaaaccttaccaagaacttcggtaacctcactgtctacctaagtaatttcttcttaactcctgtgtcacaaggaagttagaacctggggtttctgggctactaagagaggaagatgtgaaggactgattcacaaagtgaagaagtcagagggcagtcacctggggaaaactccaaggacagtttacaggatagaatcaagaattggccaggtgaggccaggcgccctggctcacacctgtaatcccagcactctgggagggcgaggtgggcggatcacggggtcaggagatcgagaccatcctggctaacacggtgaaacctcgtctctactaaaaatacaaaaaaacgagccgggcgtggtggcgggcccctgtagtcccagctactcaggaggctnaagcggcaggatggcgtgaaccggggaggcggagcttgcagtganccaagaccgcaccactgcactccagcctgggcgacagagcaagactccatctcaaaaaaaaaaaaaaaggccagtgtcggctggtctgagaaataaagagaaacagtacaaagagagaaattttacaactgggcctccagcggtganatcacatactggtaggaccgtgatgacaaccccgagctgcaaaaccagcaggtttttattagggattttaaaaggggaggggtgtacgaacagggagtaagccacaaggatcacatgcttcgaagggcaataaagatcacaaagcgaaggcaaaattagaattactgatgagggtctatgtcccgctgtgcacgtattgttttgataaacatcttaacaggaaacagggttcgagaccaaagaaccggtctgactagaatttaccaggctggaatttcccaatcctagtaagcctgagggtactgcaggagaccagggcatatttcagtccttatctcaaccacataagacagacactcccagagcagccatctatagacctcccccgaggaatgcattccttccccagggttattccttcctgggaaaagaattcagcgatatttctcctcgcacatctgtttataggctttctgcaagaagaaaaatatggctctattctgcccaaccctgcaagcagtcagactttatggttatcttttcttgttacctcaaaattgctgttactttgttctttttcagagtgcactgatttcatattgttcaaacccacatgttttacaatcagatttcatattgttcaaacacacatgttctacaaccaatttgtacaatagtggtcctgaggtgacgtacattctcagtttatgaagataataggattaagagattaaagacaggcataagaaattataagagtattagggaagtgataaatatccatgaaatcttcacaatttatgttcagagattgcagtaaagacaggtgtaagaaattataaaagtattaatttggggaactgctaaatgtccatgaaatcttcacaatttatgttcttctgccttggctccagctggtccctccattcagggtccctgacttcccacaacaaattaatgatatttttgtgtcaaagactagctgaaccctatgttgttcccggttaccaactgacataaataagtatgtttgtaatgagccttaaaatggttctatggagttgcccatgtaagaagcagccggatggcaaattagttattgtaatttgaagtgctcacagttataacttcctatataaggttcctacttgcaatttctgtttgttttctatattcacaatatcttaaaaggcatagactatctttccaagcctcacattatacatcactttaatttgctctggtgtaaaactgctaatttctttgaggtgataccacagaaccactaaattagatacgctgtatgccacatagcatatattttaagtcattttttaattaaaaaaaacaaaccttaaaatttggtgaaaatccattgtgtttgttatctattgctgcataataaattgccccaaaagtaagtggcttcaaacaataagaaacatttattttctatctctcttaaacacatacacacacacatacatacacacacaaacacagtattaatttgttattgttgaagttttaaaaagtgatttgtatgtcaaaaacaaaccccaaccttctctccttgccacccaaaccaaagaaggccagctccataacataaaagtgcgaggtgaagcagcaagtgatgatgaagaagctgcatcaagttatccagaagatctagccaagataattggtgaaggtgactacactaaacaacagattttccatgtagataaaatagctttatattggaagaagaggccatctaggacattcatagctacagaggaaaagtcaatgcctgcctggcttcaaagcttcaaaggacagtctgactctcttgttagaggctaatatagctgatggctttaagttgaagctaatcctcatttaccactctgaaaaccctctggctcttaagaattatgctaaatctactctgcctgtgttttataaatggaacaacaaagcttggatgacagcatatctgtttacagcatggtttgttgaatattttaagcccactgttgagagacctactgctcaggaaaaaaaagatttctttcaaaatattactgctcattgacaatgtagttggccacccaagagctctgatgcagagatacaaggagataaatgttgttttcatgcttggtaacacagtgtccattctgcagcctatggatcaaggagtgatttcaactttcaagtcttattatttaagaataaattttgtaaggttatagctgcaatggatagtgatttttctgacatatctgggcaaaatacattgaaaatcttttggaaagcattcatcattctagatgccattaagaacacttgtgagctgagcacggtagctcacacctgtaatcccagcactttgggaggccgatgtgggtggatcacctgaggttaggagttccagaccagcctggccaacatggtgaaaccccatctctactaaaaatataaaattagccaggcatggtgacacactcctataatcctagcactttgggaggccgaggcaggtggatcacctgaggtcaggagtttgaaaccagcctggccaacatggtgaaaccccatttctactaaaaatacaaaaattagctaggcctggtggcagaggcctgtaatcccagctacttgggaggctgaggcaggagaattgcttgaatctgggaggcagaggttgcagtgagctgagatcgcaccactgcactccagcctgggcaacaagagtaagactctgtctc

SEQ ID NO: 64497 - DNA, 678 bp, Homo sapiens
gatgggggtcttgctctcttacccaactggactcaaactcctgggcgcaagtgatcttcctgcctcacacaccctggtagctaggactacagggtgcacaaccacacccagaaaatcacacatttatccatgtgattatctgaataacgtccttctcaccccttttctccatgttattcctacaacccagcgcagtgcctgacataaataaaatgctccttagatatttgcttaattaatgaccataaatgaactatttattggatggatattccaaaaagtgtatcaacaatccattcccaacagttagacattgacactgactattgaacacgaaatctgagtggtttgagcctattttcctcatcactgttcatcgcaggtgggaaacaggcaagggccctcctcactccatcggtgagcaggaggcccccccagaaggctaggcataggcagcctgaccacgcgaccaagctcctcagctgtgcttccagcgcattacctccttctctacccaactaagtcttgtcactttctccgcacgctgcctgtgaatttgctgtgattttgagtcatcgaggtgccctgggtatcagccctaccttctgctccttattggaactgctagaaaatgccagcctgcttaaacatgttcatgaagcaccaaggtagggtcat

SEQ ID NO: 64498 - DNA, 399 bp, Homo sapiens
tcatcatccagtgctcccttgtactcaaacctgtcctatttagtagaacatttttgcctaggggtcgtcctctgcagaattgtgaggtgacactgtcttttacaccctgagttcccagggcatggttctaatagtctcttttcttaataaaagtaaacgaaatcactaatatccatatgttacttttctcctactgtgaacagatttaattattcctttgagaaatctctgatttccaaatcaattctgaaaccttcttgcctaggaagaaaatattttgctatcacatttattttaaggggagtggtccaccctgcctagggaggttcatattttcaaagaggcccttaggcatggacaatatttaagccgatgaaataaattattggcaaaattaaa

SEQ ID NO: 64499 - DNA, 369 bp, Homo sapiens
taataacgtatttcctcttcattttagattacatgttataataccatcaatctgaacaggagaaaatctgatataaatagtattttgctgaaataattgcagtgttcatggtgctcatatatattaaaagttttaagtgaaaaaatgaattataattgctatattatgttgataaaagaaatccaatggaatagtaataacagtatgacaaatttgaatattgttgtgcaagaaaagaaaaaaattcaacttcagttgtttcctccttctccattattgatatcatcttccactgctgtgatgcttccactaggagccacatatcttacccaattttaccttaaggataaattgtatggggttaataat

SEQ ID NO: 64500 - DNA, 259 bp, Homo sapiens
gaaggcctcagcacttactactaaatgattctttgcccttccataatatagttatcctgtggctgatgtgctttcaatgttgacactgagaaatttgtcattgtggacatctgactgccccatagccattccctcctccagaggacagcaaatgggccctgttttgcccagtttatttattattggttaggtttttgttcctcactactgtcagaatagtcattatttcccatgctgcctgagactcattactgccacc

SEQ ID NO: 64501 - DNA, 780 bp, Homo sapiens
ggcccagccacccaagccaacatttgaatcccctttacaacatccccatctggcaggtgtccagcatcagcatctctagggattagcagagttcttgacaatagaaaccagcttctcattgacaccaggatattgcagattgctatctctataccagtagttctcaaacttttgttcccaggagccctttattctcttaaaaattgttgaggaccccaaagagcttttgtttatgcaggatatgtcaatatttatttgttgtcttaaaaatacaacagtaaacccattacatgtcaatatagatatcatttttgatgaaaaataactatttaaaaattaatttaatggagagagtagccttgcaaatctccttaatgtctggcataataaagagaagactgctggattctccatttctcattcaatctgttgtgacagaacaggtgatggagcctgtggaaagctcaagtgcacagacatgggaggtaaataacttctctgaattcagaagttttgatctcacagacctcccagaagggtctcagggactcccaggagtccccagactacattttgagaactgttgctctcttatacaccaagggatgggattggtgatgtaaattggcagggactgcagtgaaagaaaaactagatgcaaaaaggggccaagaaaaatgtactcacatctatgatcaacaagtattgagtgtttactatgtgcccaagtggaaagcactgaagatacaggttgagtgtcccttatctgaaatgcttggg

SEQ ID NO: 64502 - DNA, 387 bp, Homo sapiens
agcccagtgactagcctcctaaaaaggtttcctcctttcttctcttttagccctaaagtttctcttccattttctttaaagggcttattttaattttattatttatttatttgagacggggtctcgctctgtcacccaggatagagtgcagtgctgcaatcagaactcactgcagccttgacctcccaagctcaagcaatcttcccacttctgcttcctgaatagctgggactacagtcacacaccaccacacccagctagttttaagattttttgtagagacaaagtatctctaagtcacccacgctggtctccaactcctaggctcaagtgatcctccagcctcagcctcccaaagtgttgggattacaggcatgagccaccaca

SEQ ID NO: 64503 - DNA, 5335 bp, Homo sapiens
taatactctgtcttaaaataatacagcatggtacaataaatagtgcttttatgtatatatacacacacacacttttctgaagaatgatggtttgagttatgcgttgggcagttttgatttttggaagttatattagttattgactctttgttacaactttttcatttttacattttaaattttctgccatcgttgtcacaatgcacatcctgatatagcaccagtgaaaatctaaaattaatacccttggaaaatgaaaatattcttaatttccattttgactcttatactggccctatagctctgcagtctttgtttcaatatagaatatgttatccatttaaattattttttcttttatttaatgttatcccaagactgttctcataaagaaagggaagaaataactatccacccttaacatccttcatttattttgaatatattggtgtttttatgataaggaatataaattatatttaatgtggtttcctgtatactttggttattaagttttgcttgaaatagtagttttcccgtttgacagctttctttgctgccaaagttttcaagaatttaagacttctttgaagtaaatatttaagttctgccattattgactcttaagattgtgtgtgttgtgttgtgcattacataattacaaaaaggcttcattcaggtgatacgttaaaaatggaactgtgctcaccctaaataggcattggtatttttctcttttggtgagagtaggcatttatttcttgagttgttttggagcctgatcaaaaattttgttcatggagaacttgatgcaattttgatacagtggagaggtttttttcggttgttttaacatcaccagcatagtttttagaatgtgactcttgctgagcatttagggtgagcttgggaaggaaggcctttgaaaatggtagttatgcaagcagactttcaggtgttgcattcctgttttcaacacatttctttaaatctacataatggcagacttttctaccaggttataagcagtttttagataagtgatactcagccagcataacttattgacttaccatttacgtatagtcatcactctcttactgtgaaattccaaatgcctaccagagttaccttgttctatcataatatgacaaacatctcaacagttttggatttccccactttggttcagaaggttatttaatttctatctgggcattaatggagaaaataagtagccttgtgtgctgcttcagattgaaacatggaggatatgagatattcttttgcaattcatgtttctcatttctcaaagtgagcacattgttctataaaaacatgctggtacacccttaaacttttgatcaatctgagtgaggtgtgcttttcctcttgggacctactcacgtttgaagattggaaacatcacgttaggcgaggcaatatctcttgaacatcttctaaagggttttttaaaaccttattctcacatatttcatttgtcttgaatatttaagtggctcttaaacgttttgggtctacatgcaaatgtggtacttaacaaggtaggaatccatcttcttagctctggctgagggtgccagccatcggtcaggtcatttttatctcaagaggcagaaggcagttatgtcaagaattgtgctcagggcaggatttcgtttccacagaggagagacacttgcagagtgccagctaggttagatcttttgccgcttctttcatttgattaatttgggtttttaaagggctgtttaaaaaaaaaaaaaaaggccgggaaactttaaaagtaggcattactgtagtactgcatttcttagaacattttaaactagaactcatttttttttcacagtatatttacttgaagaagcactataataatcattgagaagtattttgagtctgaaatttaatttaattttccgtttcaaattgctttatttcagggaaataattttccagttgttttgctatattctgcaaataaaaaccgtgtttccttttttcacttaaactttggtaggaaacaaactaaagcagacaaacatttcttgttatgtttgttgctttctttaatccaatggataaaaaagtaaaaccctgtaaacattattttatttttttatgcaataccatgctgtaaatatggttcatcaaataaggatgtacctatgattgaatctttaattctgcacagttagagtttatatataaacgtgtcttgacaatcaaggacttttatgtgagtcttcctttatgatgtttattaatgttatgcattccatttgttttgaagtgagtaccaatgtgctaatttgtattgtctgaaagtatgtaatgtttttacagcttgtttttaagaatctgtaaatatgtacaaacaaatcacagtactgctttatgttagaaggcatatgatgttgtactgtatgtaagcaataatacatagcagtgctaactttacaagtagcatcaggaaagttctaaaaacatttcagagttattaattatccttatttcatttaataatgattatctttaatcagtttttataagcaaattccattgttcctcctattggaacgtaacactgtttacacagcataattgaagttgcaggggagacaggctaaatctgacttcatctgtactcactttcactaagcattgaatggccttaccactcttctgcaagatggaggaagaccgcaaaacttagtgcccatcacactgaaggaagggatgtggttttttttcctgcttctgtactgctacctaactttgtgatttgctttggattttaatatttgtttctgttttagattcaagcccgtaagttttgaggtgacttcagctccattgtgaaatagatagttctcttcatatttcataactacatttcaataattctaaactttctacattgatttttagatacttatttttcaagcttggtttctcagctgatcagatgaatttattcaacttcaatacaaagaaagacaaacctattatagtttcaagtgagtagatattatactgtacaggacagctatttgaacacacacatcactgctttagaaataaaaccgccaatttataaatgtatatgacctacattttataggaaaaaaatgtttttaaatgctagtcatttatataatgtgctttgaaggatttgctagtccacttctgtcactttttagtacactggtatcttttatatgtaatgtatgctttttattattgtagcaaagcatttcagtagaaagaattttgcaacaatatgggggaaatttttcattgttggatttgaattatactggattttatctgtgtagtcttacttgtctttattttaatgctgtctgaagggaacttggtatccaaataaagcaggtaacctcattttacttcaagggcatactgtgtagtgctgaatttaatctgaaaatctgatgattttgaaaagaaaaacaagtttataaacattgtacagaagaaattaaatgtgtgtgatggaaatcctgatggtggagcacgttgaattttctgatatatagtgttattttcctgggatcccctatgccttctttgtatttcaactaataaaggaaaaaccctgtcattaaaactggtaagataataggatattctgattatacagtattactattcctatcccattttctgaccttttctcaatcactgtaaatttttattttctatttcctattgataattaaatatgtacataatatagacactgttgtatagaactaaatgaattgggttgctatgcttgagtgggtagtgaaatggaaatatttgatgaatactgagagttcctaaaatgctagagcaaatttccgagggaaaggggggcatcgtgtgtcttgggaaggttgcagcaggttgtttcttcaactccctaagaaatcattgggaaggactcaactgcaaactcgggatcagatacaaaatgggtctttccttcccctctcccccaaaaaataggagcactaaattttaaaatctactcaggtgacagttgctttgcaatgaaacttatcccattgaaattttcagtgttaaataaaaagagatttgtgatatttttaaatataaacttttacatcagtagtcagcagcctgacaattgaaatttggtaagtcgatatattttaaaatattttgctctccaaatagaattgtttttaaacaattgggaggttttttgttctttaaatatgttttaattgtcattgtaaaaacaaaatcttgcttgaccctatattatgccatgaatgaattgctgagcctttataatacagtgacagcttgtttcatgcatagtcatggaacatagagatgttctttaaactgacctattgataagaggtttaatgagtttcacggctttcaacactattgtcatatagttatctttgccatttggagtttataaaaccattttatgtattgtgatactaaaggaagttgttttgctttactttaaattgaattattagactaatatttgcaaattctgcattttaaatgtggacactggctgtttgaaaaataaaatatagaatacagttttatggataattttcgagctgaatttttcacaatattctgaaccaaataacgaatggtaaatatgcaaaaatcatggtgcatagatataaccgtaaagagaaaagaatttctgtgtggaattaacagttacacaaattgggtaacaattatcagggcctttattatagctttatgtggaatgttattctaaaatgcaagagtcaaatgttactgtcattgaatattttagacttgaaacgtgtttatcatagagcgaagaaaatatgtgttcttttctttacagataagactctgttaacccactgtcagcatacgtgggatttcttttcttttttctttcattagtggagatttgttttcatccatctaccaccttgccagtaccctagcttgtgaccagcgggatgcattgtaagaaagttgtctgtggttaggagtgcagtctgggtccatggaacaaatttaaactaattggccctcgcaatgatcagtcctaggaccctggccttattattagcatggtgctttaaccaattgtacataataataccactgatagtctactaatgcatttcctagatcccagtttttcttgaatgattaggaatggtggggagaggggaggggagatattctacatgatacttctccaatcttctaaagattataagaaaaaataaaaaattgaagtcacttgaattaatgtgtt

SEQ ID NO: 64504 - DNA, 5282 bp, Homo sapiens
taatactctgtcttaaaataatacagcatggtacaataaatagtgcttttatgtatatatacacacacacacttttctgaagaatgatggtttgagttatgcgttgggcagttttgatttttggaagttatattagttattgactctttgttacaactttttcatttttacattttaaattttctgccatcgttgtcacaatgcacatcctgatatagcaccagtgaaaatctaaaattaatacccttggaaaatgtctttgtttcaatatagaatatgttatccatttaaattattttttcttttatttaatgttatcccaagactgttctcataaagaaagggaagaaataactatccacccttaacatccttcatttattttgaatatattggtgtttttatgataaggaatataaattatatttaatgtggtttcctgtatactttggttattaagttttgcttgaaatagtagttttcccgtttgacagctttctttgctgccaaagttttcaagaatttaagacttctttgaagtaaatatttaagttctgccattattgactcttaagattgtgtgtgttgtgttgtgcattacataattacaaaaaggcttcattcaggtgatacgttaaaaatggaactgtgctcaccctaaataggcattggtatttttctcttttggtgagagtaggcatttatttcttgagttgttttggagcctgatcaaaaattttgttcatggagaacttgatgcaattttgatacagtggagaggtttttttcggttgttttaacatcaccagcatagtttttagaatgtgactcttgctgagcatttagggtgagcttgggaaggaaggcctttgaaaatggtagttatgcaagcagactttcaggtgttgcattcctgttttcaacacatttctttaaatctacataatggcagacttttctaccaggttataagcagtttttagataagtgatactcagccagcataacttattgacttaccatttacgtatagtcatcactctcttactgtgaaattccaaatgcctaccagagttaccttgttctatcataatatgacaaacatctcaacagttttggatttccccactttggttcagaaggttatttaatttctatctgggcattaatggagaaaataagtagccttgtgtgctgcttcagattgaaacatggaggatatgagatattcttttgcaattcatgtttctcatttctcaaagtgagcacattgttctataaaaacatgctggtacacccttaaacttttgatcaatctgagtgaggtgtgcttttcctcttgggacctactcacgtttgaagattggaaacatcacgttaggcgaggcaatatctcttgaacatcttctaaagggttttttaaaaccttattctcacatatttcatttgtcttgaatatttaagtggctcttaaacgttttgggtctacatgcaaatgtggtacttaacaaggtaggaatccatcttcttagctctggctgagggtgccagccatcggtcaggtcatttttatctcaagaggcagaaggcagttatgtcaagaattgtgctcagggcaggatttcgtttccacagaggagagacacttgcagagtgccagctaggttagatcttttgccgcttctttcatttgattaatttgggtttttaaagggctgtttaaaaaaaaaaaaaaaggccgggaaactttaaaagtaggcattactgtagtactgcatttcttagaacattttaaactagaactcatttttttttcacagtatatttacttgaagaagcactataataatcattgagaagtattttgagtctgaaatttaatttaattttccgtttcaaattgctttatttcagggaaataattttccagttgttttgctatattctgcaaataaaaaccgtgtttccttttttcacttaaactttggtaggaaacaaactaaagcagacaaacatttcttgttatgtttgttgctttctttaatccaatggataaaaaagtaaaaccctgtaaacattattttatttttttatgcaataccatgctgtaaatatggttcatcaaataaggatgtacctatgattgaatctttaattctgcacagttagagtttatatataaacgtgtcttgacaatcaaggacttttatgtgagtcttcctttatgatgtttattaatgttatgcattccatttgttttgaagtgagtaccaatgtgctaatttgtattgtctgaaagtatgtaatgtttttacagcttgtttttaagaatctgtaaatatgtacaaacaaatcacagtactgctttatgttagaaggcatatgatgttgtactgtatgtaagcaataatacatagcagtgctaactttacaagtagcatcaggaaagttctaaaaacatttcagagttattaattatccttatttcatttaataatgattatctttaatcagtttttataagcaaattccattgttcctcctattggaacgtaacactgtttacacagcataattgaagttgcaggggagacaggctaaatctgacttcatctgtactcactttcactaagcattgaatggccttaccactcttctgcaagatggaggaagaccgcaaaacttagtgcccatcacactgaaggaagggatgtggttttttttcctgcttctgtactgctacctaactttgtgatttgctttggattttaatatttgtttctgttttagattcaagcccgtaagttttgaggtgacttcagctccattgtgaaatagatagttctcttcatatttcataactacatttcaataattctaaactttctacattgatttttagatacttatttttcaagcttggtttctcagctgatcagatgaatttattcaacttcaatacaaagaaagacaaacctattatagtttcaagtgagtagatattatactgtacaggacagctatttgaacacacacatcactgctttagaaataaaaccgccaatttataaatgtatatgacctacattttataggaaaaaaatgtttttaaatgctagtcatttatataatgtgctttgaaggatttgctagtccacttctgtcactttttagtacactggtatcttttatatgtaatgtatgctttttattattgtagcaaagcatttcagtagaaagaattttgcaacaatatgggggaaatttttcattgttggatttgaattatactggattttatctgtgtagtcttacttgtctttattttaatgctgtctgaagggaacttggtatccaaataaagcaggtaacctcattttacttcaagggcatactgtgtagtgctgaatttaatctgaaaatctgatgattttgaaaagaaaaacaagtttataaacattgtacagaagaaattaaatgtgtgtgatggaaatcctgatggtggagcacgttgaattttctgatatatagtgttattttcctgggatcccctatgccttctttgtatttcaactaataaaggaaaaaccctgtcattaaaactggtaagataataggatattctgattatacagtattactattcctatcccattttctgaccttttctcaatcactgtaaatttttattttctatttcctattgataattaaatatgtacataatatagacactgttgtatagaactaaatgaattgggttgctatgcttgagtgggtagtgaaatggaaatatttgatgaatactgagagttcctaaaatgctagagcaaatttccgagggaaaggggggcatcgtgtgtcttgggaaggttgcagcaggttgtttcttcaactccctaagaaatcattgggaaggactcaactgcaaactcgggatcagatacaaaatgggtctttccttcccctctcccccaaaaaataggagcactaaattttaaaatctactcaggtgacagttgctttgcaatgaaacttatcccattgaaattttcagtgttaaataaaaagagatttgtgatatttttaaatataaacttttacatcagtagtcagcagcctgacaattgaaatttggtaagtcgatatattttaaaatattttgctctccaaatagaattgtttttaaacaattgggaggttttttgttctttaaatatgttttaattgtcattgtaaaaacaaaatcttgcttgaccctatattatgccatgaatgaattgctgagcctttataatacagtgacagcttgtttcatgcatagtcatggaacatagagatgttctttaaactgacctattgataagaggtttaatgagtttcacggctttcaacactattgtcatatagttatctttgccatttggagtttataaaaccattttatgtattgtgatactaaaggaagttgttttgctttactttaaattgaattattagactaatatttgcaaattctgcattttaaatgtggacactggctgtttgaaaaataaaatatagaatacagttttatggataattttcgagctgaatttttcacaatattctgaaccaaataacgaatggtaaatatgcaaaaatcatggtgcatagatataaccgtaaagagaaaagaatttctgtgtggaattaacagttacacaaattgggtaacaattatcagggcctttattatagctttatgtggaatgttattctaaaatgcaagagtcaaatgttactgtcattgaatattttagacttgaaacgtgtttatcatagagcgaagaaaatatgtgttcttttctttacagataagactctgttaacccactgtcagcatacgtgggatttcttttcttttttctttcattagtggagatttgttttcatccatctaccaccttgccagtaccctagcttgtgaccagcgggatgcattgtaagaaagttgtctgtggttaggagtgcagtctgggtccatggaacaaatttaaactaattggccctcgcaatgatcagtcctaggaccctggccttattattagcatggtgctttaaccaattgtacataataataccactgatagtctactaatgcatttcctagatcccagtttttcttgaatgattaggaatggtggggagaggggaggggagatattctacatgatacttctccaatcttctaaagattataagaaaaaataaaaaattgaagtcacttgaattaatgtgtt

SEQ ID NO: 64505 - DNA, 3428 bp, Homo sapiens
taatactctgtcttaaaataatacagcatggtacaataaatagtgcttttatgtatatatacacacacacacttttctgaagaatgatggtttgagttatgcgttgggcagttttgatttttggaagttatattagttattgactctttgttacaactttttcatttttacattttaaattttctgccatcgttgtcacaatgcacatcctgatatagcaccagtgaaaatctaaaattaatacccttggaaaatgaaaatattcttaatttccattttgactcttatactggccctatagctctgcagtctttgtttcaatatagaatatgttatccatttaaattattttttcttttatttaatgttatcccaagactgttctcataaagaaagggaagaaataactatccacccttaacatccttcatttattttgaatatattggtgtttttatgataaggaatataaattatatttaatgtggtttcctgtatactttggttattaagttttgcttgaaatagtagttttcccgtttgacagctttctttgctgccaaagttttcaagaatttaagacttctttgaagtaaatatttaagttctgccattattgactcttaagattgtgtgtgttgtgttgtgcattacataattacaaaaaggcttcattcaggtgatacgttaaaaatggaactgtgctcaccctaaataggcattggtatttttctcttttggtgagagtaggcatttatttcttgagttgttttggagcctgatcaaaaattttgttcatggagaacttgatgcaattttgatacagtggagaggtttttttcggttgttttaacatcaccagcatagtttttagaatgtgactcttgctgagcatttagggtgagcttgggaaggaaggcctttgaaaatggtagttatgcaagcagactttcaggtgttgcattcctgttttcaacacatttctttaaatctacataatggcagacttttctaccaggttataagcagtttttagataagtgatactcagccagcataacttattgacttaccatttacgtatagtcatcactctcttactgtgaaattccaaatgcctaccagagttaccttgttctatcataatatgacaaacatctcaacagttttggatttccccactttggttcagaaggttatttaatttctatctgggcattaatggagaaaataagtagccttgtgtgctgcttcagattgaaacatggaggatatgagatattcttttgcaattcatgtttctcatttctcaaagtgagcacattgttctataaaaacatgctggtacacccttaaacttttgatcaatctgagtgaggtgtgcttttcctcttgggacctactcacgtttgaagattggaaacatcacgttaggcgaggcaatatctcttgaacatcttctaaagggttttttaaaaccttattctcacatatttcatttgtcttgaatatttaagtggctcttaaacgttttgggtctacatgcaaatgtggtacttaacaaggtaggaatccatcttcttagctctggctgagggtgccagccatcggtcaggtcatttttatctcaagaggcagaaggcagttatgtcaagaattgtgctcagggcaggatttcgtttccacagaggagagacacttgcagagtgccagctaggttagatcttttgccgcttctttcatttgattaatttgggtttttaaagggctgtttaaaaaaaaaaaaaaaggccgggaaactttaaaagtaggcattactgtagtactgcatttcttagaacattttaaactagaactcatttttttttcacagtatatttacttgaagaagcactataataatcattgagaagtattttgagtctgaaatttaatttaattttccgtttcaaattgctttatttcagggaaataattttccagttgttttgctatattctgcaaataaaaaccgtgtttccttttttcacttaaactttggtaggaaacaaactaaagcagacaaacatttcttgttatgtttgttgctttctttaatccaatggataaaaaagtaaaaccctgtaaacattattttatttttttatgcaataccatgctgtaaatatggttcatcaaataaggatgtacctatgattgaatctttaattctgcacagttagagtttatatataaacgtgtcttgacaatcaaggacttttatgtgagtcttcctttatgatgtttattaatgttatgcattccatttgttttgaagtgagtaccaatgtgctaatttgtattgtctgaaagtatgtaatgtttttacagcttgtttttaagaatctgtaaatatgtacaaacaaatcacagtactgctttatgttagaaggcatatgatgttgtactgtatgtaagcaataatacatagcagtgctaactttacaagtagcatcaggaaagttctaaaaacatttcagagttattaattatccttatttcatttaataatgattatctttaatcagtttttataagcaaattccattgttcctcctattggaacgtaacactgtttacacagcataattgaagttgcaggggagacaggctaaatctgacttcatctgtactcactttcactaagcattgaatggccttaccactcttctgcaagatggaggaagaccgcaaaacttagtgcccatcacactgaaggaagggatgtggttttttttcctgcttctgtactgctacctaactttgtgatttgctttggattttaatatttgtttctgttttagattcaagcccgtaagttttgaggtgacttcagctccattgtgaaatagatagttctcttcatatttcataactacatttcaataattctaaactttctacattgatttttagatacttatttttcaagcttggtttctcagctgatcagatgaatttattcaacttcaatacaaagaaagacaaacctattatagtttcaagtgagtagatattatactgtacaggacagctatttgaacacacacatcactgctttagaaataaaaccgccaatttataaatgtatatgacctacattttataggaaaaaaatgtttttaaatgctagtcatttatataatgtgctttgaaggatttgctagtccacttctgtcactttttagtacactggtatcttttatatgtaatgtatgctttttattattgtagcaaagcatttcagtagaaagaattttgcaacaatatgggggaaatttttcattgttggatttgaattatactggattttatctgtgtagtcttacttgtctttattttaatgctgtctgaagggaacttggtatccaaataaagcaggtaacctc

SEQ ID NO: 64506 - DNA, 1685 bp, Homo sapiens
agagggccggccaggtgccgcagacgcggggacgctggctcgctccctccctccctccctccgacgctgtgagtagagaagctaggccccgagccgggcgggactagggtggtggttgtgttctgccctcgcccgtcgccaacgctgggctgactgaaaacctggccctttgggtcgcgcgtcttcgactttcaccgccatgcggacatggggccgtgggagaaactctgggcgggattacggtgaaaattcttgtttgggcgggccctgcggcttctttcttccggctcgccctcggccccgccctcgccccgcccccgcccccgctccagctccagccgggtcctcgctcggccccgcacgcggcccgcggtagacggagggcctgggcacccaccgtctccatcccggccccagcccagtcgagcgtccactagaagggcgctccctgtccggccctaatcctcgctcctcacggaggctctttgtcacagcgaagactgacagcccgcagtcttctggacttcttttatggggctcctggcggtgctattcattcagtcattgattcgtcttgtaaatatggagcgcctgctctgtactcgacccggcactgggtaccggaagaaccagacagctcggtttttgccaccatttataagtctgtgtccttttcttgagtactgaaccgagatacagttttaaatgtgctgtgcggtctctgagcagcgactcacctgtgcagatcaaatgatgctgtttggaaaaatttcccagcagttgtgtggcgtaaagaaactcccatggtcatgtgactccagatacttctggggctggttgaatgcagtgtttaataaggtggattatgatcgcatcagggatgttggccctgacagggcggcatccgagtggttgctgcgctgtggggccatggtgcgctaccatggccaggagaggtggcagaaggactacaaccaccttccaacaggccctctggacaaatacaagattcaggcgatcgacgccaccgactcttgtatcatgagcattggatttgatcacatggaaacctcaaatatttgttgttaagtgatcttcctggagtaagagaaaaagaaaatcttgtccaagcctttaagacagcactgccttctctggaactaaaattacaattgaagtaaaataatgtgtcttatttcagtataaaggatcatttgaaactgttgattccaaacatcaactaatattatatagtcatcagtagaattataaggatgccatatcatgacattttagaagtggagagtgcatcatatgtagaaaataaatattcagacgtggctcattaatgttactaagttggaagtgagaatttatgaacattaattcattttaagaaaagtgcagccaggcgcagtggctcatgcctgtaatcctagcactttgggaggccaaagcgggcagatcacctgaggtcaggagttcaagaccaaccatggccaacatggtgaaaccccatctctactaaaaaaacaaaattagctgaatgtggtggtgcacgcctttaatcccagctactctggaggctgaggcaggagaatcacttgacttgggaggtggaggttgcagggacccgagattgtgccactgcactccagcctgggtgacagagcgagactgtctca

SEQ ID NO: 64507 - DNA, 963 bp, Homo sapiens
aatttgaccacagattcagaattattttctctttaatcttttgttattaatacaaattctaaccaagtatagtcattcgtagaatagttactaagtatctctggtgtcaagcactgtactatatgtgaatcaatgaaacgttgtgtctgataaattcatataaaaataatacgccttgacagcgttcacgtggaaacaaaaacaaaactaaaaaagttagcagatagactgcaggtttttttgtttttgtttttgtttttttgcatggatctcactaatacatttatcttcctcgtcagtcacttgaaatgaaaatttgttgcgttctgtattatttatgtcagttaatatagttaacaagctagtgattattgtaaaagcaaactgctttttttctcttgccaacagggtggattatgatcgcatcagggatgttggccctgacagggcggcatccgagtggttgctgcgctgtggggccatggtgcgctaccatggccaggagaggtggcagaaggactacaaccaccttccaacaggccctctggacaaatacaagattcaggcgatcgacgccaccgactcttgtatcatgagcattggatttgatcacatgggtaactaccctatcgttttgctaatagaaaatgcagatgatttgcagtgaccattttgttgcagttgactcacgattatagtcataggtatgtcctttttgcccatttcattatagtcaagtttgtttcttcctgtgtttcatatttattttcaaattaaattgaggttacagacaccttcctctccttcctcctctcactaagcttgtttctgtatgtctctagtctttggtttattgacttaaaatccagggccttgtttgtcaaactatctttgtcaaacttctgtcattgagaagccctcaataatgcaggaataattatatccacacagcttctgcttacg

SEQ ID NO: 64508 - DNA, 723 bp, Homo sapiens
agagggccggccaggtgccgcagacgcggggacgctggctcgctccctccctccctccctccgacgctatcaaatgatgctgtttggaaaaatttcccagcagttgtgtggcgtaaagaaactcccatggtcatgtgactccagatacttctggggctggttgaatgcagtgtttaataaggtggattatgatcgcatcagggatgttggccctgacagggcggcatccgagtggttgctgcgctgtggggccatggtgcgctaccatggccaggagaggtggcagaaggactacaaccaccttccaacaggccctctggacaaatacaagattcaggcgatcgacgccaccgactcttgtatcatgagcattggatttgatcacatggagggcctagagcatgttgaaaaaataaggctgtgcaagtgtcattatatcgaggatgactgtttgctgagacttagtcaacttgaaaatttacaaaaaaccatattggaaatggaaataatatcctgtgggaatatcacagacaaaggcatcattgctttgcgtcatttaagagcctagaacactgcctgacactgtaataatcatcaaaagcatgcatccactggttaggaaagctgttctacatcctcttgtgccaccaaccagacccacgccatggcctggagcaagtcacctaatcccaaatgcaaaaacagataatactagcaaggaat

SEQ ID NO: 64509 - DNA, 1857 bp, Homo sapiens
agagggccggccaggtgccgcagacgcggggacgctggctcgctccctccctccctccctccgacgctgtgagtagagaagctaggccccgagccgggcgggactagggtggtggttgtgttctgccctcgcccgtcgccaacgctgggctgactgaaaacctggccctttgggtcgcgcgtcttcgactttcaccgccatgcggacatggggccgtgggagaaactctgggcgggattacggtgaaaattcttgtttgggcgggccctgcggcttctttcttccggctcgccctcggccccgccctcgccccgcccccgcccccgctccagctccagccgggtcctcgctcggccccgcacgcggcccgcggtagacggagggcctgggcacccaccgtctccatcccggccccagcccagtcgagcgtccactagaagggcgctccctgtccggccctaatcctcgctcctcacggaggctctttgtcacagcgaagactgacagcccgcagtcttctggacttcttttatggggctcctggcggtgctattcattcagtcattgattcgtcttgtaaatatggagcgcctgctctgtactcgacccggcactgggtaccggaagaaccagacagctcggtttttgccaccatttataagtctgtgtccttttcttgagtactgaaccgagatacagttttaaatgtgctgtgcggtctctgagcagcgactcacctgtgcagatcaaatgatgctgtttggaaaaatttcccagcagttgtgtggcgtaaagaaactcccatggtcatgtgactccagatacttctggggctggttgaatgcagtgtttaataaggtggattatgatcgcatcagggatgttggccctgacagggcggcatccgagtggttgctgcgctgtggggccatggtgcgctaccatggccaggagaggtggcagaaggactacaaccaccttccaacaggccctctggacaaatacaagattcaggcgatcgacgccaccgactcttgtatcatgagcattggatttgatcacatggagggcctagagcatgttgaaaaaataaggctgtgcaagtgtcattatatcgaggatgactgtttgctgagacttagtcaacttgaaaatttacaaaaaaccatattggaaatggaaataatatcctgtgggaatatcacagacaaaggcatcattgctttgcgtcatttaagaaacctcaaatatttgttgttaagtgatcttcctggagtaagagaaaaagaaaatcttgtccaagcctttaagacagcactgccttctctggaactaaaattacaattgaagtaaaataatgtgtcttatttcagtataaaggatcatttgaaactgttgattccaaacatcaactaatattatatagtcatcagtagaattataaggatgccatatcatgacattttagaagtggagagtgcatcatatgtagaaaataaatattcagacgtggctcattaatgttactaagttggaagtgagaatttatgaacattaattcattttaagaaaagtgcagccaggcgcagtggctcatgcctgtaatcctagcactttgggaggccaaagcgggcagatcacctgaggtcaggagttcaagaccaaccatggccaacatggtgaaaccccatctctactaaaaaaacaaaattagctgaatgtggtggtgcacgcctttaatcccagctactctggaggctgaggcaggagaatcacttgacttgggaggtggaggttgcagggacccgagattgtgccactgcactccagcctgggtgacagagcgagactgtctca

SEQ ID NO: 64510 - DNA, 1180 bp, Homo sapiens
agagggccggccaggtgccgcagacgcggggacgctggctcgctccctccctccctccctccgacgctatcaaatgatgctgtttggaaaaatttcccagcagttgtgtggcgtaaagaaactcccatggtcatgtgactccagatacttctggggctggttgaatgcagtgtttaataaggtggattatgatcgcatcagggatgttggccctgacagggcggcatccgagtggttgctgcgctgtggggccatggtgcgctaccatggccaggagaggtggcagaaggactacaaccaccttccaacaggccctctggacaaatacaagattcaggcgatcgacgccaccgactcttgtatcatgagcattggatttgatcacatggagggcctagagcatgttgaaaaaataaggctgtgcaagtgtcattatatcgaggatgactgtttgctgagacttagtcaacttgaaaatttacaaaaaaccatattggaaatggaaataatatcctgtgggaatatcacagacaaaggcatcattgctttgcgtcatttaagaaacctcaaatatttgttgttaagtgatcttcctggagtaagagaaaaagaaaatcttgtccaagcctttaagacagcactgccttctctggaactaaaattacaattgaagtaaaataatgtgtcttatttcagtataaaggatcatttgaaactgttgattccaaacatcaactaatattatatagtcatcagtagaattataaggatgccatatcatgacattttagaagtggagagtgcatcatatgtagaaaataaatattcagacgtggctcattaatgttactaagttggaagtgagaatttatgaacattaattcattttaagaaaagtgcagccaggcgcagtggctcatgcctgtaatcctagcactttgggaggccaaagcgggcagatcacctgaggtcaggagttcaagaccaaccatggccaacatggtgaaaccccatctctactaaaaaaacaaaattagctgaatgtggtggtgcacgcctttaatcccagctactctggaggctgaggcaggagaatcacttgacttgggaggtggaggttgcagggacccgagattgtgccactgcactccagcctgggtgacagagcgagactgtctca

SEQ ID NO: 64511 - DNA, 1351 bp, Homo sapiens
agagggccggccaggtgccgcagacgcggggacgctggctcgctccctccctccctccctccgacgctgtgagtagagaagctaggccccgagccgggcgggactagggtggtggttgtgttctgccctcgcccgtcgccaacgctgggctgactgaaaacctggccctttgggtcgcgcgtcttcgactttcaccgccatgcggacatggggccgtgggagaaactctgggcgggattacggtgaaaattcttgtttgggcgggccctgcggcttctttcttccggctcgccctcggccccgccctcgccccgcccccgcccccgctccagctccagccgggtcctcgctcggccccgcacgcggcccgcggtagacggagggcctgggcacccaccgtctccatcccggccccagcccagtcgagcgtccactagaagggcgctccctgtccggccctaatcctcgctcctcacggaggctctttgtcacagcgaagactgacagcccgcagtcttctggacttcttttatggggctcctggcggtgctattcattcagtcattgattcgtcttgtaaatatggagcgcctgctctgtactcgacccggcactgggtaccggaagaaccagacagctcggtttttgccaccatttataagtctgtgtccttttcttgagtactgaaccgagatacagttttaaatgtgctgtgcggtctctgagcagcgactcacctgtgcagatcaaatgatgctgtttggaaaaatttcccagcagttgtgtggcgtaaagaaactcccatggtcatgtgactccagatacttctggggctggttgaatgcagtgtttaataaggtggattatgatcgcatcagggatgttggccctgacagggcggcatccgagtggttgctgcgctgtggggccatggtgcgctaccatggccaggagaggtggcagaaggactacaaccaccttccaacaggccctctggacaaatacaagattcaggcgatcgacgccaccgactcttgtatcatgagcattggatttgatcacatggagggcctagagcatgttgaaaaaataaggctgtgcaagtgtcattatatcgaggatgactgtttgctgagacttagtcaacttgaaaatttacaaaaaaccatattggaaatggaaataatatcctgtgggaatatcacagacaaaggcatcattgctttgcgtcatttaagaaacctcaaatatttgttgttaagtgatcttcctggagtaagagaaaaagaaaatcttgtccaagcctttaagacagcactgccttctctggaactaaaattacaattgaagt

SEQ ID NO: 64512 - DNA, 1944 bp, Homo sapiens
agagggccggccaggtgccgcagacgcggggacgctggctcgctccctccctccctccctccgacgctgtgagtagagaagctaggccccgagccgggcgggactagggtggtggttgtgttctgccctcgcccgtcgccaacgctgggctgactgaaaacctggccctttgggtcgcgcgtcttcgactttcaccgccatgcggacatggggccgtgggagaaactctgggcgggattacggtgaaaattcttgtttgggcgggccctgcggcttctttcttccggctcgccctcggccccgccctcgccccgcccccgcccccgctccagctccagccgggtcctcgctcggccccgcacgcggcccgcggtagacggagggcctgggcacccaccgtctccatcccggccccagcccagtcgagcgtccactagaagggcgctccctgtccggccctaatcctcgctcctcacggaggctctttgtcacagcgaagactgacagcccgcagtcttctggacttcttttatggggctcctggcggtgctattcattcagtcattgattcgtcttgtaaatatggagcgcctgctctgtactcgacccggcactgggtaccggaagaaccagacagctcggtttttgccaccatttataagtctgtgtccttttcttgagtactgaaccgagatacagttttaaatgtgctgtgcggtctctgagcagcgactcacctgtgcagatcaaatgatgctgtttggaaaaatttcccagcagttgtgtggcgtaaagaaactcccatggtcatgtgactccagatacttctggggctggttgaatgcagtgtttaataaggtggattatgatcgcatcagggatgttggccctgacagggcggcatccgagtggttgctgcgctgtggggccatggtgcgctaccatggccaggagaggtggcagaaggactacaaccaccttccaacaggccctctggacaaatacaagattcaggcgatcgacgccaccgactcttgtatcatgagcattggatttgatcacatgggtaactaccctatcgttttgctaatagaaaatgcagatgatttgcagtgaccattttgttgcagttgactcacgattatagtcatagagggcctagagcatgttgaaaaaataaggctgtgcaagtgtcattatatcgaggatgactgtttgctgagacttagtcaacttgaaaatttacaaaaaaccatattggaaatggaaataatatcctgtgggaatatcacagacaaaggcatcattgctttgcgtcatttaagaaacctcaaatatttgttgttaagtgatcttcctggagtaagagaaaaagaaaatcttgtccaagcctttaagacagcactgccttctctggaactaaaattacaattgaagtaaaataatgtgtcttatttcagtataaaggatcatttgaaactgttgattccaaacatcaactaatattatatagtcatcagtagaattataaggatgccatatcatgacattttagaagtggagagtgcatcatatgtagaaaataaatattcagacgtggctcattaatgttactaagttggaagtgagaatttatgaacattaattcattttaagaaaagtgcagccaggcgcagtggctcatgcctgtaatcctagcactttgggaggccaaagcgggcagatcacctgaggtcaggagttcaagaccaaccatggccaacatggtgaaaccccatctctactaaaaaaacaaaattagctgaatgtggtggtgcacgcctttaatcccagctactctggaggctgaggcaggagaatcacttgacttgggaggtggaggttgcagggacccgagattgtgccactgcactccagcctgggtgacagagcgagactgtctca

SEQ ID NO: 64513 - DNA, 1772 bp, Homo sapiens
agagggccggccaggtgccgcagacgcggggacgctggctcgctccctccctccctccctccgacgctgtgagtagagaagctaggccccgagccgggcgggactagggtggtggttgtgttctgccctcgcccgtcgccaacgctgggctgactgaaaacctggccctttgggtcgcgcgtcttcgactttcaccgccatgcggacatggggccgtgggagaaactctgggcgggattacggtgaaaattcttgtttgggcgggccctgcggcttctttcttccggctcgccctcggccccgccctcgccccgcccccgcccccgctccagctccagccgggtcctcgctcggccccgcacgcggcccgcggtagacggagggcctgggcacccaccgtctccatcccggccccagcccagtcgagcgtccactagaagggcgctccctgtccggccctaatcctcgctcctcacggaggctctttgtcacagcgaagactgacagcccgcagtcttctggacttcttttatggggctcctggcggtgctattcattcagtcattgattcgtcttgtaaatatggagcgcctgctctgtactcgacccggcactgggtaccggaagaaccagacagctcggtttttgccaccatttataagtctgtgtccttttcttgagtactgaaccgagatacagttttaaatgtgctgtgcggtctctgagcagcgactcacctgtgcagatcaaatgatgctgtttggaaaaatttcccagcagttgtgtggcgtaaagaaactcccatggtcatgtgactccagatacttctggggctggttgaatgcagtgtttaataaggtggattatgatcgcatcagggatgttggccctgacagggcggcatccgagtggttgctgcgctgtggggccatggtgcgctaccatggccaggagaggtggcagaaggactacaaccaccttccaacaggccctctggacaaatacaagattcaggcgatcgacgccaccgactcttgtatcatgagcattggatttgatcacatgggtaactaccctatcgttttgctaatagaaaatgcagatgatttgcagtgaccattttgttgcagttgactcacgattatagtcatagaaacctcaaatatttgttgttaagtgatcttcctggagtaagagaaaaagaaaatcttgtccaagcctttaagacagcactgccttctctggaactaaaattacaattgaagtaaaataatgtgtcttatttcagtataaaggatcatttgaaactgttgattccaaacatcaactaatattatatagtcatcagtagaattataaggatgccatatcatgacattttagaagtggagagtgcatcatatgtagaaaataaatattcagacgtggctcattaatgttactaagttggaagtgagaatttatgaacattaattcattttaagaaaagtgcagccaggcgcagtggctcatgcctgtaatcctagcactttgggaggccaaagcgggcagatcacctgaggtcaggagttcaagaccaaccatggccaacatggtgaaaccccatctctactaaaaaaacaaaattagctgaatgtggtggtgcacgcctttaatcccagctactctggaggctgaggcaggagaatcacttgacttgggaggtggaggttgcagggacccgagattgtgccactgcactccagcctgggtgacagagcgagactgtctca

SEQ ID NO: 64514 - DNA, 1044 bp, Homo sapiens
agagggccggccaggtgccgcagacgcggggacgctggctcgctccctccctccctccctccgacgctgataagtgcccaagagtacaattgctgggtcatatgatcaaatgatgctgtttggaaaaatttcccagcagttgtgtggcgtaaagaaactcccatggtcatgtgactccagatacttctggggctggttgaatgcagtgtttaataaggtggattatgatcgcatcagggatgttggccctgacagggcggcatccgagtggttgctgcgctgtggggccatggtgcgctaccatggccaggagaggtggcagaaggactacaaccaccttccaacaggccctctggacaaatacaagattcaggcgatcgacgccaccgactcttgtatcatgagcattggatttgatcacatggaaacctcaaatatttgttgttaagtgatcttcctggagtaagagaaaaagaaaatcttgtccaagcctttaagacagcactgccttctctggaactaaaattacaattgaagtaaaataatgtgtcttatttcagtataaaggatcatttgaaactgttgattccaaacatcaactaatattatatagtcatcagtagaattataaggatgccatatcatgacattttagaagtggagagtgcatcatatgtagaaaataaatattcagacgtggctcattaatgttactaagttggaagtgagaatttatgaacattaattcattttaagaaaagtgcagccaggcgcagtggctcatgcctgtaatcctagcactttgggaggccaaagcgggcagatcacctgaggtcaggagttcaagaccaaccatggccaacatggtgaaaccccatctctactaaaaaaacaaaattagctgaatgtggtggtgcacgcctttaatcccagctactctggaggctgaggcaggagaatcacttgacttgggaggtggaggttgcagggacccgagattgtgccactgcactccagcctgggtgacagagcgagactgtctca

SEQ ID NO: 64515 - DNA, 1305 bp, Homo sapiens
agagggccggccaggtgccgcagacgcggggacgctggctcgctccctccctccctccctccgacgctgtgagtagagaagctaggccccgagccgggcgggactagggtggtggttgtgttctgccctcgcccgtcgccaacgctgggctgactgaaaacctggccctttgggtcgcgcgtcttcgactttcaccgccatgcggacatggggccgtgggagaaactctgggcgggattacggtgaaaattcttgtttgggcgggccctgcggcttctttcttccggctcgccctcggccccgccctcgccccgcccccgcccccgctccagctccagccgggtcctcgctcggccccgcacgcggcccgcggtagacggagggcctgggcacccaccgtctccatcccggccccagcccagtcgagcgtccactagaagggcgctccctgtccggccctaatcctcgctcctcacggaggctctttgtcacagcgaagactgacagcccgcagtcttctggacttcttttatggggctcctggcggtgctattcattcagtcattgattcgtcttgtaaatatggagcgcctgctctgtactcgacccggcactgggtaccggaagaaccagacagctcggtttttgccaccatttataagtctgtgtccttttcttgagtactgaaccgagatacagttttaaatgtgctgtgcggtctctgagcagcgactcacctgtgcagatcaaatgatgctgtttggaaaaatttcccagcagttgtgtggcgtaaagaaactcccatggtcatgtgactccagatacttctggggctggttgaatgcagtgtttaataagtaagttactctaaataaagtgaagaaatgtggagatggttacagctaaataagttcccaatagcttgtttggctatttctcatatttacagtttgtgcagtgtgatcctaattttgtttacaaacaaacaaaacccacacaaacatggaaaaaacaccagaaaaacagattacaaaatattaattgtggctgtttgggttgcaggatttcgatgatttttcttacttgtccttttgatatatttcaagttttctaaaacattttataatcagaaaaacttattaaatataattttaaagtattttatttttatggctttttaaaggaatgtagttaaccttttgaattctatcaaagtaacttgggttttcaaaaaattagtgggtggcacacttagaaatgtcattttgaaacttgaaactaaccttctaattacttaatacagca

SEQ ID NO: 64516 - DNA, 1216 bp, Homo sapiens
agagggccggccaggtgccgcagacgcggggacgctggctcgctccctccctccctccctccgacgctgataagtgcccaagagtacaattgctgggtcatatgatcaaatgatgctgtttggaaaaatttcccagcagttgtgtggcgtaaagaaactcccatggtcatgtgactccagatacttctggggctggttgaatgcagtgtttaataaggtggattatgatcgcatcagggatgttggccctgacagggcggcatccgagtggttgctgcgctgtggggccatggtgcgctaccatggccaggagaggtggcagaaggactacaaccaccttccaacaggccctctggacaaatacaagattcaggcgatcgacgccaccgactcttgtatcatgagcattggatttgatcacatggagggcctagagcatgttgaaaaaataaggctgtgcaagtgtcattatatcgaggatgactgtttgctgagacttagtcaacttgaaaatttacaaaaaaccatattggaaatggaaataatatcctgtgggaatatcacagacaaaggcatcattgctttgcgtcatttaagaaacctcaaatatttgttgttaagtgatcttcctggagtaagagaaaaagaaaatcttgtccaagcctttaagacagcactgccttctctggaactaaaattacaattgaagtaaaataatgtgtcttatttcagtataaaggatcatttgaaactgttgattccaaacatcaactaatattatatagtcatcagtagaattataaggatgccatatcatgacattttagaagtggagagtgcatcatatgtagaaaataaatattcagacgtggctcattaatgttactaagttggaagtgagaatttatgaacattaattcattttaagaaaagtgcagccaggcgcagtggctcatgcctgtaatcctagcactttgggaggccaaagcgggcagatcacctgaggtcaggagttcaagaccaaccatggccaacatggtgaaaccccatctctactaaaaaaacaaaattagctgaatgtggtggtgcacgcctttaatcccagctactctggaggctgaggcaggagaatcacttgacttgggaggtggaggttgcagggacccgagattgtgccactgcactccagcctgggtgacagagcgagactgtctca

SEQ ID NO: 64517 - DNA, 1242 bp, Homo sapiens
agagggccggccaggtgccgcagacgcggggacgctggctcgctccctccctccctccctccgacgctgtgagtagagaagctaggccccgagccgggcgggactagggtggtggttgtgttctgccctcgcccgtcgccaacgctgggctgactgaaaacctggccctttgggtcgcgcgtcttcgactttcaccgccatgcggacatggggccgtgggagaaactctgggcgggattacggtgaaaattcttgtttgggcgggccctgcggcttctttcttccggctcgccctcggccccgccctcgccccgcccccgcccccgctccagctccagccgggtcctcgctcggccccgcacgcggcccgcggtagacggagggcctgggcacccaccgtctccatcccggccccagcccagtcgagcgtccactagaagggcgctccctgtccggccctaatcctcgctcctcacggaggctctttgtcacagcgaagactgacagcccgcagtcttctggacttcttttatggggctcctggcggtgctattcattcagtcattgattcgtcttgtaaatatggagcgcctgctctgtactcgacccggcactgggtaccggaagaaccagacagctcggtttttgccaccatttataagtctgtgtccttttcttgagtactgaaccgagatacagttttaaatgtgctgtgcggtctctgagcagcgactcacctgtgcagatcaaatgatgctgtttggaaaaatttcccagcagttgtgtggcgtaaagaaactcccatggtcatgtgactccagatacttctggggctggttgaatgcagtgtttaataaggtggattatgatcgcatcagggatgttggccctgacagggcggcatccgagtggttgctgcgctgtggggccatggtgcgctaccatggccaggagaggtggcagaaggactacaaccaccttccaacaggccctctggacaaatacaagattcaggcgatcgacgccaccgactcttgtatcatgagcattggatttgatcacatgggtaactaccctatcgttttgctaatagaaaatgcagatgatttgcagtgaccattttgttgcagttgactcacgattatagtcataggtatgtcctttttgcccatttcattatagtcaagtttgtttcttcctgtgtttcatatttattttcaaattaaattgaggttacagaca

SEQ ID NO: 64518 - DNA, 1170 bp, Homo sapiens
taaaaaaccccaagaacaagaaacaggagtgacttgctcagtaattgttgagtggcaaatcaaatgatgctgtttggaaaaatttcccagcagttgtgtggcgtaaagaaactcccatggtcatgtgactccagatacttctggggctggttgaatgcagtgtttaataaggtggattatgatcgcatcagggatgttggccctgacagggcggcatccgagtggttgctgcgctgtggggccatggtgcgctaccatggccaggagaggtggcagaaggactacaaccaccttccaacaggccctctggacaaatacaagattcaggcgatcgacgccaccgactcttgtatcatgagcattggatttgatcacatggagggcctagagcatgttgaaaaaataaggctgtgcaagtgtcattatatcgaggatgactgtttgctgagacttagtcaacttgaaaatttacaaaaaaccatattggaaatggaaataatatcctgtgggaatatcacagacaaaggcatcattgctttgcgtcatttaagaaacctcaaatatttgttgttaagtgatcttcctggagtaagagaaaaagaaaatcttgtccaagcctttaagacagcactgccttctctggaactaaaattacaattgaagtaaaataatgtgtcttatttcagtataaaggatcatttgaaactgttgattccaaacatcaactaatattatatagtcatcagtagaattataaggatgccatatcatgacattttagaagtggagagtgcatcatatgtagaaaataaatattcagacgtggctcattaatgttactaagttggaagtgagaatttatgaacattaattcattttaagaaaagtgcagccaggcgcagtggctcatgcctgtaatcctagcactttgggaggccaaagcgggcagatcacctgaggtcaggagttcaagaccaaccatggccaacatggtgaaaccccatctctactaaaaaaacaaaattagctgaatgtggtggtgcacgcctttaatcccagctactctggaggctgaggcaggagaatcacttgacttgggaggtggaggttgcagggacccgagattgtgccactgcactccagcctgggtgacagagcgagactgtctca

SEQ ID NO: 64519 - DNA, 1408 bp, Homo sapiens
aatttgaccacagattcagaattattttctctttaatcttttgttattaatacaaattctaaccaagtatagtcattcgtagaatagttactaagtatctctggtgtcaagcactgtactatatgtgaatcaatgaaacgttgtgtctgataaattcatataaaaataatacgccttgacagcgttcacgtggaaacaaaaacaaaactaaaaaagttagcagatagactgcaggtttttttgtttttgtttttgtttttttgcatggatctcactaatacatttatcttcctcgtcagtcacttgaaatgaaaatttgttgcgttctgtattatttatgtcagttaatatagttaacaagctagtgattattgtaaaagcaaactgctttttttctcttgccaacagggtggattatgatcgcatcagggatgttggccctgacagggcggcatccgagtggttgctgcgctgtggggccatggtgcgctaccatggccaggagaggtggcagaaggactacaaccaccttccaacaggccctctggacaaatacaagattcaggcgatcgacgccaccgactcttgtatcatgagcattggatttgatcacatggagggcctagagcatgttgaaaaaataaggctgtgcaagtgtcattatatcgaggatgactgtttgctgagacttagtcaacttgaaaatttacaaaaaaccatattggaaatggaaataatatcctgtgggaatatcacagacaaaggcatcattgctttgcgtcatttaagaaacctcaaatatttgttgttaagtgatcttcctggagtaagagaaaaagaaaatcttgtccaagcctttaagacagcactgccttctctggaactaaaattacaattgaagtaaaataatgtgtcttatttcagtataaaggatcatttgaaactgttgattccaaacatcaactaatattatatagtcatcagtagaattataaggatgccatatcatgacattttagaagtggagagtgcatcatatgtagaaaataaatattcagacgtggctcattaatgttactaagttggaagtgagaatttatgaacattaattcattttaagaaaagtgcagccaggcgcagtggctcatgcctgtaatcctagcactttgggaggccaaagcgggcagatcacctgaggtcaggagttcaagaccaaccatggccaacatggtgaaaccccatctctactaaaaaaacaaaattagctgaatgtggtggtgcacgcctttaatcccagctactctggaggctgaggcaggagaatcacttgacttgggaggtggaggttgcagggacccgagattgtgccactgcactccagcctgggtgacagagcgagactgtctca

SEQ ID NO: 64520 - DNA, 1424 bp, Homo sapiens
agagggccggccaggtgccgcagacgcggggacgctggctcgctccctccctccctccctccgacgctgtgagtagagaagctaggccccgagccgggcgggactagggtggtggttgtgttctgccctcgcccgtcgccaacgctgggctgactgaaaacctggccctttgggtcgcgcgtcttcgactttcaccgccatgcggacatggggccgtgggagaaactctgggcgggattacggtgaaaattcttgtttgggcgggccctgcggcttctttcttccggctcgccctcggccccgccctcgccccgcccccgcccccgctccagctccagccgggtcctcgctcggccccgcacgcggcccgcggtagacggagggcctgggcacccaccgtctccatcccggccccagcccagtcgagcgtccactagaagggcgctccctgtccggccctaatcctcgctcctcacggaggctctttgtcacagcgaagactgacagcccgcagtcttctggacttcttttatggggctcctggcggtgctattcattcagtcattgattcgtcttgtaaatatggagcgcctgctctgtactcgacccggcactgggtaccggaagaaccagacagctcggtttttgccaccatttataagtctgtgtccttttcttgagtactgaaccgagatacagttttaaatgtgctgtgcggtctctgagcagcgactcacctgtgcagatcaaatgatgctgtttggaaaaatttcccagcagttgtgtggcgtaaagaaactcccatggtcatgtgactccagatacttctggggctggttgaatgcagtgtttaataaggtggattatgatcgcatcagggatgttggccctgacagggcggcatccgagtggttgctgcgctgtggggccatggtgcgctaccatggccaggagaggtggcagaaggactacaaccaccttccaacaggccctctggacaaatacaagattcaggcgatcgacgccaccgactcttgtatcatgagcattggatttgatcacatggagggcctagagcatgttgaaaaaataaggctgtgcaagtgtcattatatcgaggatgactgtttgctgagacttagtcaacttgaaaatttacaaaaaaccatattggaaatggaaataatatcctgtgggaatatcacagacaaaggcatcattgctttgcgtcatttaaggtagatgatcaaagccaaagtggaaacttgataatgctgttaaggtgaatagttagaatttaattgactgtgaggggtggtgtctttttttagttctaaaaaagataattttaaaaaatgacctcactttcatctgtaatattttaaaacagctaaaatgatcaaccttaatacattaatgttgta

SEQ ID NO: 64521 - DNA, 1412 bp, Homo sapiens
agagggccggccaggtgccgcagacgcggggacgctggctcgctccctccctccctccctccgacgctgtgagtagagaagctaggccccgagccgggcgggactagggtggtggttgtgttctgccctcgcccgtcgccaacgctgggctgactgaaaacctggccctttgggtcgcgcgtcttcgactttcaccgccatgcggacatggggccgtgggagaaactctgggcgggattacggtgaaaattcttgtttgggcgggccctgcggcttctttcttccggctcgccctcggccccgccctcgccccgcccccgcccccgctccagctccagccgggtcctcgctcggccccgcacgcggcccgcggtagacggagggcctgggcacccaccgtctccatcccggccccagcccagtcgagcgtccactagaagggcgctccctgtccggccctaatcctcgctcctcacggaggctctttgtcacagcgaagactgacagcccgcagtcttctggacttcttttatggggctcctggcggtgctattcattcagtcattgattcgtcttgtaaatatggagcgcctgctctgtactcgacccggcactgggtaccggaagaaccagacagctcggtttttgccaccatttataagtctgtgtccttttcttgagtactgaaccgagatacagttttaaatgtgctgtgcggtctctgagcagcgactcacctgtgcagatcaaatgatgctgtttggaaaaatttcccagcagttgtgtggcgtaaagaaactcccatggtcatgtgactccagatacttctggggctggttgaatgcagtgtttaataaggtggattatgatcgcatcagggatgttggccctgacagggcggcatccgagtggttgctgcgctgtggggccatggtgcgctaccatggccaggagaggtggcagaaggactacaaccaccttccaacaggccctctggacaaatacaagattcaggcgatcgacgccaccgactcttgtatcatgagcattggatttgatcacatgggtaactaccctatcgttttgctaatagaaaatgcagatgatttgcagtgaccattttgttgcagttgactcacgattatagtcataggtatgtcctttttgcccatttcattatagtcaagtttgtttcttcctgtgtttcatatttattttcaaattaaattgaggttacagacaccttcctctccttcctcctctcactaagcttgtttctgtatgtctctagtctttggtttattgacttaaaatccagggccttgtttgtcaaactatctttgtcaaacttctgtcattgagaagccctcaataatgcaggaataattatatccacacagcttctgcttacg

SEQ ID NO: 64522 - DNA, 493 bp, Homo sapiens
aagtgataccacaagaagccaagcatcacgccatgaagagcatgtgcagaacattcgccggtttcatgaatccctgcatcttcagggagaggcacccttgccatgtgatgacaaactgaccacatcacctttgtcctcccaaacctccattctgacttctctcagccctcagactcaaacggccatctcacagcaccaggagagctgtagggaccatcttgggccaggtgccagcagcctagaccctgggagccagtgtatcctggagaaatccagtaacctggtgttgcaagtcagctccttaatcacaggtagttactgaagtaactggaagcatgaacatgcccaccaggactcccagctcccaacgattcctgagcatgagcagatagtctctgaaagcatttccacagatgtatccacaactatagattagattctggtcctctgatattagaataaagtactaaaaattgtaaaaccttgaatatag

SEQ ID NO: 64523 - DNA, 2243 bp, Homo sapiens
aagtgataccacaagaagccaagcatcacgccatgaagagcatgtgcagaacattcgccggtttcatgaatccctgcatcttcagggagaggcacccttgccatgtgatgacaaactgaccacatcacctttgtcctcccaaacctccattctgacttctctcaggaagaatctgagtgagcttgatcagattcagaggtacttccgccagaagctcaccaagcctttcctacccctcagccctcagactcaaacggccatctcacagcaccaggagagctgtagggaccatcttgggccaggtgccagcagcctagaccctgggagccagtgtatcctggagaaatccagtaacctggtgttgcaagtcagctccttaatcacagatctgcagactatcaccagggattcgcaagcagctttgagttctcaccgagccaggagtagaagcaacaaggccaccaccctcccagatgctcaggacacagaagcactgcaagaacgatgcacaatgccagatgagccattggtaagagctccagataaaggcacagattccccatcaccccctcctctcgaagagacttcaaatggaggaagaatgctccatgagtccctgaggcatgcagtacccattacaaggatgcagagcagtgaagacactgaggcaggcccagcctacagtgatgaggactatgaagaagacatcattgagcccaggaccttaaatgagatcaccacggtgacagacaaaactagcccttggtctagtgtcatatcagacacaagtgaggtcatcagccctcagcctgacgaggtgcagagggaaggcccctcttgtccttctccagggcctttctgcagagaggagcttatggtcaaaagtagctttctctccagcccagaaagggctgtcaacccccacctgcctaggcagggttctcctagccaaagtcttgttgcttgtgagtgtgaggcctctaaggccagggttggtggcgagtctgcctcagccaaccctcagcccatcccatgcccaacactctcaggagctcaacagagcagcacgtttgttggatggagctcaccacagacagatcagaacaaggagcccaagtcagaggccccagctgagaatgaagctgccaccagtgagctcggtgactctgctgatagcttcaagaagttgccgctaaatctagcctcccagagcagaagggaaaaccataagggaccacccatcgactcctctgacatcaggcagaggcaggtgacaactggatcagagacgtccacaaagcagagcctcctgctcccagggcccattgtggtgcccaacttctttttgcctccccagcagttggaggcttccctgcggatgctttcactctcagcaactttgccaccagcagccacaacagatcaggacaagagcgaagccaccaggggagctctctcccaaaggccttgtcgccccagacctaactcgctccccctcaacctgcctgaggaagaaactctcaggattgcacggatattttcttctcagtactcccagaaagactgacgcagcctgaggggctggggggaaggagacacctgcccaccctccgtcagctttgtccagcttgcaggaggcaccaggtctggctccttcagggctgtcacagtcctgaaaccaccacttgcctaggccacggatgcctcaagagacccggtcagcccagactggaggagtgccccaaaccagtccagtgtccacttgccagaatttcagctccttttttctgtggtgaggcaaaggctagaaataaaatggaatccgcgcccaagtgggacccaagcaggcatctttcggtggagaaacgccccccagtgtccttgacacagctgactgctggcatgagcccaccctctgcctgaagatgcaggaccatttttgccttaaaagttggggaggagggacatgtagattgtgtgcattgtgcatagtcaaggaaatcctagggccacctccagttcatttgtgtgggaacaaggatattttatagatacaaattatttttatgctgtgttgaattaatcaattaggagaggaaggggaaatcacttccttcaaactttttatctgattgtctaaaattctaaccatgcttttaacttattatttttacccagctctgaaggtcattgttcttgcctgtgtttgaataaaatcatattggtgtttgtaaaaaaaaaaa

SEQ ID NO: 64524 - DNA, 568 bp, Homo sapiens
aagtgataccacaagaagccaagcatcacgccatgaagagcatgtgcagaacattcgccggtttcatgaatccctgcatcttcagggagaggcacccttgccatgtgatgacaaactgaccacatcacctttgtcctcccaaacctccattctgacttctctcaggaagaatctgagtgagcttgatcagattcagaggtacttccgccagaagctcaccaagcctttcctacccctcagccctcagactcaaacggccatctcacagcaccaggagagctgtagggaccatcttgggccaggtgccagcagcctagaccctgggagccagtgtatcctggagaaatccagtaacctggtgttgcaagtcagctccttaatcacaggtagttactgaagtaactggaagcatgaacatgcccaccaggactcccagctcccaacgattcctgagcatgagcagatagtctctgaaagcatttccacagatgtatccacaactatagattagattctggtcctctgatattagaataaagtactaaaaattgtaaaaccttgaatatag

SEQ ID NO: 64525 - DNA, 1320 bp, Homo sapiens
  misc_feature (1209)..(1210): n is a, c, g, or t
  misc_feature (1218)..(1218): n is a, c, g, or t
aagtgataccacaagaagccaagcatcacgccatgaagagcatgtgcagaacattcgccggtttcatgaatccctgcatcttcagggagaggcacccttgccatgtgatgacaaactgaccacatcacctttgtcctcccaaacctccattctgacttctctcaggaagaatctgagtgagcttgatcagattcagaggtacttccgccagaagctcaccaagcctttcctacccctcagccctcagactcaaacggccatctcacagcaccaggagagctgtagggaccatcttgggccaggtgccagcagcctagaccctgggagccagtgtatcctggagaaatccagtaacctggtgttgcaagtcagctccttaatcacagatctgcagactatcaccagggattcgcaagcagctttgagttctcaccgagccaggagtagaagcaacaaggccaccaccctcccagatgctcaggacacagaagcactgcaagaacgatgcacaatgccagatgagccattggtaagagctccagataaaggcacagattccccatcaccccctcctctcgaagagacttcaaatggaggaagaatgctccatgagtccctgaggcatgcagtacccattacaaggatgcagagcagtgaagacactgaggcaggcccagcctacagtgatgaggactatgaagaagacatcattgagcccaggaccttaaatgagatcaccacggtgacagacaaaactagcccttggtctagtgtcatatcagacacaagtgaggtcatcagccctcagcctgacgaggtgcagagggaaggcccctcttgtccttctccagggcctttctgcagagaggagcttatggtcaaaagtagctttctctccagcccagaaagggctgtcaacccccacctgcctaggcagggttctcctagccaaagtcttgttgcttgtgagtgtgaggcctctaaggccagggttggtggcgagtctgcctcagccaaccctcagcccatcccatgcccaacactctcaggagctcaacagagcagcacgtttgttggatggagctcaccacagacagatcagaacaaggagcccaagtcagaggccccagctgagaatgaagctgccaccagtgagctcggtgactctgctgatagcttcaagaagttgccgctaaatctagctccgannaaggaacntagggcccctgctcttgatagggagggtgacatgtcacaatccaacacttgtccggcgtgggcctttgccccggggcccggattacaacacttcaccctata

SEQ ID NO: 64526 - DNA, 275 bp, Homo sapiens
ttgctcacttcccagatggtgcgacagacagggagaggcgctccacacttcccagacaatggggtcgccgggcagaggcgctccaatgggaataatttttaaccagtaaacaaaaaatacccattaaatggaaaggttttaggaccgaaatatgtcgttgaatgcatgagagcaaaaacccagcaggtagtattttctaggcattgtaaataacagtcgaaggcatctactaaagtgagttcacaagtaatatctatctacataaaacttctata

SEQ ID NO: 64527 - DNA, 1379 bp, Homo sapiens
gggagagagatcttcctctctcttcgggcgtgttaagacagcggggttggcctgtacttcctctggccctggctgaagagggctagtgaaaccgttaaacccctaggcgatcatggccttgagacctgaggaccccagtagcgggttccggcatagcaacgtggtggccttcatcaacgagaaaatggccaggcacacgaaaggccccgagttctatcttgagaatatatccttatcctgggagaaggtggaagacaagctgagggccatactggaggacagcgaggtgcccagtgaggtcaaagaggcctgcacctggggcagcctggccttgggtgtgcgctttgcccacaggcaggcacagctacaaaggcacagggtgcggtggctgcacggcttcgccaaactgcacaaatcagccgcacaggccttggcatcagacctgaagaagctcagggagcagcaggagacggaacgcaaggaggcggcctcccggctaagaatggcccagaccagcctcgtggaggtgcagaaagagagagacaaggagctggtgtctccccatgagtgggagcagggggcagggtggccaggcctggccactgccggaggggtttgcacagaaggagcagctgaggaggaagaagaggcggcggtggctgctgctggtgctgctggaggaaaaggagcagaagaagagcagagggatgtggaggttgtggctgcccctgtggaggccatggctccccctgtggaggctggggctgcccccatggagacccagttcccccacgtggaggccagggctgcctccatggagaccacagagaagctggagagaatcctcctgcagctccttggagatgctgatcaggaaaagtacacctattgggggcagaaggagggagatctccggtcggtcgaaacagccacatcttatttctctggaaccacgaacccctggtccagagcctcatcagaacctcttcctgtccagctccctgcctcatactcatactcatactcaagccctttttcctccttctcagacatacccactatatcccctccacaagcaacagtcacagcaccagttccgcctcagctgccttccgactgggaggcctttgatactagcctgtggtctgatggggggccccacagaatagaccatcaggagcacccaagagacaggagatactccgaacctcatcagcaaagacctccagtatatcgcaggccaggggactgggactgcccttggtgtaacgctgtgaatttttcacggagggatacttgcttcgactgtgggaagggaatctggctgcaaaaacctcattgagtgcagaaatgcaaaatagaaccgaagcatgtataaa

SEQ ID NO: 64528 - DNA, 511 bp, Homo sapiens
gacaaaccattgtcaagagggagggatacatgggacttttttgacttgattataagggcttaattttcttatttctctggaaccacgaacccctggtccagagcctcatcagaacctcttcctgtccagctccctgcctcatactcatactcatactcaagccctttttcctccttctcagacatacccactatatcccctccacaagcaacagtcacagcaccagttccgcctcagctgccttccgactgggaggcctttgatactagcctgtggtctgatggggggccccacagaatagaccatcaggagcacccaagagacaggagatactccgaacctcatcagcaaagacctccagtatatcgcaggccaggggactgggactgcccttggtgtaacgctgtgaatttttcacggagggatacttgcttcgactgtgggaagggaatctggctgcaaaaacctcattgagtgcagaaatgcaaaatagaaccgaagcatgtataaa

SEQ ID NO: 64529 - DNA, 1353 bp, Homo sapiens
gggagagagatcttcctctctcttcgggcgtgttaagacagcggggttggcctgtacttcctctggccctggctgaagaggcgatcatggccttgagacctgaggaccccagtagcgggttccggcatagcaacgtggtggccttcatcaacgagaaaatggccaggcacacgaaaggccccgagttctatcttgagaatatatccttatcctgggagaaggtggaagacaagctgagggccatactggaggacagcgaggtgcccagtgaggtcaaagaggcctgcacctggggcagcctggccttgggtgtgcgctttgcccacaggcaggcacagctacaaaggcacagggtgcggtggctgcacggcttcgccaaactgcacaaatcagccgcacaggccttggcatcagacctgaagaagctcagggagcagcaggagacggaacgcaaggaggcggcctcccggctaagaatggcccagaccagcctcgtggaggtgcagaaagagagagacaaggagctggtgtctccccatgagtgggagcagggggcagggtggccaggcctggccactgccggaggggtttgcacagaaggagcagctgaggaggaagaagaggcggcggtggctgctgctggtgctgctggaggaaaaggagcagaagaagagcagagggatgtggaggttgtggctgcccctgtggaggccatggctccccctgtggaggctggggctgcccccatggagacccagttcccccacgtggaggccagggctgcctccatggagaccacagagaagctggagagaatcctcctgcagctccttggagatgctgatcaggaaaagtacacctattgggggcagaaggagggagatctccggtcggtcgaaacagccacatcttatttctctggaaccacgaacccctggtccagagcctcatcagaacctcttcctgtccagctccctgcctcatactcatactcatactcaagccctttttcctccttctcagacatacccactatatcccctccacaagcaacagtcacagcaccagttccgcctcagctgccttccgactgggaggcctttgatactagcctgtggtctgatggggggccccacagaatagaccatcaggagcacccaagagacaggagatactccgaacctcatcagcaaagacctccagtatatcgcaggccaggggactgggactgcccttggtgtaacgctgtgaatttttcacggagggatacttgcttcgactgtgggaagggaatctggctgcaaaaacctcattgagtgcagaaatgcaaaatagaaccgaagcatgtataaa

SEQ ID NO: 64530 - DNA, 449 bp, Homo sapiens
gtttgtgccgctgttgtgctccttccagatgggcaagcatctgttgtgccccacgcttcagagaatttggtttctcaagtgccccagggccatctccagagcatgcctactgggaacatgcgggcttcccaggagctacatgacctcatggcagccagaaggagcaaactggtgcaagaggagcccagaaacccaaactgtcaaggctcatgcaagagccaaaggccaatgtttccccctattcacaagagtgagaagtctaggaagcccaacttagaaaaacatgaagaaaggcttgaaggattgaggactcctcaacttaccccagtcaggaaaacagaagacacccatcaggatgaaggcgtccagctactgccatcaaagaaacagcctccttcagtaagccactttggagaaaacatcaagcaattttttcagtggattttttc

SEQ ID NO: 64531 - DNA, 169 bp, Homo sapiens
ctctgacaaattcattctggaaaccggatgggtcacttcagaaacccccacttcctggtgatgctcacacaggactccttcagaaccacttggtacccctcctctgggctcccactccactgcacacatgtggccccgtggcatctgtcacaccacaaggtcactgact

SEQ ID NO: 64532 - DNA, 896 bp, Homo sapiens
catcaacattcatttacgaattaccttttgaatgaagggctttgctgctagatccttcacagtctgcaaagtttacccctgaaatgggggagctttgaggttagaatgatctctatcctgaacaatattgctgggtttatgtttatttgggttttttttttttaattcattcctctctgtctttcaggaaatatatttgaggttcttttaaacacacacacacagacaaacacataaataatacagggttttttttttgtaattgaagaatggagttgatttgaaaaattgaagctggggtgagctacaatatgattttttaaaaatgagtaaataaggaattgtgaataatggaaagacaagtcaaagccaggaggaagataaataagccttgtggatgtggtcgctagaaaagagctacaaatttggctttatgttttctagcacttagtgttgctagaattttgtgatcaataacattcactttttaatataaaaagagaacaaaatttttagaaacattacagatttctgataagagacctaaaataaatttctctcatctgtcttcttaaagaaggcaccacagtgcaacaaagagtatcctcctataaggccattatcacattccttagtttagggtgttaataagggagatctcaaggggtcaataaatgtaggccattgctttaacccaagaggaaaatttcaagtatcactagacatgctctccaaagaaggatgcttgcaaaatggttcagtggagtatggaacgaaaaatatttgaatttatattcattttccccaactttttaaaatttatatttttgtgtatattttatgagtacagtagtgacataacatataaataaatatctattttgacaacttgtgct

SEQ ID NO: 64533 - DNA, 597 bp, Homo sapiens
gccgggtccccgttctggggctggtgatcctggggaagagccaggcagtgccctgcccacctagtggttatgagcccagaatgttgatttttttcccttggttgcttcatgactttgttgaatttccagagtatgtgtgggggcccccggcgtcccactcgccccagccctgtggcagcagagctggctgtcaagctcagtcagctgggcccagggccccggaggtaggtgggtgtgtgcctgagcttcccctttgggccctgccaggtgctgggagggaccacacaggcggcaggaactcggggtccccaggcctcggccacaccagcctggtgcttgttatatattgatatgtctctctacctgtgaaatgggtatttattttaaggagctgacgcacgcgattgtggggctgtcacgtctgaagttcgcagggcgcgctggctgtcaagagccgctgttgcagtctcgagtccaggctgtgcgctcaggccgggcttctctgtggcggtcctgggaattcctcctccgggcccttaggcgacactcccctgccttcagctgattggatgaggccctcatgccgtctgctgattt

SEQ ID NO: 64534 - DNA, 564 bp, Homo sapiens
tcctgccctctaaacaacaagcgtttcgccatcttgggcaattttattcccaagtctctctcttttttatttttgaggaaaggaaagaagtattaggaagtgtgtctggataagtctcaaagtttagggaatgttcagggggcccagtgacgtcatgtaaactttacggagaaattttcccaagagtaaattttttgcttaatttttctcctgttttataggattgtgtaacttacaggttactgataagttgtgtggcttatttttgtgttttgctctcaaaatcagtatacgaagtctgcgtattgtatgttttggtaacaggtggaagattatatgcaaaaaatggtaaaaaacttgtgcgtcatttgttatttatctggtttttgtgtacttttttttttaatttaaaggtttcaactgttatctgtagtcagtatattccctttcttatttgctccactctcccttatggattttttgaaaattagcttggttaatatttatgtatggttattttagattatctggctccccgtttctaataaaatgttctggggtttt

SEQ ID NO: 64535 - DNA, 248 bp, Homo sapiens
  misc_feature (36)..(36): n is a, c, g, or t
  misc_feature (50)..(50): n is a, c, g, or t
  misc_feature (63)..(63): n is a, c, g, or t
tttccccaaaaaacccgaagggaaggccgcgcggcngcccttatcaaaantcattttcccccnccgcgtgtgtcctctgcttcccaagatgccatggctggactggacccccagcccacatgaccatgcctcagactgtcaccccctaccagttcccaagtccatgtgtaccccgctcaccacgggaacggccccccccaaccacaggcatcaggcaaccatttgaaataaaactccttcagcctgtg

SEQ ID NO: 64536 - DNA, 114 bp, Homo sapiens
aattcaagcttctaacgatgtacggggacatgtgtaccccgctcaccacgggaacggccccccccaaccacaggcatcaggcaaccatttgaaataaaactccttcagcctgtg

SEQ ID NO: 64537 - DNA, 1104 bp, Homo sapiens
  misc_feature (20)..(20): n is a, c, g, or t
tcagtaactcccggggctangtacgaggcctgggtggtagcagagctggaggtgggtgcccggcacggaggggcctgcggaccaatggctctgccctgcaccttagggctcgggatgctgctggccctgccaggggccttgggctcgggtggcagcgcggaggacagcgtgggctccagctctgtcaccgttgtcctgctgctgctgctgctcctactgctggccactggcctagcactggcctggcgccgcctcagccgtgactcagggggctactaccacccggcccgcctaggtgccgcgctgtggggccgcacgcggcgcctgctctgggccagccccccaggtcgctggctgcaggcccgagctgagctggggtccacagacaatgaccttgagcgacaggaggatgagcaggacacagactatgaccacgtcgcggatggtggcctgcaggctgaccctggggaaggcgagcagcaatgtggagaggcgtccagcccagagcaggtccccgtgcgggctgaggaagccagagacagtgacacggagggcgacctggtcctcggctccccaggaccagcgagcgcagggggcagtgctgaggccctgctgagtgacctgcacgcctttgctggcagcgcagcctgggatgacagcgccagggcagctgggggccagggcctccatgtcaccgcactgtagaggccggtcttggtgtcccatccctgtcacagccgctcactccccgtgcctctgcttcccaagatgccatggctggactggacccccagcccacatgaccatgcctcagactgtcaccccctaccagttcccaagtccatgtgtaccccgctcaccacgggaacggccccccccaaccacaggcatcaggcaaccatttgaaataaaactccttcagcctgtgaaaaaaaaaaacaaaacaaacaaaaaaacaaaaaaaagcaaaacaaaaacaaaaaaaaacaaaaaaaagaacaaaggcgaggacaacaaagaaaagaaccaaccagacggaggcacacacaatagagcaccgacaccgagatacatggacggcggcgggcggccctcatcagagcc

SEQ ID NO: 64538 - DNA, 1100 bp, Homo sapiens
agcaggctggtactggtcctggattttatggagtagcagagctggaggtgggtgcccggcacggaggggcctgcggaccaatggctctgccctgcaccttagggctcgggatgctgctggccctgccaggggccttgggctcgggtggcagcgcggaggacagcgtgggctccagctctgtcaccgttgtcctgctgctgctgctgctcctactgctggccactggcctagcactggcctggcgccgcctcagccgtgactcagggggctactaccacccggcccgcctaggtgccgcgctgtggggccgcacgcggcgcctgctctgggccagccccccaggtcgctggctgcaggcccgagctgagctggggtccacagacaatgaccttgagcgacaggaggatgagcaggacacagactatgaccacgtcgcggatggtggcctgcaggctgaccctggggaaggcgagcagcaatgtggagaggcgtccagcccagagcaggtccccgtgcgggctgaggaagccagagacagtgacacggagggcgacctggtcctcggctccccaggaccagcgagcgcagggggcagtgctgaggccctgctgagtgacctgcacgcctttgctggcagcgcagcctgggatgacagcgccagggcagctgggggccagggcctccatgtcaccgcactgtagaggccggtcttggtgtcccatccctgtcacagccgctcactccccgtgcctctgcttcccaagatgccatggctggactggacccccagcccacatgaccatgcctcagactgtcaccccctaccagttcccaagtccatgtgtaccccgctcaccacgggaacggccccccccaaccacaggcatcaggcaaccatttgaaataaaactccttcagcctgtgaaaaaaaaaaacaaaacaaacaaaaaaacaaaaaaaagcaaaacaaaaacaaaaaaaaacaaaaaaaagaacaaaggcgaggacaacaaagaaaagaaccaaccagacggaggcacacacaatagagcaccgacaccgagatacatggacggcggcgggcggccctcatcagagcc

SEQ ID NO: 64539 - DNA, 1086 bp, Homo sapiens
cacttctcgctcgacacagcagcagagctggaggtgggtgcccggcacggaggggcctgcggaccaatggctctgccctgcaccttagggctcgggatgctgctggccctgccaggggccttgggctcgggtggcagcgcggaggacagcgtgggctccagctctgtcaccgttgtcctgctgctgctgctgctcctactgctggccactggcctagcactggcctggcgccgcctcagccgtgactcagggggctactaccacccggcccgcctaggtgccgcgctgtggggccgcacgcggcgcctgctctgggccagccccccaggtcgctggctgcaggcccgagctgagctggggtccacagacaatgaccttgagcgacaggaggatgagcaggacacagactatgaccacgtcgcggatggtggcctgcaggctgaccctggggaaggcgagcagcaatgtggagaggcgtccagcccagagcaggtccccgtgcgggctgaggaagccagagacagtgacacggagggcgacctggtcctcggctccccaggaccagcgagcgcagggggcagtgctgaggccctgctgagtgacctgcacgcctttgctggcagcgcagcctgggatgacagcgccagggcagctgggggccagggcctccatgtcaccgcactgtagaggccggtcttggtgtcccatccctgtcacagccgctcactccccgtgcctctgcttcccaagatgccatggctggactggacccccagcccacatgaccatgcctcagactgtcaccccctaccagttcccaagtccatgtgtaccccgctcaccacgggaacggccccccccaaccacaggcatcaggcaaccatttgaaataaaactccttcagcctgtgaaaaaaaaaaacaaaacaaacaaaaaaacaaaaaaaagcaaaacaaaaacaaaaaaaaacaaaaaaaagaacaaaggcgaggacaacaaagaaaagaaccaaccagacggaggcacacacaatagagcaccgacaccgagatacatggacggcggcgggcggccctcatcagagcc

SEQ ID NO: 64540 - DNA, 1085 bp, Homo sapiens
  misc_feature (20)..(20): n is a, c, g, or t
tcagtaactcccggggctangtacgaggcctgggtggtagcagagctggaggtgggtgcccggcacggaggggcctgcggaccaatgggctcgggatgctgctggccctgccaggggccttgggctcgggtggcagcgcggaggacagcgtgggctccagctctgtcaccgttgtcctgctgctgctgctgctcctactgctggccactggcctagcactggcctggcgccgcctcagccgtgactcagggggctactaccacccggcccgcctaggtgccgcgctgtggggccgcacgcggcgcctgctctgggccagccccccaggtcgctggctgcaggcccgagctgagctggggtccacagacaatgaccttgagcgacaggaggatgagcaggacacagactatgaccacgtcgcggatggtggcctgcaggctgaccctggggaaggcgagcagcaatgtggagaggcgtccagcccagagcaggtccccgtgcgggctgaggaagccagagacagtgacacggagggcgacctggtcctcggctccccaggaccagcgagcgcagggggcagtgctgaggccctgctgagtgacctgcacgcctttgctggcagcgcagcctgggatgacagcgccagggcagctgggggccagggcctccatgtcaccgcactgtagaggccggtcttggtgtcccatccctgtcacagccgctcactccccgtgcctctgcttcccaagatgccatggctggactggacccccagcccacatgaccatgcctcagactgtcaccccctaccagttcccaagtccatgtgtaccccgctcaccacgggaacggccccccccaaccacaggcatcaggcaaccatttgaaataaaactccttcagcctgtgaaaaaaaaaaacaaaacaaacaaaaaaacaaaaaaaagcaaaacaaaaacaaaaaaaaacaaaaaaaagaacaaaggcgaggacaacaaagaaaagaaccaaccagacggaggcacacacaatagagcaccgacaccgagatacatggacggcggcgggcggccctcatcagagcc

SEQ ID NO: 64541 - DNA, 1102 bp, Homo sapiens
  misc_feature (6)..(7): n is a, c, g, or t
gtgganncaagagcgaaagattcggctggtacgggctgggtttcaggctagggtgggtccggaccgatgtggctgcggaccaatggctctgccctgcaccttagggctcgggatgctgctggccctgccaggggccttgggctcgggtggcagcgcggaggacagcgtgggctccagctctgtcaccgttgtcctgctgctgctgctgctcctactgctggccactggcctagcactggcctggcgccgcctcagccgtgactcagggggctactaccacccggcccgcctaggtgccgcgctgtggggccgcacgcggcgcctgctctgggccagccccccaggtcgctggctgcaggcccgagctgagctggggtccacagacaatgaccttgagcgacaggaggatgagcaggacacagactatgaccacgtcgcggatggtggcctgcaggctgaccctggggaaggcgagcagcaatgtggagaggcgtccagcccagagcaggtccccgtgcgggctgaggaagccagagacagtgacacggagggcgacctggtcctcggctccccaggaccagcgagcgcagggggcagtgctgaggccctgctgagtgacctgcacgcctttgctggcagcgcagcctgggatgacagcgccagggcagctgggggccagggcctccatgtcaccgcactgtagaggccggtcttggtgtcccatccctgtcacagccgctcactccccgtgcctctgcttcccaagatgccatggctggactggacccccagcccacatgaccatgcctcagactgtcaccccctaccagttcccaagtccatgtgtaccccgctcaccacgggaacggccccccccaaccacaggcatcaggcaaccatttgaaataaaactccttcagcctgtgaaaaaaaaaaacaaaacaaacaaaaaaacaaaaaaaagcaaaacaaaaacaaaaaaaaacaaaaaaaagaacaaaggcgaggacaacaaagaaaagaaccaaccagacggaggcacacacaatagagcaccgacaccgagatacatggacggcggcgggcggccctcatcagagcc

SEQ ID NO: 64542 - DNA, 1198 bp, Homo sapiens
  misc_feature (20)..(20): n is a, c, g, or t
  misc_feature (431)..(431): n is a, c, g, or t
  misc_feature (476)..(476): n is a, c, g, or t
  misc_feature (516)..(516): n is a, c, g, or t
tcagtaactcccggggctangtacgaggcctgggtggtagcagagctggaggtgggtgcccggcacggaggggcctgcggaccaatggctctgccctgcaccttagggctcgggatgctgctggccctgccaggggccttgggctcgggtggcagcgcggaggacagcgtgggctccagctctgtcaccgttgtcctgctgctgctgctgctcctactgctggccactggcctagcactggcctggcgccgcctcagccgtgactcaggggggactagctagtccaacccggtgacccagtcctatgtgttgcctgcagcttgttggtgggcctgcatcgctgggcgctctgtctctggggccagaccccaccaggggttcgcttggtcttgcaagtgtccctgaagggtagagagcttgtgtgtgtccancaggagcaatttgacccgttgatggcgtgagtcagggacgcgatnggatgccaggagagcatcaggatcttattgagccagcgtnctgcgagattgtgttggacgcttgccgggctagacccgtgggtgaacgtggcgagcagcaatgtggagaggcgtccagcccagagcaggtccccgtgcgggctgaggaagccagagacagtgacacggagggcgacctggtcctcggctccccaggaccagcgagcgcagggggcagtgctgaggccctgctgagtgacctgcacgcctttgctggcagcgcagcctgggatgacagcgccagggcagctgggggccagggcctccatgtcaccgcactgtagaggccggtcttggtgtcccatccctgtcacagccgctcactccccgtgcctctgcttcccaagatgccatggctggactggacccccagcccacatgaccatgcctcagactgtcaccccctaccagttcccaagtccatgtgtaccccgctcaccacgggaacggccccccccaaccacaggcatcaggcaaccatttgaaataaaactccttcagcctgtgaaaaaaaaaaacaaaacaaacaaaaaaacaaaaaaaagcaaaacaaaaacaaaaaaaaacaaaaaaaagaacaaaggcgaggacaacaaagaaaagaaccaaccagacggaggcacacacaatagagcaccgacaccgagatacatggacggcggcgggcggccctcatcagagcc

SEQ ID NO: 64543 - DNA, 912 bp, Homo sapiens
  misc_feature (782)..(782): n is a, c, g, or t
tggtgcaggcgatgtatgtgctgcggaccaatggctctgccctgcaccttagggctcgggatgctgctggccctgccaggggccttgggctcgggtggcagcgcggaggacagcgtgggctccagctctgtcaccgttgtcctgctgctgctgctgctcctactgctggccactggcctagcactggcctggcgccgcctcagccgtgactcagggggctactaccacccggcccgcctaggtgccgcgctgtggggccgcacgcggcgcccttggctccttggggccccagggccccccccccaagggggttccgggcttgggttttggcaagggggcccccccaggaagtgctgttgaaggctttggggggggtttcccagccaagaacacaaatttgaccccttttgaaaggccgaaccaagggggagggggagttgacgacagtgaagcacgatgaacctttattagacacaacctgtccggcgggatttgtgtgggcacctttgccaatgggcgttgaaccccctttgcgggggaaacagggggcggaaaggccagagagggcacaacagatttttgtttttggggggaggaagcagcggcgagggggggggcgccgtgtttcccccagagagtgcgcccccccccaagagtgtggatagtgcggccggagtgtgggggttttttcccgccccccgccgtgtggtttttgcgggcgcggggcggggggctcttgttgggagatggtggagaactgggcccccatgggaaccggcacnccatgtgctagacgcagccggggacggggggcggagacactttggcgttccctccggcggctccccccgccatggtgaaccccagaggcgggaatggccgccaggggtggggggccaaaggttggcttgg

SEQ ID NO: 64544 - DNA, 1090 bp, Homo sapiens
  misc_feature (21)..(21): n is a, c, g, or t
tcgctaggtagagcatgggtntacagcagagctggaggtgggtgcccggcacggaggggcctgcggaccaatggctctgccctgcaccttagggctcgggatgctgctggccctgccaggggccttgggctcgggtggcagcgcggaggacagcgtgggctccagctctgtcaccgttgtcctgctgctgctgctgctcctactgctggccactggcctagcactggcctggcgccgcctcagccgtgactcagggggctactaccacccggcccgcctaggtgccgcgctgtggggccgcacgcggcgcctgctctgggccagccccccaggtcgctggctgcaggcccgagctgagctggggtccacagacaatgaccttgagcgacaggaggatgagcaggacacagactatgaccacgtcgcggatggtggcctgcaggctgaccctggggaaggcgagcagcaatgtggagaggcgtccagcccagagcaggtccccgtgcgggctgaggaagccagagacagtgacacggagggcgacctggtcctcggctccccaggaccagcgagcgcagggggcagtgctgaggccctgctgagtgacctgcacgcctttgctggcagcgcagcctgggatgacagcgccagggcagctgggggccagggcctccatgtcaccgcactgtagaggccggtcttggtgtcccatccctgtcacagccgctcactccccgtgcctctgcttcccaagatgccatggctggactggacccccagcccacatgaccatgcctcagactgtcaccccctaccagttcccaagtccatgtgtaccccgctcaccacgggaacggccccccccaaccacaggcatcaggcaaccatttgaaataaaactccttcagcctgtgaaaaaaaaaaacaaaacaaacaaaaaaacaaaaaaaagcaaaacaaaaacaaaaaaaaacaaaaaaaagaacaaaggcgaggacaacaaagaaaagaaccaaccagacggaggcacacacaatagagcaccgacaccgagatacatggacggcggcgggcggccctcatcagagcc

SEQ ID NO: 64545 - DNA, 1090 bp, Homo sapiens
cattaggctaggtcgaggcttgtgagcagagctggaggtgggtgcccggcacggaggggcctgcggaccaatggctctgccctgcaccttagggctcgggatgctgctggccctgccaggggccttgggctcgggtggcagcgcggaggacagcgtgggctccagctctgtcaccgttgtcctgctgctgctgctgctcctactgctggccactggcctagcactggcctggcgccgcctcagccgtgactcagggggctactaccacccggcccgcctaggtgccgcgctgtggggccgcacgcggcgcctgctctgggccagccccccaggtcgctggctgcaggcccgagctgagctggggtccacagacaatgaccttgagcgacaggaggatgagcaggacacagactatgaccacgtcgcggatggtggcctgcaggctgaccctggggaaggcgagcagcaatgtggagaggcgtccagcccagagcaggtccccgtgcgggctgaggaagccagagacagtgacacggagggcgacctggtcctcggctccccaggaccagcgagcgcagggggcagtgctgaggccctgctgagtgacctgcacgcctttgctggcagcgcagcctgggatgacagcgccagggcagctgggggccagggcctccatgtcaccgcactgtagaggccggtcttggtgtcccatccctgtcacagccgctcactccccgtgcctctgcttcccaagatgccatggctggactggacccccagcccacatgaccatgcctcagactgtcaccccctaccagttcccaagtccatgtgtaccccgctcaccacgggaacggccccccccaaccacaggcatcaggcaaccatttgaaataaaactccttcagcctgtgaaaaaaaaaaacaaaacaaacaaaaaaacaaaaaaaagcaaaacaaaaacaaaaaaaaacaaaaaaaagaacaaaggcgaggacaacaaagaaaagaaccaaccagacggaggcacacacaatagagcaccgacaccgagatacatggacggcggcgggcggccctcatcagagcc

SEQ ID NO: 64546 - DNA, 928 bp, Homo sapiens
  misc_feature (20)..(20): n is a, c, g, or t
tcagtaactcccggggctangtacgaggcctgggtggtagcagagctggaggtgggtgcccggcacggaggggcctgcggaccaatggctctgccctgcaccttagggctcgggatgctgctggccctgccaggggccttgggctcgggtggcagcgcggaggacagcgtgggctccagctctgtcaccgttgtcctgctgctgctgctgctcctactgctggccactggcctagcactggcctggcgccgcctcagccgtgactcagggggctactaccacccggcccgcctaggtgccgcgctgtggggccgcacgcggcgcctgctctgggccagccccccaggtcgctggctgcaggcccgagctgagctggggtccacagacaatgaccttgagcgacaggaggatgagcaggacacagactatgaccacgtcgcggatggtggcctgcaggctgaccctggggaaggcgagcagcaatgtggagaggcgtccagcccagagcaggtccccgtgcgggctgaggaagccagagacagtgacacggagggcgacctggtcctcggctccccaggaccagcgagcgcagggggcagtgctgaggccctgctgagtgacctgcacgcctttgctggcagcgcagcctgggatgacagcgccagggcagctgggggccagggcctccatgtcaccgcactgtagaggccggtcttggtgtcccatccctgtcacagccgctcactccccgtgcctctgcttcccaagatgccatggctggactggacccccagcccacatgaccatgcctcagactgtcaccccctaccagttcccaagtccatgtgtaccccgctcaccacgggaacggccccccccaaccacaggcatcaggcaaccatttgaaataaaactccttcagcctgtg

SEQ ID NO: 64547 - DNA, 1050 bp, Homo sapiens
tggtgcaggcgatgtatgtgctgcggaccaatggctctgccctgcaccttagggctcgggatgctgctggccctgccaggggccttgggctcgggtggcagcgcggaggacagcgtgggctccagctctgtcaccgttgtcctgctgctgctgctgctcctactgctggccactggcctagcactggcctggcgccgcctcagccgtgactcagggggctactaccacccggcccgcctaggtgccgcgctgtggggccgcacgcggcgcctgctctgggccagccccccaggtcgctggctgcaggcccgagctgagctggggtccacagacaatgaccttgagcgacaggaggatgagcaggacacagactatgaccacgtcgcggatggtggcctgcaggctgaccctggggaaggcgagcagcaatgtggagaggcgtccagcccagagcaggtccccgtgcgggctgaggaagccagagacagtgacacggagggcgacctggtcctcggctccccaggaccagcgagcgcagggggcagtgctgaggccctgctgagtgacctgcacgcctttgctggcagcgcagcctgggatgacagcgccagggcagctgggggccagggcctccatgtcaccgcactgtagaggccggtcttggtgtcccatccctgtcacagccgctcactccccgtgcctctgcttcccaagatgccatggctggactggacccccagcccacatgaccatgcctcagactgtcaccccctaccagttcccaagtccatgtgtaccccgctcaccacgggaacggccccccccaaccacaggcatcaggcaaccatttgaaataaaactccttcagcctgtgaaaaaaaaaaacaaaacaaacaaaaaaacaaaaaaaagcaaaacaaaaacaaaaaaaaacaaaaaaaagaacaaaggcgaggacaacaaagaaaagaaccaaccagacggaggcacacacaatagagcaccgacaccgagatacatggacggcggcgggcggccctcatcagagcc

SEQ ID NO: 64548 - DNA, 783 bp, Homo sapiens
  misc_feature (20)..(20): n is a, c, g, or t
tcagtaactcccggggctangtacgaggcctgggtggtagcagagctggaggtgggtgcccggcacggaggggcctgcggaccaatggctctgccctgcaccttagggctcgggatgctgctggccctgccaggggccttgggctcgggtggcagcgcggaggacagcgtgggctccagctctgtcaccgttgtcctgctgctgctgctgctcctactgctggccactggcctagcactggcctggcgccgcctcagccgtgactcagggggctactaccacccggcccgcctaggtgccgcgctgtggggccgcacgcggcgcctgctctgggccagccccccaggtcgctggctgcaggcccgagctgagctggggtccacagacaatgaccttgagcgacaggaggatgagcaggacacagactatgaccacgtcgcggatggtggcctgcaggctgaccctggggaaggcgagcagcaatgtggagaggcgtccagcccagagcaggtccccgtgcgggctgaggaagccagggcctccatgtcaccgcactgtagaggccggtcttggtgtcccatccctgtcacagccgctcactccccgtgcctctgcttcccaagatgccatggctggactggacccccagcccacatgaccatgcctcagactgtcaccccctaccagttcccaagtccatgtgtaccccgctcaccacgggaacggccccccccaaccacaggcatcaggcaaccatttgaaataaaactccttcagcctgtg

SEQ ID NO: 64549 - DNA, 440 bp, Homo sapiens
catatctcaatttttctttcagggtcatacttttaaaaaggcagtgttggcaatttatgtctgtgggaatgttacttttctcatcatatttttatctgcaatcaaccatctatgagcaagcaaagaccttggcttttgcaggccaagtgataattatcatcaaaccaaagaaacttgaagcctgtcctgactgcctggagcatatttgtgaattctcacttggaagactggggtcatgtctgtagaggaattctgaagtccagcctttagagaacaacattcaagagggtcatatagactataaattaatgtcatgccctatatgtaattctgggtcttaaaggaaagattgtacttcaggagaagtaactctcaaatatttcatgccaagattttaagaatgttggtatttaagaaaataaatagtgatttggaaaatc

SEQ ID NO: 64550 - DNA, 693 bp, Homo sapiens
caggccagtaggctttgacttgtgccaccgcccacctacttgctggctgtgtgaccttggccaagttaccaagaaccgttctgagcctcagtttcctcatcaggaaaactgggacaataattccaatttaggagctgttggggagatggcataagacaataggtgtgaatcctggcacacagcagtcgctgaacagaagctgctacaatcacctctccttcacctgcctataatgaacctcgctgggattgagtttgggcccaggacctctctgacctccttatggttgggtcagactttggctgaacacctaccagctctgtgccaggggcggcgctggggaagaattaaaggttcgctttctattctacagtccctggcctcaagttcttggtgcccagcattctgcttgccagtatacagtccctgctgtataccggggggtttgcaggctgcagggatgcactggcaaatgagacaatgtctttgccctaagacaattcccagcctggagcagaaacgacctgaccactcagtgccaagacagaggaccttgaacagcccaggggttgaggagggactccccacaacagcccccttggggccccttttcatctttctaacacaccaggctcaaatattttaacagctctgtttcattcacagaataaagtgtaaaaaacccaatttcaa

SEQ ID NO: 64551 - DNA, 262 bp, Homo sapiens
  misc_feature (5)..(5): n is a, c, g, or t
gaaantatggccaagaaagggacaggagcacaaaacaaagagcactttcgggttctgatcgtgaaacctcgtgactcctaatttcctcttccccaagctcttggcaccttgtcctgagctggtcagctcagtctcatgaacacacagtccggtgccaggagctggcacgagaaactagcacacatgactcgtgttctcccgaaaggagagtgaagaagggtgagactccggccacagtggccacgttttggctgggtccgtt

SEQ ID NO: 64552 - DNA, 368 bp, Homo sapiens
aaccaaatcgtaaagaagcctaatgtcttgttgcaacatctgaaagaaacaagatgaatatattccactaggtgggaagcttagggtagtgggaagaacatggattcaggactttgagaaacatggatttaaattttgatccccaatgcctctctgcacttcactgttatctataaaatagaggaaataaaaatactatacattcaagtcttaacaccaacagttaactagttgtgtaaccttggacaagttatgtgacctctctgtctgagcattgtcatttgtatatgagatcatggaggttaaatgtccaacctgttgtcactgtgcacctcaaaataataaataaaacatttcatctctcaaaa

SEQ ID NO: 64553 - DNA, 549 bp, Homo sapiens
ctaactcaatgagcacagagagggtaagatgtcagacactaaaacagtgaggctgctttagtgatggtttgctgagatgatgcacacttgccatcgtgtagctccctgacaccatgaaatgtgtggtctctcatctttatattctctcatcagccctagtggaggagagtcagtgttggagcctgggctcttccttttatcttttgttttctttctctgatgaaggacccaaagcagcagaagatctacgacctattccagaagtcctttgagaaagaaggaagtgatatggagctcctggaagcagcagagtcctttgacccaggaagtgcttcaggaacatctggaagtagttcccagaacatgggagacaccctggatgaaagctcattgacagccagtccacagaagaaaaggagatttgaattttttgataactgggacagctttacgtctcccctgtaaaaggggcaaaaagaaaaaaataaaaagcattttaaaatcatggaattgaaataaaataatgtattttgttttaaaaaaaaaaaa

SEQ ID NO: 64554 - DNA, 427 bp, Homo sapiens
aaggagtatatgtttaatctgttttgttgtcattgtcaaatgcagtgaatatatcttggacctactggaaagtggaagagagaagtttttagtatttgcacaccataaggtggtcctggacgcaattacgcaagagcttgagagaaaggtgagctccctttgaaattcaccatgggctacttttgccatgtcccaagttgttctaagcaggcttaggtcagatccaagcaaagtgagaccgatggcttccggaagcattgctgaagactttctgaagaagagttcttgcttgtagaaccacagtggggtcaaaatgtttccccagccatgtcattttaacttcctccatgctccaaatagatatcccaggagtcttgctttaggaacatctcccaggggctgttccattattctgcataaataatta

SEQ ID NO: 64555 - DNA, 399 bp, Homo sapiens
tgtgttgaaatgaggcagcatttatttcctacacatcttccattagaaagaatattgaacctgatgatattcttagccctaaattggagtttttacaaatgagagggggcaaatgtttcaagatgggtgtttgcaccttgagagatgcagagatgtgaaaccgtaaacaagccgttgtcccataagaacaaggagggtggcctcattttcattagtctggtggttctgtgcaggttgtattcactgcagctcatttctccccaacaggcccctgattcaagagaagattaaagttctggcagaagccgggctttctgagaccaatttttcagaaatgacagaatccactgattacctctacaaggtaatgccagcacatggctcttcacccctggagca

SEQ ID NO: 64556 - DNA, 3070 bp, Homo sapiens
gtggcgcccgcttaccttgaggctgggttggaaaaagactatgttagcaagtgtcacgccatgcttttgccaactttccaattaaaggttgacattcctgcataagcatttctctgtgaaaatgtccttgcctcttacagaggagcagaggaaaaagattgaagagaatcgacaaaaggctctggcccgcagagctgagaagttattggcagaacagcatcagaggactagctcgggcacctccattgctggcaacccattccaggccaagcaaggcccatcccaaaatttcccaagggagtcttgtaagccagtgagccatggtgtcattttcaagcaacagaatctcagtagctcatctaatgctgaccaaagacctcatgattcccacagttttcaggcaaagggaatatggaaaaagccagaagaaatgcccacagcctgcccaggccacagtccacgtagtcaaatggctctcactggaatctctcctcccttggcacaaagtcctccagaggtccctaaacaacagctcttgagttatgagttaggtcaaggtcatgctcaggcttcacctgagatcaggttcacaccctttgctaacccaactcataagcctctggccaaaccaaagagttcccaagagacaccagctcattcctctggacagcctcccagggatgctaagttagaggccaagacagcaaaagcctccccttcggggcagaacatttcttacatccattctagctcagagagtgtaacgcccaggacagaaggaagactccagcagaagtcagggtcctcagtccaaaaaggagtgaactctcagaagggaaagtgcgtaaggaacggcgatcgtttccaggtgttgattgggtacaatgcggaactcattgcagtgtttaagaccctgcccagcaagaattatgatcctgacaccaagacgtggaacttcagcatgaatgactatagtgccctgatgaaagcagcccagagcctccccacggtcaacctgcagcctctggaatgggcctatggcagcagcgagtcaccctccaccagcagtgagggacaggccggccttccatcagctccatccctttcatttgtcaaagggcgatgcatgctcatctccagggcctacttcgaggcagacatcagttattcacaggaccttattgcgctttttaaacagatggattccagaagatatgatgtcaagaccaggaagtggagctttctcttggaagagcacagtaaactaattgcaaaggtgcgctgcctcccacaagttcagctggaccctctgcccacgactctcaccctggcgtttgcttctcagctcaagaagacatctctcagtctcacgccagatgtcccagaggcagacctttctgaagtggaccccaagctcgtgtctaatctgatgccctttcagagagctggagtcaattttgccatagccaaaggaggccgcctgctgctcgctgacgacatgggcctggggaagaccatccaagccatctgcatcgcagccttttaccggaaggagtggccgctcctggtggtggtgccatcctccgtgcgcttcacctgggagcaggccttccttcggtggctgccatctctgagcccagattgcatcaacgtcgtggtgactgggaaggaccgcctgacagctggcctgatcaacattgtcagctttgaccttcttagcaagttggaaaaacagctaaaaaccccttttaaagttgtcatcattgatgaatctcacttcctcaaaaacagtaggactgcccgctgtcgagcagctatgccggtcctaaaggttgccaagagggtgatcctgttgtcgggcacaccagccatgtcccggcccgcagagctctacacgcagatcatcgcagtcaagccaactttcttcccccagtttcatgcctttggacttcgctactgtgatgccaaacggatgccttgggggtgggactactcaggttcctccaacctgggagagctgaagctcctgctggaggaagcagtcatgctgcggcgcctcaagtccgacgtcctttcccagctgcctgccaagcagcgcaagatagtggtgattgccccaggacggatcaatgccaggaccagagctgccctggatgctgcagccaaggaaatgaccaccaaggacaaaactaaacagcagcagaaagatgccctcattctcttcttcaacagaacagctgaagctaaaatcccatctgtcattgaatatatcttggacctactggaaagtggaagagagaagtttttagtatttgcacaccataaggtggtcctggacgcaattacgcaagagcttgagagaaagcacgtgcagcacatccgcatcgatggctccacctcatcagctgagcgggaggacctgtgccagcagttccaactgtcggagaggcatgctgtggccgtgctgtccatcaccgctgccaatatgggcctcaccttctcctcggctgacctggtggtgtttgctgagctgttttggaacccaggggtgctgatccaggctgaggaccgcgtgcaccgcattggacagaccagctccgtgggcattcactacctcgtggcaaagggcacagctgatgactacctttggcccctgattcaagagaagattaaagttctggcagaagccgggctttctgagaccaatttttcagaaatgacagaatccactgattacctctacaaggacccaaagcagcagaagatctacgacctattccagaagtcctttgagaaagaaggaagtgatatggagctcctggaagcagcagagtcctttgacccaggaagtgcttcaggaacatctggaagtagttcccagaacatgggagacaccctggatgaaagctcattgacagccagtccacagaagaaaaggagatttgaattttttgataactgggacagctttacgtctcccctgtaaaaggggcaaaaagaaaaaaataaaaagcattttaaaatcatggaattgaaataaaataatgtattttgttttaaaaaaaaaaaa

SEQ ID NO: 64557 - DNA, 3169 bp, Homo sapiens
agcggtggcctagcccttcaggcctggccgctacaataaggctggcgaactcgcagcgcttgaatacccgtggcctaaccgtccactcggaagaccggtcccgctcgggaggctctgcagtcgcgcctggggtcagggccgggggcgaatgtggctcgcgttctaggcctccctgggttggaaaaagactatgttagcaagtgtcacgccatgcttttgccaactttccaattaaaggttgacattcctgcataagcatttctctgtgaaaatgtccttgcctcttacagaggagcagaggaaaaagattgaagagaatcgacaaaaggctctggcccgcagagctgagaagttattggcagaacagcatcagaggactagctcgggcacctccattgctggcaacccattccaggccaagcaaggcccatcccaaaatttcccaagggagtcttgtaagccagtgagccatggtgtcattttcaagcaacagaatctcagtagctcatctaatgctgaccaaagacctcatgattcccacagttttcaggcaaagggaatatggaaaaagccagaagaaatgcccacagcctgcccaggccacagtccacgtagtcaaatggctctcactggaatctctcctcccttggcacaaagtcctccagaggtccctaaacaacagctcttgagttatgagttaggtcaaggtcatgctcaggcttcacctgagatcaggttcacaccctttgctaacccaactcataagcctctggccaaaccaaagagttcccaagagacaccagctcattcctctggacagcctcccagggatgctaagttagaggccaagacagcaaaagcctccccttcggggcagaacatttcttacatccattctagctcagagagtgtaacgcccaggacagaaggaagactccagcagaagtcagggtcctcagtccaaaaaggagtgaactctcagaagggaaagtgcgtaaggaacggcgatcgtttccaggtgttgattgggtacaatgcggaactcattgcagtgtttaagaccctgcccagcaagaattatgatcctgacaccaagacgtggaacttcagcatgaatgactatagtgccctgatgaaagcagcccagagcctccccacggtcaacctgcagcctctggaatgggcctatggcagcagcgagtcaccctccaccagcagtgagggacaggccggccttccatcagctccatccctttcatttgtcaaagggcgatgcatgctcatctccagggcctacttcgaggcagacatcagttattcacaggaccttattgcgctttttaaacagatggattccagaagatatgttgcaaaggtgcgctgcctcccacaagttcagctggaccctctgcccacgactctcaccctggcgtttgcttctcagctcaagaagacatctctcagtctcacgccagatgtcccagaggcagacctttctgaagtggaccccaagctcgtgtctaatctgatgccctttcagagagctggagtcaattttgccatagccaaaggaggccgcctgctgctcgctgacgacatgggcctggggaagaccatccaagccatctgcatcgcagccttttaccggaaggagtggccgctcctggtggtggtgccatcctccgtgcgcttcacctgggagcaggccttccttcggtggctgccatctctgagcccagattgcatcaacgtcgtggtgactgggaaggaccgcctgacagctggcctgatcaacattgtcagctttgaccttcttagcaagttggaaaaacagctaaaaaccccttttaaagttgtcatcattgatgaatctcacttcctcaaaaacagtaggactgcccgctgtcgagcagctatgccggtcctaaaggttgccaagagggtgatcctgttgtcgggcacaccagccatgtcccggcccgcagagctctacacgcagatcatcgcagtcaagccaactttcttcccccagtttcatgcctttggacttcgctactgtgatgccaaacggatgccttgggggtgggactactcaggttcctccaacctgggagagctgaagctcctgctggaggaagcagtcatgctgcggcgcctcaagtccgacgtcctttcccagctgcctgccaagcagcgcaagatagtggtgattgccccaggacggatcaatgccaggaccagagctgccctggatgctgcagccaaggaaatgaccaccaaggacaaaactaaacagcagcagaaagatgccctcattctcttcttcaacagaacagctgaagctaaaatcccatctgtcattgaatatatcttggacctactggaaagtggaagagagaagtttttagtatttgcacaccataaggtggtcctggacgcaattacgcaagagcttgagagaaagcacgtgcagcacatccgcatcgatggctccacctcatcagctgagcgggaggacctgtgccagcagttccaactgtcggagaggcatgctgtggccgtgctgtccatcaccgctgccaatatgggcctcaccttctcctcggctgacctggtggtgtttgctgagctgttttggaacccaggggtgctgatccaggctgaggaccgcgtgcaccgcattggacagaccagctccgtgggcattcactacctcgtggcaaagggcacagctgatgactacctttggcccctgattcaagagaagattaaagttctggcagaagccgggctttctgagaccaatttttcagaaatgacagaatccactgattacctctacaaggacccaaagcagcagaagatctacgacctattccagaagtcctttgagaaagaaggaagtgatatggagctcctggaagcagcagagtcctttgacccaggaagtgcttcaggaacatctggaagtagttcccagaacatgggagacaccctggatgaaagctcattgacagccagtccacagaagaaaaggagatttgaattttttgataactgggacagctttacgtctcccctgtaaaaggggcaaaaagaaaaaaataaaaagcattttaaaatcatggaattgaaataaaataatgtattttgttttaaaaaaaaaaaa

SEQ ID NO: 64558 - DNA, 2787 bp, Homo sapiens
agcggtggcctagcccttcaggcctggccgctacaataaggctggcgaactcgcagcgcttgaatacccgtggcctaaccgtccactcggaagaccggtcccgctcgggaggctctgcagtcgcgcctggggtcagggccgggggcgaatgtggctcgcgttctaggcctccctgggttggaaaaagactatgttagcaagtgtcacgccatgcttttgccaactttccaattaaaggttgacattcctgcataagcatttctctgtgaaaatgtccttgcctcttacagaggagcagaggaaaaagattgaagagaatcgacaaaaggctctggcccgcagagctgagaagttattggcagaacagcatcagaggactagctcgggcacctccattgctggcaacccattccaggccaagcaaggcccatcccaaaatttcccaagggagtcttgtaagccagtgagccatggtgtcattttcaagcaacagaatctcagtagctcatctaatgctgaccaaagacctcatgattcccacagttttcaggcaaagggaatatggaaaaagccagaagaaatgcccacagcctgcccaggccacagtccacgtagtcaaatggctctcactggaatctctcctcccttggcacaaagtcctccagaggtccctaaacaacagctcttgagttatgagttaggtcaaggtcatgctcaggcttcacctgagatcaggttcacaccctttgctaacccaactcataagcctctggccaaaccaaagagttcccaagagacaccagctcattcctctggacagcctcccagggatgctaagttagaggccaagacagcaaaagcctccccttcggggcagaacatttcttacatccattctagctcagagagtgtaacgcccaggacagaaggaagactccagcagaagtcagggtcctcagtccaaaaaggagtgaactctcagaagggaaagtgcgtaaggaacggcgatcgtttccaggtgttgattgggtacaatgcggaactcattgcagtgtttaagaccctgcccagcaagaattatgatcctgacaccaagacgtggaacttcagcatgaatgactatagtgccctgatgaaagcagcccagagcctccccacggtcaacctgcagcctctggaatgggcctatggcagcagcgagtcaccctccaccagcagtgagggacaggccggccttccatcagctccatccctttcatttgtcaaagggcgatgcatgctcatctccagggcctacttcgaggcagacatcagttattcacaggaccttattgcgctttttaaacagatggattccagaagatatgatgtcaagaccaggaagtggagctttctcttggaagagcacagtaaactaattgcaaaggtgcgctgcctcccacaagttcagctggaccctctgcccacgactctcaccctggcgtttgcttctcagctcaagaagacatctctcagtctcacgccagatgtcccagaggcagacctttctgaagtggaccccaagctcgtgtctaatctgatgccctttcagagagctggagtcaattttgccatagccaaaggaggccgcctgctgctcgctgacgacatgggcctggggaagaccatccaagccatctgcatcgcagccttttaccggaaggagtggccgctcctggtggtggtgccatcctccgtgcgcttcacctgggagcaggccttccttcggtggctgccatctctgagcccagattgcatcaacgtcgtggtgactgggaaggaccgcctgacagctggcctgatcaacattgtcagctttgaccttcttagcaagttggaaaaacagctaaaaaccccttttaaagttgtcatcattgatgaatctcacttcctcaaaaacagtaggactgcccgctgtcgagcagctatgccggtcctaaaggttgccaagagggtgatcctgttgtcgggcacaccagccatgtcccggcccgcagagctctacacgcagatcatcgcagtcaagccaactttcttcccccagtttcatgcctttggacttcgctactgtgatgccaaacggatgccttgggggtgggactactcaggttcctccaacctgggagagctgaagctcctgctggaggaagcagtcatgctgcggcgcctcaagtccgacgtcctttcccagctgcctgccaagcagcgcaagatagtggtgattgccccaggacggatcaatgccaggaccagagctgccctggatgctgcagccaaggaaatgaccaccaaggacaaaactgtgagtccagggctggagacagatttggaagcagacatgtctaggtgtcctttccatgagaggcccttgaaaatgacctggcattctctcagctttcctttctgtaaccttttccctcttccctaggcaagaacagcaagtccatttcattcctcagcctacctagtcagttttgaaaaatctcatattaagttgtggttttatacttgtatagatcgctgttgatggatggccataaagataagcacaggcaacagcagggtggtgatcaatattccgaatccctcaaagaatgtggaaattatgtctactatattttgagaatgcatcagtctagtaacagttgttagaaaattagtcctaacatgtttgatacatatgttaatcctttaaccatactgtgtcatttgtgttagtcaaaataacaagccgacattcttataaca

SEQ ID NO: 64559 - DNA, 3220 bp, Homo sapiens
agcggtggcctagcccttcaggcctggccgctacaataaggctggcgaactcgcagcgcttgaatacccgtggcctaaccgtccactcggaagaccggtcccgctcgggaggctctgcagtcgcgcctggggtcagggccgggggcgaatgtggctcgcgttctaggcctccctgggttggaaaaagactatgttagcaagtgtcacgccatgcttttgccaactttccaattaaaggttgacattcctgcataagcatttctctgtgaaaatgtccttgcctcttacagaggagcagaggaaaaagattgaagagaatcgacaaaaggctctggcccgcagagctgagaagttattggcagaacagcatcagaggactagctcgggcacctccattgctggcaacccattccaggccaagcaaggcccatcccaaaatttcccaagggagtcttgtaagccagtgagccatggtgtcattttcaagcaacagaatctcagtagctcatctaatgctgaccaaagacctcatgattcccacagttttcaggcaaagggaatatggaaaaagccagaagaaatgcccacagcctgcccaggccacagtccacgtagtcaaatggctctcactggaatctctcctcccttggcacaaagtcctccagaggtccctaaacaacagctcttgagttatgagttaggtcaaggtcatgctcaggcttcacctgagatcaggttcacaccctttgctaacccaactcataagcctctggccaaaccaaagagttcccaagagacaccagctcattcctctggacagcctcccagggatgctaagttagaggccaagacagcaaaagcctccccttcggggcagaacatttcttacatccattctagctcagagagtgtaacgcccaggacagaaggaagactccagcagaagtcagggtcctcagtccaaaaaggagtgaactctcagaagggaaagtgcgtaaggaacggcgatcgtttccaggtgttgattgggtacaatgcggaactcattgcagtgtttaagaccctgcccagcaagaattatgatcctgacaccaagacgtggaacttcagcatgaatgactatagtgccctgatgaaagcagcccagagcctccccacggtcaacctgcagcctctggaatgggcctatggcagcagcgagtcaccctccaccagcagtgagggacaggccggccttccatcagctccatccctttcatttgtcaaagggcgatgcatgctcatctccagggcctacttcgaggcagacatcagttattcacaggaccttattgcgctttttaaacagatggattccagaagatatgatgtcaagaccaggaagtggagctttctcttggaagagcacagtaaactaattgcaaaggtgcgctgcctcccacaagttcagctggaccctctgcccacgactctcaccctggcgtttgcttctcagctcaagaagacatctctcagtctcacgccagatgtcccagaggcagacctttctgaagtggaccccaagctcgtgtctaatctgatgccctttcagagagctggagtcaattttgccatagccaaaggaggccgcctgctgctcgctgacgacatgggcctggggaagaccatccaagccatctgcatcgcagccttttaccggaaggagtggccgctcctggtggtggtgccatcctccgtgcgcttcacctgggagcaggccttccttcggtggctgccatctctgagcccagattgcatcaacgtcgtggtgactgggaaggaccgcctgacagctggcctgatcaacattgtcagctttgaccttcttagcaagttggaaaaacagctaaaaaccccttttaaagttgtcatcattgatgaatctcacttcctcaaaaacagtaggactgcccgctgtcgagcagctatgccggtcctaaaggttgccaagagggtgatcctgttgtcgggcacaccagccatgtcccggcccgcagagctctacacgcagatcatcgcagtcaagccaactttcttcccccagtttcatgcctttggacttcgctactgtgatgccaaacggatgccttgggggtgggactactcaggttcctccaacctgggagagctgaagctcctgctggaggaagcagtcatgctgcggcgcctcaagtccgacgtcctttcccagctgcctgccaagcagcgcaagatagtggtgattgccccaggacggatcaatgccaggaccagagctgccctggatgctgcagccaaggaaatgaccaccaaggacaaaactaaacagcagcagaaagatgccctcattctcttcttcaacagaacagctgaagctaaaatcccatctgtcattgaatatatcttggacctactggaaagtggaagagagaagtttttagtatttgcacaccataaggtggtcctggacgcaattacgcaagagcttgagagaaagcacgtgcagcacatccgcatcgatggctccacctcatcagctgagcgggaggacctgtgccagcagttccaactgtcggagaggcatgctgtggccgtgctgtccatcaccgctgccaatatgggcctcaccttctcctcggctgacctggtggtgtttgctgagctgttttggaacccaggggtgctgatccaggctgaggaccgcgtgcaccgcattggacagaccagctccgtgggcattcactacctcgtggcaaagggcacagctgatgactacctttggcccctgattcaagagaagattaaagttctggcagaagccgggctttctgagaccaatttttcagaaatgacagaatccactgattacctctacaaggacccaaagcagcagaagatctacgacctattccagaagtcctttgagaaagaaggaagtgatatggagctcctggaagcagcagagtcctttgacccaggaagtgcttcaggaacatctggaagtagttcccagaacatgggagacaccctggatgaaagctcattgacagccagtccacagaagaaaaggagatttgaattttttgataactgggacagctttacgtctcccctgtaaaaggggcaaaaagaaaaaaataaaaagcattttaaaatcatggaattgaaataaaataatgtattttgttttaaaaaaaaaaaa

SEQ ID NO: 64560 - DNA, 3175 bp, Homo sapiens
agcggtggcctagcccttcaggcctggccgctacaataaggctggcgaactcgcagcgcttgaatacccgtggcctaaccgtccactcggaagaccggtcccgctcgggaggctctgcagtcgcgcctggggttggaaaaagactatgttagcaagtgtcacgccatgcttttgccaactttccaattaaaggttgacattcctgcataagcatttctctgtgaaaatgtccttgcctcttacagaggagcagaggaaaaagattgaagagaatcgacaaaaggctctggcccgcagagctgagaagttattggcagaacagcatcagaggactagctcgggcacctccattgctggcaacccattccaggccaagcaaggcccatcccaaaatttcccaagggagtcttgtaagccagtgagccatggtgtcattttcaagcaacagaatctcagtagctcatctaatgctgaccaaagacctcatgattcccacagttttcaggcaaagggaatatggaaaaagccagaagaaatgcccacagcctgcccaggccacagtccacgtagtcaaatggctctcactggaatctctcctcccttggcacaaagtcctccagaggtccctaaacaacagctcttgagttatgagttaggtcaaggtcatgctcaggcttcacctgagatcaggttcacaccctttgctaacccaactcataagcctctggccaaaccaaagagttcccaagagacaccagctcattcctctggacagcctcccagggatgctaagttagaggccaagacagcaaaagcctccccttcggggcagaacatttcttacatccattctagctcagagagtgtaacgcccaggacagaaggaagactccagcagaagtcagggtcctcagtccaaaaaggagtgaactctcagaagggaaagtgcgtaaggaacggcgatcgtttccaggtgttgattgggtacaatgcggaactcattgcagtgtttaagaccctgcccagcaagaattatgatcctgacaccaagacgtggaacttcagcatgaatgactatagtgccctgatgaaagcagcccagagcctccccacggtcaacctgcagcctctggaatgggcctatggcagcagcgagtcaccctccaccagcagtgagggacaggccggccttccatcagctccatccctttcatttgtcaaagggcgatgcatgctcatctccagggcctacttcgaggcagacatcagttattcacaggaccttattgcgctttttaaacagatggattccagaagatatgatgtcaagaccaggaagtggagctttctcttggaagagcacagtaaactaattgcaaaggtgcgctgcctcccacaagttcagctggaccctctgcccacgactctcaccctggcgtttgcttctcagctcaagaagacatctctcagtctcacgccagatgtcccagaggcagacctttctgaagtggaccccaagctcgtgtctaatctgatgccctttcagagagctggagtcaattttgccatagccaaaggaggccgcctgctgctcgctgacgacatgggcctggggaagaccatccaagccatctgcatcgcagccttttaccggaaggagtggccgctcctggtggtggtgccatcctccgtgcgcttcacctgggagcaggccttccttcggtggctgccatctctgagcccagattgcatcaacgtcgtggtgactgggaaggaccgcctgacagctggcctgatcaacattgtcagctttgaccttcttagcaagttggaaaaacagctaaaaaccccttttaaagttgtcatcattgatgaatctcacttcctcaaaaacagtaggactgcccgctgtcgagcagctatgccggtcctaaaggttgccaagagggtgatcctgttgtcgggcacaccagccatgtcccggcccgcagagctctacacgcagatcatcgcagtcaagccaactttcttcccccagtttcatgcctttggacttcgctactgtgatgccaaacggatgccttgggggtgggactactcaggttcctccaacctgggagagctgaagctcctgctggaggaagcagtcatgctgcggcgcctcaagtccgacgtcctttcccagctgcctgccaagcagcgcaagatagtggtgattgccccaggacggatcaatgccaggaccagagctgccctggatgctgcagccaaggaaatgaccaccaaggacaaaactaaacagcagcagaaagatgccctcattctcttcttcaacagaacagctgaagctaaaatcccatctgtcattgaatatatcttggacctactggaaagtggaagagagaagtttttagtatttgcacaccataaggtggtcctggacgcaattacgcaagagcttgagagaaagcacgtgcagcacatccgcatcgatggctccacctcatcagctgagcgggaggacctgtgccagcagttccaactgtcggagaggcatgctgtggccgtgctgtccatcaccgctgccaatatgggcctcaccttctcctcggctgacctggtggtgtttgctgagctgttttggaacccaggggtgctgatccaggctgaggaccgcgtgcaccgcattggacagaccagctccgtgggcattcactacctcgtggcaaagggcacagctgatgactacctttggcccctgattcaagagaagattaaagttctggcagaagccgggctttctgagaccaatttttcagaaatgacagaatccactgattacctctacaaggacccaaagcagcagaagatctacgacctattccagaagtcctttgagaaagaaggaagtgatatggagctcctggaagcagcagagtcctttgacccaggaagtgcttcaggaacatctggaagtagttcccagaacatgggagacaccctggatgaaagctcattgacagccagtccacagaagaaaaggagatttgaattttttgataactgggacagctttacgtctcccctgtaaaaggggcaaaaagaaaaaaataaaaagcattttaaaatcatggaattgaaataaaataatgtattttgttttaaaaaaaaaaaa

SEQ ID NO: 64561 - DNA, 2794 bp, Homo sapiens
agcggtggcctagcccttcaggcctggccgctacaataaggctggcgaactcgcagcgcttgaatacccgtggcctaaccgtccactcggaagaccggtcccgctcgggaggctctgcagtcgcgcctggggtcagggccgggggcgaatgtggctcgcgttctaggcctccctgggttggaaaaagactatgttagcaagtgtcacgccatgcttttgccaactttccaattaaaggttgacattcctgcataagcatttctctgtgaaaatgtccttgcctcttacagaggagcagaggaaaaagattgaagagaatcgacaaaaggctctggcccgcagagctgagaagttattggcagaacagcatcagaggactagctcgggcacctccattgctggcaacccattccaggccaagcaaggcccatcccaaaatttcccaagggagtcttgtaagccagtgagccatggtgtcattttcaagcaacagaatctcagtagctcatctaatgctgaccaaagacctcatgattcccacagttttcaggcaaagggaatatggaaaaagccagaagaaatgcccacagcctgcccaggccacagtccacgtagtcaaatggctctcactggaatctctcctcccttggcacaaagtcctccagaggtccctaaacaacagctcttgagttatgagttaggtcaaggtcatgctcaggcttcacctgagatcaggttcacaccctttgctaacccaactcataagcctctggccaaaccaaagagttcccaagagacaccagctcattcctctggacagcctcccagggatgctaagttagaggccaagacagcaaaagcctccccttcggggcagaacatttcttacatccattctagctcagagagtgtaacgcccaggacagaaggaagactccagcagaagtcagggtcctcagtccaaaaaggagtgaactctcagaagggaaagtgcgtaaggaacggcgatcgtttccaggtgttgattgggtacaatgcggaactcattgcagtgtttaagaccctgcccagcaagaattatgatcctgacaccaagacgtggaacttcagcatgaatgactatagtgccctgatgaaagcagcccagagcctccccacggtcaacctgcagcctctggaatgggcctatggcagcagcgagtcaccctccaccagcagtgagggacaggccggccttccatcagctccatccctttcatttgtcaaagggcgatgcatgctcatctccagggcctacttcgaggcagacatcagttattcacaggaccttattgcgctttttaaacagatggattccagaagatatgatgtcaagaccaggaagtggagctttctcttggaagagcacagtaaactaattgcaaaggtgcgctgcctcccacaagttcagctggaccctctgcccacgactctcaccctggcgtttgcttctcagctcaagaagacatctctcagtctcacgccagatgtcccagaggcagacctttctgaagtggaccccaagctcgtgtctaatctgatgccctttcagagagctggagtcaattttgccatagccaaaggaggccgcctgctgctcgctgacgacatgggcctggggaagaccatccaagccatctgcatcgcagccttttaccggaaggagtggccgctcctggtggtggtgccatcctccgtgcgcttcacctgggagcaggccttccttcggtggctgccatctctgagcccagattgcatcaacgtcgtggtgactgggaaggaccgcctgacagctggcctgatcaacattgtcagctttgaccttcttagcaagttggaaaaacagctaaaaaccccttttaaagttgtcatcattgatgaatctcacttcctcaaaaacagtaggactgcccgctgtcgagcagctatgccggtcctaaaggttgccaagagggtgatcctgttgtcgggcacaccagccatgtcccggcccgcagagctctacacgcagatcatcgcagtcaagccaactttcttcccccagtttcatgcctttggacttcgctactgtgatgccaaacggatgccttgggggtgggactactcaggttcctccaacctgggagagctgaagctcctgctggaggaagcagtcatgctgcggcgcctcaagtccgacgtcctttcccagctgcctgccaagcagcgcaagatagtggtgattgccccaggacggatcaatgccaggaccagagctgccctggatgctgcagccaaggaaatgaccaccaaggacaaaactaaacagcagcagaaagatgccctcattctcttcttcaacagaacagctgaagctaaaatcccatctgtcattgaatatatcttggacctactggaaagtggaagagagaagtttttagtatttgcacaccataaggtggtcctggacgcaattacgcaagagcttgagagaaaggtgagctccctttgaaattcaccatgggctacttttgccatgtcccaagttgttctaagcaggcttaggtcagatccaagcaaagtgagaccgatggcttccggaagcattgctgaagactttctgaagaagagttcttgcttgtagaaccacagtggggtcaaaatgtttccccagccatgtcattttaacttcctccatgctccaaatagatatcccaggagtcttgctttaggaacatctcccaggggctgttccattattctgcataaataatta

SEQ ID NO: 64562 - DNA, 5724 bp, Homo sapiens
  misc_feature (1173)..(1173): n is a, c, g, or t
  misc_feature (1448)..(1448): n is a, c, g, or t
  misc_feature (4486)..(4486): n is a, c, g, or t
cgcctgaacacaaggaaataaatcatttaaatgatcagtggctcgatttgtgccgtcagtctaacaacctgtgcttgcaaagggaagaggatcttcagagaacaagagattaccatgactgtatgaatgttgttgaagtgttcctagaaaaatttactacagaatgggataacttggccagatctgatgcagagagtacagctgtccacctggaagctttgaaaaagttagcattggcattgcaggagagaaagtatgctattgaagatctgaaagatcaaaagcagaaaatgatagagcatctgaatttagatgacaaggagttagtcaaagaacagacgagtcatttagagcaacgttggtttcagcttgaggacctcattaaaaggaaaatccaagtgtcagtcaccaacttggaggagttaaatgtggtgcagtccagatttcaggagctaatggagtgggcagaagagcaacaacccaacatcgccgaggcccttaagcagagccctcctccagatatggctcagaaccttctcatggatcacctggccatctgcagtgaactggaggccaagcagatgctcctgaaatcgcttataaaggacgcagacagggtcatggcagatcttggtctcaatgagcgacaggtcatccagaaggctctctctgatgcacaaagccacgtgaattgtctcagtgacttagtgggccagcgaagaaagtacttaaacaaagccttgtccgagaaaacccagtttctcatggcagtgttccaggccaccagccaaattcagcaacatgagcgaaagataatgttccgtgaacacatctgtctgttaccagatgatgtgagcaaacaagtcaaaacatgtaagagtgcacaagccagcctcaagacttaccaaaatgaagtcactggactttgggcccagggtcgcgaactaatgaaggaagtcacagagcaggaaaagagtgaagtgctggggaagcttcaggaattgcagagtgtctatgacagtgttttacaaaagtgcagtcaccggttacaagaactagagaagaatttggtttctaggaagcattttaaggaagattttgataaagcttgccactggctaaaacaagcagatattgttacatttcctgaaatcaacctaatgaatgagagtnctgagcttcatacacaactggctaaataccaaaacattcttgaacaatctccagaatatgaaaatcttctacttacgctgcagagaactgggcagaccatattaccatcgctgaatgaagtcgatcattcctacctcagtgaaaagctaaatgctttgcctcgacaatttaatgtaattgttgccttggctaaagacaagttctataaagtccaggaagcaattcttgctcggaaggaatatgcttccttgattgagttgacaacccagtctctnagtgaacttgaagcccaattcttgaggatgagcaaagttcccaccgacctggccgttgaggaggctctttctctgcaagatggttgcagagccattctggacgaggtggcgggccttggggaggcggtggatgaactgaaccagaaaaaagaaggttttcgcagcacaggtcagccttggcagccagacaagatgctgcaccttgtcaccttatatcacaggctgaagcgacaaacagaacagagggttagcttattagaagacaccaccagtgcttaccaagaacacgagaagatgtgccaacagctggagagacaactgaagtctgtaaaagaggagcagtccaaagtgaatgaggaaacgctgcctgcagaggagaagctcaaaatgtatcactccctggcaggaagtctccaggactcagggattgtactgaaacgagtaaccatacatcttgaagatcttgccccacaccttgaccccttggcttatgagaaagccaggcatcagatccagtcctggcaaggggagttaaaactgttgacttctgccattggtgagacggtgacagaatgtgagagccgaatggtgcagagtatagacttccagactgagatgagtcgctccctggactggctgaggagagtgaaggcagagctcagtgggccggtgtacctagacctcaacctgcaggacatccaagaggaaatcagaaaaatccaaattcatcaggaagaggtccagtccagcttgagaatcatgaatgcgctgagtcacaaggaaaaggagaagttcacaaaggccaaggagctgatttctgcggatttagaacacagcctcgctgagctctcagagctggatggagacatccaggaagccttacgcaccagacaggctaccttgactgaaatatatagccagtgtcaaaggtattatcaggtatttcaagcagccaatgactggcttgaggatgcccaagaaatgttacagctggcaggcaatggcctagacgtggagagcgcagaggaaaatctcaaaagccacatggaatttttcagtacagaggatcagttccatagtaacctggaggagctccacagcctggtagccaccctggacccactcatcaagccaaccggcaaagaagacctagaacagaaagtggcttctctggaactcaggagccagaggatgagccgggactctggtgcccaagtggatctcttgcagagatgcacagctcaatggcacgattaccagaaagcaagggaagaggttattgaattgatgaatgatacagaaaagaaattgtctgagttttctttgttgaagacttcgtctagtcatgaagcggaagaaaaattgtcagaacacaaggctttagtgtcagtggttaactctttccatgagaaaattgtggcccttgaggaaaaagcttcacaactggagaaaaccggaaatgatgccagcaaagccaccctgagcaggtcaatgaccaccgtctggcagcgctggacacgccttcgagctgtggcccaggaccaggagaagatcctggaagatgcagtggatgagtggacgggctttaacaacaaggttaaaaaggccactgaaatgattgatcagctgcaagataagttacctggaagttcagcagagaaagcatcgaaagcagagctcttaactcttcttgaataccacgacacgttcgttctggagctggagcagcagcagtcggccttgggcatgctgcggcagcaaaccctgagcatgctccaggatggagccgccccaacccctggggaagagcctccgctcatgcaggaaatcaccgccatgcaagatcggtgcctgaacatgcaggagaaagtgaagactaatggaaagttggtgaagcaagagctgaaggaccgagaaatggtggagactcagatcaattctgtgaaatgttgggttcaggaaacgaaagaatatttagggaatccaacaatagaaatagatgctcaacttgaagaacttcagattctcctaacagaagccacaaatcaccgacagaacattgaaaaaatggcagaagaacagaaggagaagtacttaggtctttataccatattaccttctgaactctcccttcagttggctgaagtggcgttagatctaaagatccgagatcagatccaagacaaaataaaagaagttgagcagagcaaggccacgagccaggaactcagccggcaaattcagaagttagctaaagacctcacaactattctaactaagctgaaagcgaagacagataatgtagttcaagctaaaactgaccaaaaggtgctgggagaggaattagatggctgtaattcaaagttaatggaattagatgcagcagtacagaaattcttggaacagaatggccaactgggtaagccactggccaagaagataggaaaactgactgaacttcaccagcagaccattagacaagctgagaatcggctctccaagctcaatcaggcagcatcacatttagaagaatacaatgaaatgcttgaattaattttgaagtggattgaaaaagctaaagtcttggctcatggaactattgcatggaattctgcaagccagcttcgggaacaatatattttgcatcaggtaaccttaggaaaaataatctttaaaaagtaaccaagggcaatttgatttaactgggtagactgacacaacacttagagggctgtgatgtaaaatttttggagctaccagataaaaagaatgctaaggtacccctaagttgttcagtagttggacagaaaggagcttctcatgaaatttcatgaaattgaataaataaatatccttgatcttccctaaacctaccttacaccaagacccaaaccaatcagccttgtagaactcattttctgtagcttctttgaaataattatctgcagggatctggtgggaaattctttcctgtgaagagatgcaatgaagtgtggaaagattctagactccacactcagactggtgggaaaaccaanctccgccatgcagggctgtgtgatttggagcagaatgctttgcctctctgaattctgtcttctcatcatttgtatgaagacgtaaataatattcgtatttcagacttatgagatcaagtggtttaaggtacacacgtgcaaacgtctgcctggcacatgcaggtgctcagtgggagatctcccgcctcctccctcagccctcacccaggcctgtcatctggccttccacaggaggtcgggcagcccagagcaagccatgagtccacatcacatgctggctatgttagttcatttcctctgaagttacatgagaaaaatgttccttttctgtcagtcacgtcatccaggaaattatttcatccttttgtaacttaagcttaaattagacacagatagttaataggctagttatcatataataaaatatagggtgacttttataggagttacatgggtatcgagtattctagatttttgtctcttatattatttatgtatccttgtggcctttaaatgaatccctgtttccattcttgtttacagggttctagatcaaagcctcatttttccatttttggaatgctttaacagcttctaatttttccctatattcacagtctttcttctctgatcaatcttgcgtattcttcccacaatgtctttcttaagcaactccaatcttttgctttaagatatgcttagatatgaacagacaggacttaagttaccactgatttgaaaacaatgaaaaaaagccaacatccttagaagtctagaaatgcaaatttcagcaaaaaaagagaggaagaaagacaaacttaactgtcacattcatactgtttctttcaagttcatatttaaggaagtgagagctctcaaacattgctggtatcctggtaaaatctctttgaaaaataattggcaaaatgtatggtgattgtcaaaaatgttgctactctgggccacgtgcggtggctcacacctgtaatcccagcactttgggaggccgaggtgggtggatcacaaggtcaggagttcaagaccagcttggccaatatggtgaaaccccatctctactaaaaatacaaaagttagctgggcatggtggtgggcacctgtagtcccagctactcaggaatctgaggcaggagaatcgcttgaactcgggaggtggaggttgcagtgagccaagatcatgccactgcactccagcctgggtgacagtgagactccatctc

SEQ ID NO: 64563 - DNA, 3262 bp, Homo sapiens
  misc_feature (1173)..(1173): n is a, c, g, or t
  misc_feature (1448)..(1448): n is a, c, g, or t
  misc_feature (3222)..(3222): n is a, c, g, or t
cgcctgaacacaaggaaataaatcatttaaatgatcagtggctcgatttgtgccgtcagtctaacaacctgtgcttgcaaagggaagaggatcttcagagaacaagagattaccatgactgtatgaatgttgttgaagtgttcctagaaaaatttactacagaatgggataacttggccagatctgatgcagagagtacagctgtccacctggaagctttgaaaaagttagcattggcattgcaggagagaaagtatgctattgaagatctgaaagatcaaaagcagaaaatgatagagcatctgaatttagatgacaaggagttagtcaaagaacagacgagtcatttagagcaacgttggtttcagcttgaggacctcattaaaaggaaaatccaagtgtcagtcaccaacttggaggagttaaatgtggtgcagtccagatttcaggagctaatggagtgggcagaagagcaacaacccaacatcgccgaggcccttaagcagagccctcctccagatatggctcagaaccttctcatggatcacctggccatctgcagtgaactggaggccaagcagatgctcctgaaatcgcttataaaggacgcagacagggtcatggcagatcttggtctcaatgagcgacaggtcatccagaaggctctctctgatgcacaaagccacgtgaattgtctcagtgacttagtgggccagcgaagaaagtacttaaacaaagccttgtccgagaaaacccagtttctcatggcagtgttccaggccaccagccaaattcagcaacatgagcgaaagataatgttccgtgaacacatctgtctgttaccagatgatgtgagcaaacaagtcaaaacatgtaagagtgcacaagccagcctcaagacttaccaaaatgaagtcactggactttgggcccagggtcgcgaactaatgaaggaagtcacagagcaggaaaagagtgaagtgctggggaagcttcaggaattgcagagtgtctatgacagtgttttacaaaagtgcagtcaccggttacaagaactagagaagaatttggtttctaggaagcattttaaggaagattttgataaagcttgccactggctaaaacaagcagatattgttacatttcctgaaatcaacctaatgaatgagagtnctgagcttcatacacaactggctaaataccaaaacattcttgaacaatctccagaatatgaaaatcttctacttacgctgcagagaactgggcagaccatattaccatcgctgaatgaagtcgatcattcctacctcagtgaaaagctaaatgctttgcctcgacaatttaatgtaattgttgccttggctaaagacaagttctataaagtccaggaagcaattcttgctcggaaggaatatgcttccttgattgagttgacaacccagtctctnagtgaacttgaagcccaattcttgaggatgagcaaagttcccaccgacctggccgttgaggaggctctttctctgcaagatggttgcagagccattctggacgaggtggcgggccttggggaggcggtggatgaactgaaccagaaaaaagaaggttttcgcagcacaggtcagccttggcagccagacaagatgctgcaccttgtcaccttatatcacaggctgaagcgacaaacagaacagagggttagcttattagaagacaccaccagtgcttaccaagaacacgagaagatgtgccaacagctggagagacaactgaagtctgtaaaagaggagcagtccaaagtgaatgaggaaacgctgcctgcagaggagaagctcaaaatgtatcactccctggcaggaagtctccaggactcagggattgtactgaaacgagtaaccatacatcttgaagatcttgccccacaccttgaccccttggcttatgagaaagccaggcatcagatccagtcctggcaaggggagttaaaactgttgacttctgccattggtgagacggtgacagaatgtgagagccgaatggtgcagagtatagacttccagactgagatgagtcgctccctggactggctgaggagagtgaaggcagagctcagtgggccggtgtacctagacctcaacctgcaggacatccaagaggaaatcagaaaaatccaaattcatcaggaagaggtccagtccagcttgagaatcatgaatgcgctgagtcacaaggaaaaggagaagttcacaaaggccaaggagctgatttctgcggatttagaacacagcctcgctgagctctcagagctggatggagacatccaggaagccttacgcaccagacaggctaccttgactgaaatatatagccagtgtcaaaggtattatcaggtatttcaagcagccaatgactggcttgaggatgcccaagaaatgttacagctggcaggcaatggcctagacgtggagagcgcagaggaaaatctcaaaagccacatggaatttttcagtacagaggatcagttccatagtaacctggaggagctccacagcctggtagccaccctggacccactcatcaagccaaccggcaaagaagacctagaacagaaagtggcttctctggaactcaggagccagaggatgagccgggactctggtgcccaagtggatctcttgcagagatgcacagctcaatggcacgattaccagaaagcaagggaagaggttattgaattgatgaatgatacagaaaagaaattgtctgagttttctttgttgaagacttcgtctagtcatgaagcggaagaaaaattgtcagaacacaaggctttagtgtcagtggttaactctttccatgagaaaattgtggcccttgaggaaaaagcttcacaactggagaaaaccggaaatgatgccagcaaagccaccctgagcaggtcaatgaccaccgtctggcagcgctggacacgccttcgagctgtggcccaggaccaggagaagatcctggaagatgcagtggatgagtggacgggctttaacaacaaggttaaaaaggccactgagattgttttagaaaaccaacagcaaaacactgacaaggtacataaatacagattggacattttagggtaaattcactgtatttcctacttgcttgtaggaaaccgagtaaagtggaaaagctgtcctgatcatatggcatgcacaccagactgcaaaaggncgtccacactatttaacaggactgtggcaaaatagcttta

SEQ ID NO: 64564 - DNA, 342 bp, Homo sapiens
aaatatacagccttgtctataacagtccccttagaaggttcccagaaatttcttattttgatcttttcttcagattctcctaacagaagccacaaatcaccgacagaacattgaaaaaatggcagaagaacagaaggagaagtacttaggtctttataccatattaccttctgaactctcccttcagttggctgaagtggcgttagatctaaagatccgagatcaggtaaacctatgatcaagaaagagtgtctttccattttgtttatagggtcagtcctcttgtgtgagagttcttgattttcacaataatgtcttcttggagacagagttaaaaaaaat

SEQ ID NO: 64565 - DNA, 682 bp, Homo sapiens
ggcgtcactgcacttctgggcggcagagcaagactccgtctcaaaacaacaacaacaacaacaacaacaaagctgactgcatcttccatctgcataaaaatagcaagaactttcataattcttactctgtatacttctcaatgtttcacacatgttaactcacttaatccctgcaacaactttatgtgaggattactattataatctcctctttacaggtgagaactgaggcatagagaggttaaataacttgcttggagttaaactgctagtaagtgatgaagcaggatattaacaatttgatatatccctgcttattctgacagtcttgtctctggccacttgtgccttatactctatcctccagcaatggcaagctacatttcagtctcaccccacccgtattcactgtgcccccttgccatagttttgctcctgctgggagcctggcctggaatgccttccccagttgactcctttgcaaattcttactcctcctttcagaacttggccccagcatcacctcctccttctgtcagtcttcccacctggctctctgtgttgcccttgcattctgggtgcacctccaactattggaggggctgctttgtattaggtattagatggagaattgaaaccaagatctagaggtggtcctcaggattctatggtcatttaggaa

SEQ ID NO: 64566 - DNA, 408 bp, Homo sapiens
tttcaggatcagcgcgcctatgctgggcatggtgtggctgcaccagcacccctgtgagacgctcagagacacacggtccctccaggccagaatccgattctgcattttcacaggactcagtgactcacacttgctggagcaggagaagcaatgccctaaaaagtttcggcaattcacacatcaaaactctagagagttgttggaagtgggaaatgaacatttggggagaggctgagatttcagcaagacctcttgggaacttgccctttgtaattctaaagcggctttgctggcttctgaatgtaaacttgaatcgtgtgagttctgatccactcataacattaccgtgctttatgtactaaatgaaagtgcaatttgtttgtacactgattacagttttacccgctg

SEQ ID NO: 64567 - DNA, 1549 bp, Homo sapiens
  misc_feature (383)..(383): n is a, c, g, or t
  misc_feature (411)..(411): n is a, c, g, or t
  misc_feature (451)..(451): n is a, c, g, or t
  misc_feature (547)..(547): n is a, c, g, or t
  misc_feature (1531)..(1531): n is a, c, g, or t
atttctctcttctcacattttactataagcacataggaagagccaagctgcacctttaatactttgcttagaaatagctccagctaaatatgcaatttcatcacttgcgagtttcactttccacagaatcctagaccacaaatacagttcaacaagttctttaccactctgtaacaaggattgtttttccttcagtttctaataacatattatttctcatttctatctgagacctcatcagaatggactttacctcatattttaccaatagtctgttcatggttacttaggtattctttaagaagattgaggctttttctctagctcccctcttttctttctttgtttttgtttgtttgttttattttgtttttcaagacagngtcttgctctgttgcccaggctgaagtncagtggcgtgatcttggctcactgcaacctccgcctcccnggttcaagtgattctcctgccttagcctcctgagtagcggggattacaggcacctgccaccatgcctgactaatttttgtgtttttagtagagatngggtttcatcatgttgaccaggctggtctcaaactcctgacctcaggtgatccacccgccttggcctcccaaagtgctgggattacaggtgtgaaccactacacccggcctcctcttttctttctgattcctcaccagaatctcttttaaaaatgtttaaggcaatctaggctttttctactatgtacttcaagtattcgtctagtctccacccattacctatttataaagctgcttccacatttttaggtatttgttatagtaggaccccccattctcagtaccaatttctgtcttatgccacttgggctgatacaacaaaaatatcatggcctaggtgctttataaataacaaaaagttatttctcacagttctgaaaagttcagatcagagcactagcagattcagtgtctggtgagggtctgcttctctctgggtcctcatgttgctgaagggccacaggagctctctggaatctcgttaataaggttactaatctcattcatgagagctctgccctcatgacctaatcagctaccaaaggccccatctcctaatacgatcacattaaggattaagatttcaatatgagttttgttggggacatatgttatagcatcttcccatattgtgggcatttaggtggtttctatgtgttttttattaataatgccagcaggaacaaagttttccttattttatattatttatttaggatttgttctttgaaatagaattaacagatcaaagaatgtggacatttaaggcttttagtacatataatgaaattgctgatggcacagttgttttggaaagcaatagatgagagtacctgttttaccatggtcttaccagcattattataattttaaaaattgttatctaggtggggggcagtggctcaagcctgtaattccaaaactttgagaagctgaggtgggaagacttgaggccaggagtttgagaccagcctgggaaacatngcgagatcccatctctac

SEQ ID NO: 64568 - DNA, 384 bp, Homo sapiens
gccagcaagacagtgaggctgcagcagcatggggacagagtgcagaaagaggtcgcagaagccttggaagaacgtcattcagtcatacaaggacaccctgatgcttgcgctgcggtcctttccaagtccacggggcgttgttcctttgtgtcaacaccagataagactcatggggattgctgtcagtgttgtgtatgttataataccagggaccctcacatggctgtgttagattctaaccaatagaaaataataagtcaaagcaaagaccgttactgattccttccattgtttctttagagactttggtttagtgctctaaactttctgattatcagatcttatgtgtttgctaatatataaaataacaaattaggcataatg

SEQ ID NO: 64569 - DNA, 283 bp, Homo sapiens
aattcagacctaggctttccatctcccatgagcgtctgcttctagtcactcattttctcttccctgtctcatttggccttcttaatatctcaccccttgctaactgctttctccaatttctcacagctgagatttagaactcttgcagtatctttccattccaaatccttatagtaagaaggacaaattcattttttataaaatacaatgcacaaaatattaatcacaaatgatgaaaagtctccttcaagttcttacctcaaattcctaagccatcatgtgg

SEQ ID NO: 64570 - DNA, 1549 bp, Homo sapiens
cgtgcggcgcgcacaggcaggaggttgcagttgggcgctcagcagctgtggcagccggttgaggtctggcagtagcgttgggctgaagcagcggagttcgccatgcgcgagtgtatctctatccacgtggggcaggcgggtgtccagatcggcaatgcctgctgggaactgtactgccttgaacatggaattcagcccgatggccaaatgccaagtgataaaaccattggtggcggggacgactccttcaacacgttcttcagtgagactggagctggcaagcacgtgcccagagcagtgtttgtggacctggagcccactgtggtcgatgaagtgcgcacagggacctacaggcagctcttccacccggagcagctgatcaccgggaaggaagatgcagccaataattacgccaggggccattacaccatcggcaaggagattgttgacctagtcctggaccggatccgcaaactggcggatctgtgcacaggactgcagggcttcctcatcttccacagctttgggggcggcactggctctgggttcgcatctctgctcatggagcggctctcagtggattacggcaagaagtccaagctagagtttgccatttacccagccccccaggtctccacagccgtggtggagccctacaactccatcctgaccacccacacgaccctggaacattctgactgtgccttcatggtcgacaatgaagccatctatgacatatgtcggcgcaacctggacattgaacgtcccacgtacaccaacctcaatcgcctgattgggcagatcgtgtcctccatcacagcctccctgcgatttgatggggccctgaatgtggacttgacggaattccagaccaacctagtgccgtacccccgcatccacttccccctggccacctatgccccagtcatctcagctgagaaggcctaccacgagcagctgtctgtggccgagatcaccaatgcctgcttcgagccagccaatcaaatggtcaagtgtgaccctcgccacggcaagtacatggcctgctgcatgttgtacaggggggacgtggtccccaaagacgtcaacgcggccatcgccaccatcaagaccaagcgcaccatccagtttgtggattggtgcccgactggatttaaggtgggcattaactaccagccccccacagtggtccccgggggagacctggccaaggtgcagcgggccgtgtgcatgctgagcaacaccacggccattgcggaggcctgggcccgcctggaccataagttcgatctcatgtatgccaagcgggcctttgtgcactggtacgtgggcgaaggcatggaagagggagagttctctgaggcccgcgaggacctggcagctctagagaaggattatgaagaggtgggcgtggattccgtggaagctgaggctgaagaaggcgaagaatactgaggggagggtgtggtgggttctcccctgccacccccgggatggctgcttccaagttgtttgcaattaaaggttctgtataaaaccaaaaaaactg

SEQ ID NO: 64571 - DNA, 1278 bp, Homo sapiens
tgtgcattctcttatgctggtgcactagagtcttgacctgcatcttaggcatagaagatgaagtgcgcacagggacctacaggcagctcttccacccggagcagctgatcaccgggaaggaagatgcagccaataattacgccaggggccattacaccatcggcaaggagattgttgacctagtcctggaccggatccgcaaactggcggatctgtgcacaggactgcagggcttcctcatcttccacagctttgggggcggcactggctctgggttcgcatctctgctcatggagcggctctcagtggattacggcaagaagtccaagctagagtttgccatttacccagccccccaggtctccacagccgtggtggagccctacaactccatcctgaccacccacacgaccctggaacattctgactgtgccttcatggtcgacaatgaagccatctatgacatatgtcggcgcaacctggacattgaacgtcccacgtacaccaacctcaatcgcctgattgggcagatcgtgtcctccatcacagcctccctgcgatttgatggggccctgaatgtggacttgacggaattccagaccaacctagtgccgtacccccgcatccacttccccctggccacctatgccccagtcatctcagctgagaaggcctaccacgagcagctgtctgtggccgagatcaccaatgcctgcttcgagccagccaatcaaatggtcaagtgtgaccctcgccacggcaagtacatggcctgctgcatgttgtacaggggggacgtggtccccaaagacgtcaacgcggccatcgccaccatcaagaccaagcgcaccatccagtttgtggattggtgcccgactggatttaaggtgggcattaactaccagccccccacagtggtccccgggggagacctggccaaggtgcagcgggccgtgtgcatgctgagcaacaccacggccattgcggaggcctgggcccgcctggaccataagttcgatctcatgtatgccaagcgggcctttgtgcactggtacgtgggcgaaggcatggaagagggagagttctctgaggcccgcgaggacctggcagctctagagaaggattatgaagaggtgggcgtggattccgtggaagctgaggctgaagaaggcgaagaatactgaggggagggtgtggtgggttctcccctgccacccccgggatggctgcttccaagttgtttgcaattaaaggttctgtataaaaccaaaaaaactg

SEQ ID NO: 64572 - DNA, 961 bp, Homo sapiens
cgtgcggcgcgcacaggcaggaggttgcagttgggcgctcagcagctgtggcagccggttgaggtctggcagtagcgttgggctgaagcagcggagttcgccatgcgcgagtgtatctctatccacgtggggcaggcgggtgtccagatcggcaatgcctgctgggaactgtactgccttgaacatggaattcagcccgatggccaaatgccaagtgataaaaccattggtggcggggacgactccttcaacacgttcttcagtgagactggagctggcaagcacgtgcccagagcagtgtttgtggacctggagcccactgtggtcgatgaagtgcgcacagggacctacaggcagctcttccacccggagcagctgatcaccgggaaggaagatgcagccaataattacgccaggggccattacaccatcggcaaggagattgttgacctagtcctggaccggatccgcaaactggcggatctgtgcacaggactgcagggcttcctcatcttccacagctttgggggcggcactggctctgggttcgcatctctgctcatggagcggctctcagtggattacggcaagaagtccaagctagagtttgccatttacccagccccccaggtctccacagccgtggtggagccctacaactccatcctgaccacccacacgaccctggaacattctgactgtgccttcatggtcgacaatgaagccatctatgacatatgtcggcgcaacctggacattgaacgtcccacgtacaccaacctcaatcgcctgattgggcagatcgtgtcctccatcacagcctccctgcgatttgatggggccctgaatgtggacttgacggaattccagaccaacctagtgccgtaccccctgccacccccgggatggctgcttccaagttgtttgcaattaaaggttctgtataaaaccaaaaaaactg

SEQ ID NO: 64573 - DNA, 1124 bp, Homo sapiens
cgtgcggcgcgcacaggcaggaggttgcagttgggcgctcagcagctgtggcagccggttgaggtctggcagtagcgttgggctgaagcagcggagttcgccatgcgcgagtgtatctctatccacgtggggcaggcgggtgtccagatcggcaatgcctgctgggaactgtactgccttgaacatggaattcagcccgatggccaaatgccaagtgataaaaccattggtggcggggacgactccttcaacacgttcttcagtgagactggagctggcaagcacgtgcccagagcagtgtttgtggacctggagcccactgtggtcgatgaagtgcgcacagggacctacaggcagctcttccacccggagcagctgatcaccgggaaggaagatgcagccaataattacgccaggggccattacaccatcggcaaggagattgttgacctagtcctggaccggatccgcaaactggcggatctgtgcacaggactgcagggcttcctcatcttccacagctttgggggcggcactggctctgggttcgcatctctgctcatggagcggctctcagtggattacggcaagaagtccaagctagagtttgccatttacccagccccccaggtctccacagccgtggtggagccctacaactccatcctgaccacccacacgaccctggaacattctgactgtgccttcatggtcgacaatgaagccatctatgacatatgtcggcgcaacctggacattgaacgtcccacgtacaccaacctcaatcgcctgattgggcagatcgtgtcctccatcacagcctccctgcgatttgatggggccctgaatgtggacttgacggaattccagaccaacctagtgccgtacccccgcatccacttccccctggccacctatgccccagtcatctcagctgagaaggcctaccacgagcactctagagaaggattatgaagaggtgggcgtggattccgtggaagctgaggctgaagaaggcgaagaatactgaggggagggtgtggtgggttctcccctgccacccccgggatggctgcttccaagttgtttgcaattaaaggttctgtataaaaccaaaaaaactg

SEQ ID NO: 64574 - DNA, 543 bp, Homo sapiens
agacaagtaataagagaaatgacaaaggatcaaaattacaataattaaacattaaaataaatgttgtaataattaattatgataaataaactgggtagatttagaaggatcctttagccacctcctgtgaccttgtctctcactgccgcccctaacatttgctccagagctccagtacagtacagaaactgtttcctgaatgtcccacgtggtttcattcctcagggcaccaacaccagctcaaattgtccttatcctgtgtgtttgttttttttggttattatctgtttcttccactggaatgttggctctttaaggttgttcattttgctcactggtatattaaagtatatatacccacccctaaattgatgcccagcacatagtaactgcccaataaatatttgaatggctcaaaatggatcatacacctaaatataagggctacagctataaagtttttagaagaaaccataggaatatatttttgtgactttgagttaggtaatgatttcttagatatgacaccaaaagcacaaatga

SEQ ID NO: 64575 - DNA, 344 bp, Homo sapiens
gattacaggcgtgagccaccgcgcccagccattactctgcatttttaagcatgtacagtaaaaattcaatagtctttttgggccactgactttgtgtagttccactgtttggccagggcacacctgacaactctatcattgtaatgtttgaattgtacatactgtttttgtaaagtgacatctttctcccattccactaggtgtagcttaaaaataaaaaagtgacatttttcagatacttagcggctttttgtatatgcatacctttgatggtctgggcagtttatgaaagtgaacacaaagatttgagcctcttgatttacaataaatgattatgaattaag

SEQ ID NO: 64576 - DNA, 409 bp, Homo sapiens
gctccatctctctgccagttctccaagcaccagccacagccagtggccccagggggtctcactgcttttagtgttggtttgagaaatccatcgacctccctctggcattggtgtatctctgaggctatctttggaagcagtgaccctgtgctaatttgacatcttacctagagccagaagacagtgtgccacttgccagttttacagggaaaaagattcagaggaaaagtatttaagtacttttcacattgtatattgaagatatattaaagtggttttttttttaaggggaaacatataattattgtgtttgtcacatctagtggttgaaagctgctcttcttgttttctccaagtccttatcattttcttggtgggtagcagacctcacaggaggcctgtaccatta

SEQ ID NO: 64577 - DNA, 250 bp, Homo sapiens
cacttttctcttttggcttccaggttgctgttgagatgtctttatctgccagtctgttctctgcaggtgatgttttctttctgataagatgttttgtctttattatttgtggctttactataaagtgtgtaggtatgagttttaaaatttatcctgttttagaatcgcttgaacccaggaggcagaggctgcagtgagccgagatcacaccattgcaacttcagcctgggtaacagggcaagactccgtc

SEQ ID NO: 64578 - DNA, 517 bp, Homo sapiens
gtttgtttgtttgtttttttgagacggggtctcgctccttagcccaggctggagtgcatgctgcatgtttccatttatatgaacctcataatcgaacaaatctcatctattgtgacataagtcagaatactggtcttgtgatataaatcagaatactggtcagggagagaatctgggtcagagcacaggagggcttctaggatcctgatctgaatagtggttatatggctgtgttcaatgtaaaaattcattacgttgtacccttaaggattttgcattttgtgtgtattacacatcaaaaaaaaaaaagtttaccaaaaacaaagaaaaaaactaaagatgtccttttacctcttaccttcacagtttaactgatgctatccattacccttagcatgaattgactaacacccctaaatgaacactggtaggctaaaaggcaacactggcgtacacgcaggcttttctcttcccactatgcaatacttactaagagtctaatctatttgtggttcta

SEQ ID NO: 64579 - DNA, 481 bp, Homo sapiens
tcttaattccatggccatggaacaagtaaagacaacaccctgaggactggctcagcacataaaagatgacttttctagggcaccaggtttgatcccgacatttcctgagctcagttcacatgaggggctcacatccctgaatcccatccaggagccagctcctgagcaggggcaagggtcagcttgtgctggggctactgcttctagaatctcctctaacgccgcccttccaaacagccatctatgctgggtggagtgaggccacagcatgacaatcgtttaactgattcaaacccaccaggtgagcttggccaaaagggacatggtgggagagaaagaaacaaagaaaaccatgtaagcctgcaggaattcccgccaattctactctaggagcaaaagccccgagtggagttctagtatttgggatgcttttctttcatactaggttggtgcagaagtaattgccacctttaatggcaaa

SEQ ID NO: 64580 - DNA, 443 bp, Homo sapiens
ttgtgcacatgtaccctagaacttaaaacaaacaaaaacaaacattaattgtagagatttccacttctggtcacagtacagtagcagaaactagatttagggtattatgtgaaacaaccccttcaaagtagacagaatatatgaaacaatagattttaagacaaaaggcatcaggccacgaaacttagtaacctgtgagacagaaggcaaatgaggtattgcctatgattgtcccaggttacagtcttaagagagtttctaggctattgtactgggagggtgaacccagccagcacctgtcagactccctgatttgagaagacagagctgagagtctggggaaactcagtattctagagtttccacgacagagtactagaaaggagagacaactacacagtgagagaatgctggagatcttcagaggatccccctcgggtctc

SEQ ID NO: 64581 - DNA, 234 bp, Homo sapiens
gtttagaataaagatgaaacatttctcggaagagcatattcaggaatccatgtgaaattctcggagtcgggtctcgaattttgggggtcactgttaactgctgtttttagggacccatgttcttataaaatgtatcttgagctgaaatcacaattattttggtccataaagacttaattgtgtattgcttgtcagctagcaatgctggactgagttccgcagagggaatatata

SEQ ID NO: 64582 - DNA, 1362 bp, Homo sapiens
  misc_feature (2)..(3): n is a, c, g, or t
  misc_feature (355)..(355): n is a, c, g, or t
  misc_feature (1017)..(1017): n is a, c, g, or t
  misc_feature (1239)..(1239): n is a, c, g, or t
gnnggaaaactaagagagttctttgacaacagacccgtcctaaaataattgctacaagaagtttttcagacagatgagaaatgataccagaagttaacttggaatatcaggaatgaaaaaaagaccaacagaaatggtaaagatctgaggtaatgcaacattctgtgctgctcttgagttctttaaaatacgttttatggttaaaacaaaaattataacattttttgatggtgttttcaatgttatatgtagatagcacataagacaactacaacataaagagggtagaataaaagaaactaaagttttacattacacttaaaatggtaaaatattgattctaagtagaccatgnaaaggtaaagacgtatattgtaatccctggagcaaccactaaaaacaaaaacaaaaacaaacagaactatacaagcagataaagttaaaaacacaataaatgtccttaaaatggtagacacaaatccaaccatatcagtaattccattaaatgtaaatgatctaagaatggtatcagcaaaaatggaatagagaactccaaaactcctttttccataaaaaacagtgaaaaaaactggcaaaatcaactttattagaactctggagactaataaaaagtttaataaataaaataaattcttttttttaataaaataaattcttttttttttttttgagggagagtctcattctgttgctccggctggagtgcagtggtgtgatcttggctcactgcaacccccacctcctgggttcaagcgattctcctgcctcagcctcctgagtagctgggattacaggtgccctccaccatgcccagctaatttttgtattttcagtggaggcagggtttcaccatgttggccaggctggtcttgaactcttgacttcaaatgatccacccacctcagcctcccaaagtgttgggtttacaggcatgagccacaatgcccagccaataaattttaatcaagaagaaaaacggctaaatctcagtggganaacactgtggtgttttaacatacctgggctccattctcctctttcccagcttggtggcagccttgaagacaacagcctgcattcttgatataggttcttagtgttcgagggagcagaatggaacttactctcaaaggattgtggttgcctgttttgacctgtctgttggttccctgaaggatgagcacaaaagatttactttaatttcacctaacttagaantctcccagggctgaagcagctacctggggcatttggaaaaacaaacaaaccacacacacatgcacagagttaaaaacaaatgcattcactaatggtaacagttagggaaataatagacaaacc

SEQ ID NO: 64583 - DNA, 266 bp, Homo sapiens
gacagacacagaggacttatctgtgcaacagataatcggctccaaataattttttcaaagtgctctatttacccgagattatttgttagatgttttgtcgtgtaagttaatcaatacttgttgaattgagcaagcaacttcagaaggttatattccaggcgaaatatacacagactgacatttctttttcacttttctttcacttaaaaatagctttaaaatatttgttgacgcttgttactttttactacgctctatagaaacaa

SEQ ID NO: 64584 - DNA, 257 bp, Homo sapiens
cattttaacttaatcacctctttaaaagacctgtctccaaatacagttaaatttgaggtattgagggttaggacttcaacatgtgagtttgggaagggaagcacaaaatcagcccctaccatggtatatttatcattgatacattactatcaactaagctcaagattttattcagatttgactagtttttccactaaggccctttttcttttctaggatcccacagaggatacattacatttacttacatctcctct

SEQ ID NO: 64585 - DNA, 857 bp, Homo sapiens
aacgttggtaaggtgaaggtttcttgtgactgggcgaggacaggggctcccatgagaactggaactggaaattaactttgcacttggtgaagcatctgatgttttccagcaagatagttttggggacatgagagtaaacagaggtgacctttcagcacaaggctggggaatacgacactttaatttcctcttcttaagccctgaggaacttgaatgattggaacccactgctattggccacatgtggtgggggactgaagccaatgcatttttaagcctttggtcctggagaagtgggatgaaaatggttttctttggtggtaattgctttgggctctgctcagggagtaacacaagaagaccactcttctgtcagacacaaacccccgtgccccaaagctcattcaaaattgctacgccaggagatggatctgggatttaagttgccctcagtcctagctgcaattctctgcagcagagaatagcctgtttctattgccttatcctcacagatatgccagacagttcttaaataattgagccaactaaaaagatctaagtagaaatgaaaactcagacttatttttggtattttcagggtgtaaaatgttttcattcaaatgaaatgttttcattcttccctatgactttccactataaaaataattccaataacttaaaaactggccctccaatttggtgaaaagaccttggggcagggaagtctcaggggacagagacttggctatgccttcctcttgggggcactcagcgaggggccatacccacacgcaggtttccagtgcaggcttcttgatatcactgaagataaagagcgattaacgttcgtgtacccc

SEQ ID NO: 64586 - DNA, 625 bp, Homo sapiens
tggcacgaggaacctgtagattttccaaaattcactaaaatatgaaaggattgagtagtttattattcatactgagaatacttaatttatttttatctagagatgtttttatcaaaataagagcaaaaagtaaatacaatttttatccgtaaaaactctaaaatctttcaaaaatctgtttaaatctatatagttttatgttttgtatttcctacttatttagcagaaatgatgaagaaactgttctgatggcctgcttttctgtccttttcctactgctttaaacattgattttcttttgtactaaatcatatagccaaatattgtttaagtaagtcagttttaggaaatgcttgtgttgctgttgaattataaaagctgagtaaatttcagattaaactttaaatgactgtgaaataagacataaactagttaatggtaatttgcttaaaatgacttgagattattattggaagtttttattaattgatacaggtaagaattgatatttaataaaatgttctcatgcttagactatattacttttcggtagagaaattagtattttgctgtaatgtgttatgaaatacatgtgatatcctagtttgtctactgacactggggt

SEQ ID NO: 64587 - DNA, 4031 bp, Homo sapiens
attttaaatacacacacccacagggctctgccccctgtaaaagaaaaaaaatcaaaacaaacaaataaataaccccaaagagatggacccaggggagaacgcgtaagtgtgaggggcatgagtatacacgagtgtgcgtgtctttccctctcccttatttgtctccgtatgagtctctccttgtaccctccccctgcctcgatgatattactcccccagacttggaagccgctgccagagtgacgctttgatggtatctgcaagcgtttttgctgatcttatctctgccccctgaatattaattccctaatctggtagcaatccatctccccagtgaaggacctactagaggcaggtggggggagccaccatcagatcataagcataagaataatacaaaggggagggattcttctgcaaccaagaggcaagaggcgagagaaggaaaaaaaaaaaagcgatgagttcgccaaatatatggagcacaggaagctcagtctactcgactcctgtattttcacagaaaatgacggtgtggattctgctcctgctgtcgctctaccctggcttcactagccagaaatctgatgatgactatgaagattatgcttctaacaaaacatgggtcttgactccaaaagttcctgagggtgatgtcactgtcatcttaaacaacctgctggaaggatatgacaataaacttcggcctgatataggagtgaagccaacgttaattcacacagacatgtatgtgaatagcattggtccagtgaacgctatcaatatggaatacactattgatatattttttgcgcaaacgtggtatgacagacgtttgaaatttaacagcaccattaaagtcctccgattgaacagcaacatggtggggaaaatctggattccagacactttcttcagaaattccaaaaaagctgatgcacactggatcaccacccccaacaggatgctgagaatttggaatgatggtcgagtgctctacaccctaaggttgacaattgatgctgagtgccaattacaattgcacaactttccaatggatgaacactcctgccccttggagttctccagttatggctatccacgtgaagaaattgtttatcaatggaagcgaagttctgttgaagtgggcgacacaagatcctggaggctttatcaattctcatttgttggtctaagaaataccaccgaagtagtgaagacaacttccggagattatgtggtcatgtctgtctactttgatctgagcagaagaatgggatactttaccatccagacctatatcccctgcacactcattgtcgtcctatcctgggtgtctttctggatcaataaggatgctgttccagccagaacatctttaggtatcaccactgtcctgacaatgaccaccctcagcaccattgcccggaaatcgctccccaaggtctcctatgtcacagcgatggatctctttgtatctgtttgtttcatctttgtcttctctgctctggtggagtatggcaccttgcattattttgtcagcaaccggaaaccaagcaaggacaaagataaaaagaagaaaaaccctgcccctaccattgatatccgcccaagatcagcaaccattcaaatgaataatgctacacaccttcaagagagagatgaagagtacggctatgagtgtctggacggcaaggactgtgccagttttttctgctgttttgaagattgtcgaacaggagcttggagacatgggaggatacatatccgcattgccaaaatggactcctatgctcggatcttcttccccactgccttctgcctgtttaatctggtctattgggtctcctacctctacctgtgaggaggtatgggttttactgatatggttcttattcactgagtctcatggagagatgtctgttctaagtccacttaaataatcctctatgtggttgataatgatctgaatctgtttctatgtccaaacctggtaaattttataatgtcatattgtttgtgcccagccctcctttggttagtgtactttgaacttcgatgtttgctgtgtttcaaacctgcaaggcaaagtaaaattagagcaagaacattcaaaccaaataagatatttttcagctacagcaaataaaacagtgaaagccctgactatttacagtagtggtatccttactagattcataatgcaattagatagaaaaggtccaaaactgtaccctatgttcactccgggtcaagttgtgataaatttgatcccaatagaatacctccctcatttaagaaaaatcataactcactttaaatatgaaagcctagtccagaaatctattacacctttatctcaagataggaagaaaatttcctccacattcatgtacaatgatgtaaatatttcaataacttagaatgcttcaagtttagtgcatgcatctctttagatccaaaataaatggactgaagttatcatcctattgtcttttattttgtgtccttgggctataaaagattcctgaatgtaattataaggatttgggtttggaaatggagggaggaattttcattgccttctccctcatgcatgaagattcgaacagcttattttttccttgtatgacatattacaacactttaagtaaaatatagactggataatcaacatttgccacctctaaatatgcccaatttcataactagagtataaagtaattgtatgtgcttgccgctatttttttcttccttttaggatgatagatcataacagaacttattctccatctcaagatctgcttctagtgattgtgagtgccttgtgggcagaatccttgtcatttcctctttgggtctgtagcaccttgcatagtgcctggcatatagttggtgctcaataaatatggtttgaagtgaattgccctcacatgcttctggcaaatctctgtgctggcctgaaaccagtgactcatcttctcacataggtgttgtcaagtgatatttgattttgtaaaaataaccagtaggatccaaagaactttagctatttatgttcatcttcaaaaaattattttaggcaaagtccatactccttttaaaacaatatttatgtcctatgtttgtgtatagacatgactctactagggcataattagagtttgtgtattatttttccaggtttggggatgagtcagtccttgcccatccacaattttgtttgtgaacttataacaggaataagcaaaattcatacctgactagtgttcagaatgtagcattctgtgcgaaaaagtattgaagattagcttttaaaaactgaaaaaaaaaaatgaatgactcacatagaggttgagccaatgactgtggcctcattagattacattgtagttaaacaaagcaatttctccagacttaaaacatgatgagttgagctctatcttcatgtactcatcctgaatccttatttttctaaaatagcaccctttgttaattatttttatggaaattattactctgtcataattaaatcatagctagtataactttacagataacctaaaaagaatagaaaagaagagagagtggctttgtcagtataaaaccatgtaaagtcatcatcaagtcatctggatgaatcttgaaacacatttagctgccagttttacaaacctttaatatatcagtgctccagtatataacctcaaacaaatgtaaatagaacgaattattttcttgttttgaattgtcaatatattaaatgttgactctttgggagagttgttggcaagtttcaatggtgagaaacattattgtcaacttgaaatgtgttctgtaatggggacactacaaaaagctagctttccaatgtgtgcatagtattggcaatatgaatatatattatatataatctaatacttattataagctgctccctgtctatgtatttggaaaccttttcacaaagggaattgcctaacatgtggacttttacaataaaaatgctgcattctaatccatggtggcat

SEQ ID NO: 64588 - DNA, 3969 bp, Homo sapiens
attttaaatacacacacccacagggctctgccccctgtaaaagaaaaaaaatcaaaacaaacaaataaataaccccaaagagatggacccaggggagaacgcgtaagtgtgaggggcatgagtatacacgagtgtgcgtgtctttccctctcccttatttgtctccgtatgagtctctccttgtaccctccccctgcctcgatgatattactcccccagacttggaagccgctgccagagtgacgctttgatggtatctgcaagcgtttttgctgatcttatctctgccccctgaatattaattccctaatctggtagcaatccatctccccagtgaaggacctactagaggcaggtggggggagccaccatcagatcataagcataagaataatacaaaggggagggattcttctgcaaccaagaggcaagaggcgagagaaggaaaaaaaaaaaagcgatgagttcgccaaatatatggagcacaggaagctcagtctactcgactcctgtattttcacagaaaatgacggtgtggattctgctcctgctgtcgctctaccctggcttcactagccagaaatctgatgatgactatgaagattatgcttctaacaaaacatgggtcttgactccaaaagttcctgagggtgatgtcactgtcatcttaaacaacctgctggaaggatatgacaataaacttcggcctgatataggagtgaagccaacgttaattcacacagacatgtatgtgaatagcattggtccagtgaacgctatcaatatgcaccattaaagtcctccgattgaacagcaacatggtggggaaaatctggattccagacactttcttcagaaattccaaaaaagctgatgcacactggatcaccacccccaacaggatgctgagaatttggaatgatggtcgagtgctctacaccctaaggttgacaattgatgctgagtgccaattacaattgcacaactttccaatggatgaacactcctgccccttggagttctccagttatggctatccacgtgaagaaattgtttatcaatggaagcgaagttctgttgaagtgggcgacacaagatcctggaggctttatcaattctcatttgttggtctaagaaataccaccgaagtagtgaagacaacttccggagattatgtggtcatgtctgtctactttgatctgagcagaagaatgggatactttaccatccagacctatatcccctgcacactcattgtcgtcctatcctgggtgtctttctggatcaataaggatgctgttccagccagaacatctttaggtatcaccactgtcctgacaatgaccaccctcagcaccattgcccggaaatcgctccccaaggtctcctatgtcacagcgatggatctctttgtatctgtttgtttcatctttgtcttctctgctctggtggagtatggcaccttgcattattttgtcagcaaccggaaaccaagcaaggacaaagataaaaagaagaaaaaccctgcccctaccattgatatccgcccaagatcagcaaccattcaaatgaataatgctacacaccttcaagagagagatgaagagtacggctatgagtgtctggacggcaaggactgtgccagttttttctgctgttttgaagattgtcgaacaggagcttggagacatgggaggatacatatccgcattgccaaaatggactcctatgctcggatcttcttccccactgccttctgcctgtttaatctggtctattgggtctcctacctctacctgtgaggaggtatgggttttactgatatggttcttattcactgagtctcatggagagatgtctgttctaagtccacttaaataatcctctatgtggttgataatgatctgaatctgtttctatgtccaaacctggtaaattttataatgtcatattgtttgtgcccagccctcctttggttagtgtactttgaacttcgatgtttgctgtgtttcaaacctgcaaggcaaagtaaaattagagcaagaacattcaaaccaaataagatatttttcagctacagcaaataaaacagtgaaagccctgactatttacagtagtggtatccttactagattcataatgcaattagatagaaaaggtccaaaactgtaccctatgttcactccgggtcaagttgtgataaatttgatcccaatagaatacctccctcatttaagaaaaatcataactcactttaaatatgaaagcctagtccagaaatctattacacctttatctcaagataggaagaaaatttcctccacattcatgtacaatgatgtaaatatttcaataacttagaatgcttcaagtttagtgcatgcatctctttagatccaaaataaatggactgaagttatcatcctattgtcttttattttgtgtccttgggctataaaagattcctgaatgtaattataaggatttgggtttggaaatggagggaggaattttcattgccttctccctcatgcatgaagattcgaacagcttattttttccttgtatgacatattacaacactttaagtaaaatatagactggataatcaacatttgccacctctaaatatgcccaatttcataactagagtataaagtaattgtatgtgcttgccgctatttttttcttccttttaggatgatagatcataacagaacttattctccatctcaagatctgcttctagtgattgtgagtgccttgtgggcagaatccttgtcatttcctctttgggtctgtagcaccttgcatagtgcctggcatatagttggtgctcaataaatatggtttgaagtgaattgccctcacatgcttctggcaaatctctgtgctggcctgaaaccagtgactcatcttctcacataggtgttgtcaagtgatatttgattttgtaaaaataaccagtaggatccaaagaactttagctatttatgttcatcttcaaaaaattattttaggcaaagtccatactccttttaaaacaatatttatgtcctatgtttgtgtatagacatgactctactagggcataattagagtttgtgtattatttttccaggtttggggatgagtcagtccttgcccatccacaattttgtttgtgaacttataacaggaataagcaaaattcatacctgactagtgttcagaatgtagcattctgtgcgaaaaagtattgaagattagcttttaaaaactgaaaaaaaaaaatgaatgactcacatagaggttgagccaatgactgtggcctcattagattacattgtagttaaacaaagcaatttctccagacttaaaacatgatgagttgagctctatcttcatgtactcatcctgaatccttatttttctaaaatagcaccctttgttaattatttttatggaaattattactctgtcataattaaatcatagctagtataactttacagataacctaaaaagaatagaaaagaagagagagtggctttgtcagtataaaaccatgtaaagtcatcatcaagtcatctggatgaatcttgaaacacatttagctgccagttttacaaacctttaatatatcagtgctccagtatataacctcaaacaaatgtaaatagaacgaattattttcttgttttgaattgtcaatatattaaatgttgactctttgggagagttgttggcaagtttcaatggtgagaaacattattgtcaacttgaaatgtgttctgtaatggggacactacaaaaagctagctttccaatgtgtgcatagtattggcaatatgaatatatattatatataatctaatacttattataagctgctccctgtctatgtatttggaaaccttttcacaaagggaattgcctaacatgtggacttttacaataaaaatgctgcattctaatccatggtggcat

SEQ ID NO: 64589 - DNA, 851 bp, Homo sapiens
gtcctttaaaacataagccataccattgtggtatacaatcaggaaaattctgtatttatatatattttaacattttctattaacatttaatacatttgctcagagtaatgggttttctatttgcctataactaagcatgacacaatatttgatttcagaattgatgcatttttatttctctgttccactcacatgcagcaccatcaaatgccttcatgtaaccaatgtcacatctaatacttactagaataagattccatgtaatttgatttaaatatttaactttgagttcttttggtgttcaatctccttgctatagctattagcttgatgatattattttcagctgcactgcttaagctcaaaatttgaaatctgcaaatgtgctatctttctaagttcaattttaccattgtagatcatgatgtcatagcaatttcctgagtacccattttcagattcatcatcacattggtgacattgtggaaaaacagcctaggatctctcgagaacaactaactgatccctctccttccctaccctcgtcccaggcccctaccattgatatccgcccaagatcagcaaccattcaaatgaataatgctacacaccttcaagagagagatgaagagtacggctatgagtgtctggacggcaaggactgtgccagttttttctgctgttttgaagattgtcgaacaggagcttggagacatgggaggatacatatccgcattgccaaaatggactcctatgctcggatcttcttccccactgccttctgcctgtttaatctggtctattgggtctcctacctctacctgtgaggaggtatgggttttactgatatg

SEQ ID NO: 64590 - DNA, 3977 bp, Homo sapiens
attttaaatacacacacccacagggctctgccccctgtaaaagaaaaaaaatcaaaacaaacaaataaataaccccaaagagatggacccaggggagaacgcgtaagtgtgaggggcatgagtatacacgagtgtgcgtgtctttccctctcccttatttgtctccgtatgagtctctccttgtaccctccccctgcctcgatgatattactcccccagacttggaagccgctgccagagtgacgctttgatggtatctgcaagcgtttttgctgatcttatctctgccccctgaatattaattccctaatctggtagcaatccatctccccagtgaaggacctactagaggcaggtggggggagccaccatcagatcataagcataagaataatacaaaggggagggattcttctgcaaccaagaggcaagaggcgagagaaggaaaaaaaaaaaagcgatgagttcgccaaatatatggagcacaggaagctcagtctactcgactcctgtattttcacagaaaatgacggtgtggattctgctcctgctgtcgctctaccctggcttcactagccagaaatctgatgatgactatgaagattatgcttctaacaaaacatgggtcttgactccaaaagttcctgagggtgatgtcactgtcatcttaaacaacctgctggaaggatatgacaataaacttcggcctgatataggagtgaagccaacgttaattcacacagacatgtatgtgaatagcattggtccagtgaacgctatcaatatggaatacactattgatatattttttgcgcaaacgtggtatgacagacgtttgaaatttaacagcaccattaaagtcctccgattgaacagcaacatggtggggaaaatctggattccagacactttcttcagaaattccaaaaaagctgatgcacactggatcaccacccccaacaggatgctgagaatttggaatgatggtcgagtgctctacaccctaaggttgacaattgatgctgagtgccaattacaattgcacaactttccaatggatgaacactcctgccccttggagttctccagttatggctatccacgtgaagaaattgtttatcaatggaagcgaagttctgttgaagtgggcgacacaagatcctggaggctttatcaattctcatttgttggtctaagaaataccaccgaagtagtgaagacaacttccggagattatgtggtcatgtctgtctactttgatctgagcagaagaatgggatactttaccatccagacctatatcccctgcacactcattgtcgtcctatcctgggtgtctttctggatcaataaggatgctgttccagccagaacatctttaggtatcaccactgtcctgacaatgaccaccctcagcaccattgcccggaaatcgctccccaaggtctcctatgtcacagcgatggatctctttgtatctgtttgtttcatctttgtcttctctgctctggtggagtatggcaccttgcattattttgtcagcaaccggaaaccaagcaaggacaaagataaaaagaagaaaaaccctgcccctaccattgatatccgcccaagatcagcaaccattcaaatgaataatgctacacaccttcaagagagagatgaagagtacggctatgagtgtctggacggcaaggactgtgccagttttttctgctgttttgaagattgtcgaacaggagcttggagacatgggaggatacatatccgcattgccaaaatggactcctatgctcggatcttcttccccactgccttctgcctgtttaatctggtctattgggtctcctacctctacctgtgaggaggtatgggttttactgatatggttcttattcactgagtctcatggagagatgtctgttctaagtccacttaaataatcctctatgtggttgataatgatctgaatctgtttctatgtccaaacctggtaaattttataatgtcatattgtttgtgcccagccctcctttggttagtgtactttgaacttcgatgtttgctgtgtttcaaacctgcaaggcaaagtaaaattagagcaagaacattcaaaccaaataagatatttttcagctacagcaaataaaacagtgaaagccctgactatttacagtagtggtatccttactagattcataatgcaattagatagaaaaggtccaaaactgtaccctatgttcactccgggtcaagttgtgataaatttgatcccaatagaatacctccctcatttaagaaaaatcataactcactttaaatatgaaagcctagtccagaaatctattacacctttatctcaagataggaagaaaatttcctccacattcatgtacaatgatgtaaatatttcaataacttagaatgcttcaagtttagtgcatgcatctctttagatccaaaataaatggactgaagttatcatcctattgtcttttattttgtgtccttgggctataaaagattcctgaatgtaattataaggatttgggtttggaaatggagggaggaattttcattgccttctccctcatgcatgaagattcgaacagcttattttttccttgtatgacatattacaacactttaagtaaaatatagactggataatcaacatttgccacctctaaatatgcccaatttcataactagagtataaagtaattgtatgtgcttgccgctatttttttcttccttttaggatgatagatcataacagaacttattctccatctcaagatctgcttctagtgattgtgagtgccttgtgggcagaatccttgtcatttcctctttgggtctgtagcaccttgcatagtgcctggcatatagttggtgctcaataaatatggtttgaagtgaattgccctcacatgcttctggcaaatctctgtgctggcctgaaaccagtgactcatcttctcacataggtgttgtcaagtgatatttgattttgtaaaaataaccagtaggatccaaagaactttagctatttatgttcatcttcaaaaaattattttaggcaaagtccatactccttttaaaacaatatttatgtcctatgtttgtgtatagacatgactctactagggcataattagagtttgtgtattatttttccaggtttggggatgagtcagtccttgcccatccacaattttgtttgtgaacttataacaggaataagcaaaattcatacctgactagtgttcagaatgtagcattctgtgcgaaaaagtattgaagattagcttttaaaaactgaaaaaaaaaaatgaatgactcacatagaggttgagccaatgactgtggcctcattagattacattgtagttaaacaaagcaatttctccagacttaaaacatgatgagttgagctctatcttcatgtactcatcctgaatccttatttttctaaaatagcaccctttgttaattatttttatggaaattattactctgtcataattaaatcatagctagtataactttacagataacctaaaaagaatagaaaagaagagagagtggctttgtcagtatactgccagttttacaaacctttaatatatcagtgctccagtatataacctcaaacaaatgtaaatagaacgaattattttcttgttttgaattgtcaatatattaaatgttgactctttgggagagttgttggcaagtttcaatggtgagaaacattattgtcaacttgaaatgtgttctgtaatggggacactacaaaaagctagctttccaatgtgtgcatagtattggcaatatgaatatatattatatataatctaatacttattataagctgctccctgtctatgtatttggaaaccttttcacaaagggaattgcctaacatgtggacttttacaataaaaatgctgcattctaatccatggtggcat

SEQ ID NO: 64591 - DNA, 3462 bp, Homo sapiens
aacagccagagagtaagtagaagctcatgaggctgaatgcttaggcctagcactggcacactcgcttttgtatatatattattagccgaagccaatcagatgatccagcccaaagtcgagaggcagaggaatagccttatccaggagaagtgaagccaacgttaattcacacagacatgtatgtgaatagcattggtccagtgaacgctatcaatatggaatacactattgatatattttttgcgcaaacgtggtatgacagacgtttgaaatttaacagcaccattaaagtcctccgattgaacagcaacatggtggggaaaatctggattccagacactttcttcagaaattccaaaaaagctgatgcacactggatcaccacccccaacaggatgctgagaatttggaatgatggtcgagtgctctacaccctaaggttgacaattgatgctgagtgccaattacaattgcacaactttccaatggatgaacactcctgccccttggagttctccagttatggctatccacgtgaagaaattgtttatcaatggaagcgaagttctgttgaagtgggcgacacaagatcctggaggctttatcaattctcatttgttggtctaagaaataccaccgaagtagtgaagacaacttccggagattatgtggtcatgtctgtctactttgatctgagcagaagaatgggatactttaccatccagacctatatcccctgcacactcattgtcgtcctatcctgggtgtctttctggatcaataaggatgctgttccagccagaacatctttaggtatcaccactgtcctgacaatgaccaccctcagcaccattgcccggaaatcgctccccaaggtctcctatgtcacagcgatggatctctttgtatctgtttgtttcatctttgtcttctctgctctggtggagtatggcaccttgcattattttgtcagcaaccggaaaccaagcaaggacaaagataaaaagaagaaaaaccctgcccctaccattgatatccgcccaagatcagcaaccattcaaatgaataatgctacacaccttcaagagagagatgaagagtacggctatgagtgtctggacggcaaggactgtgccagttttttctgctgttttgaagattgtcgaacaggagcttggagacatgggaggatacatatccgcattgccaaaatggactcctatgctcggatcttcttccccactgccttctgcctgtttaatctggtctattgggtctcctacctctacctgtgaggaggtatgggttttactgatatggttcttattcactgagtctcatggagagatgtctgttctaagtccacttaaataatcctctatgtggttgataatgatctgaatctgtttctatgtccaaacctggtaaattttataatgtcatattgtttgtgcccagccctcctttggttagtgtactttgaacttcgatgtttgctgtgtttcaaacctgcaaggcaaagtaaaattagagcaagaacattcaaaccaaataagatatttttcagctacagcaaataaaacagtgaaagccctgactatttacagtagtggtatccttactagattcataatgcaattagatagaaaaggtccaaaactgtaccctatgttcactccgggtcaagttgtgataaatttgatcccaatagaatacctccctcatttaagaaaaatcataactcactttaaatatgaaagcctagtccagaaatctattacacctttatctcaagataggaagaaaatttcctccacattcatgtacaatgatgtaaatatttcaataacttagaatgcttcaagtttagtgcatgcatctctttagatccaaaataaatggactgaagttatcatcctattgtcttttattttgtgtccttgggctataaaagattcctgaatgtaattataaggatttgggtttggaaatggagggaggaattttcattgccttctccctcatgcatgaagattcgaacagcttattttttccttgtatgacatattacaacactttaagtaaaatatagactggataatcaacatttgccacctctaaatatgcccaatttcataactagagtataaagtaattgtatgtgcttgccgctatttttttcttccttttaggatgatagatcataacagaacttattctccatctcaagatctgcttctagtgattgtgagtgccttgtgggcagaatccttgtcatttcctctttgggtctgtagcaccttgcatagtgcctggcatatagttggtgctcaataaatatggtttgaagtgaattgccctcacatgcttctggcaaatctctgtgctggcctgaaaccagtgactcatcttctcacataggtgttgtcaagtgatatttgattttgtaaaaataaccagtaggatccaaagaactttagctatttatgttcatcttcaaaaaattattttaggcaaagtccatactccttttaaaacaatatttatgtcctatgtttgtgtatagacatgactctactagggcataattagagtttgtgtattatttttccaggtttggggatgagtcagtccttgcccatccacaattttgtttgtgaacttataacaggaataagcaaaattcatacctgactagtgttcagaatgtagcattctgtgcgaaaaagtattgaagattagcttttaaaaactgaaaaaaaaaaatgaatgactcacatagaggttgagccaatgactgtggcctcattagattacattgtagttaaacaaagcaatttctccagacttaaaacatgatgagttgagctctatcttcatgtactcatcctgaatccttatttttctaaaatagcaccctttgttaattatttttatggaaattattactctgtcataattaaatcatagctagtataactttacagataacctaaaaagaatagaaaagaagagagagtggctttgtcagtataaaaccatgtaaagtcatcatcaagtcatctggatgaatcttgaaacacatttagctgccagttttacaaacctttaatatatcagtgctccagtatataacctcaaacaaatgtaaatagaacgaattattttcttgttttgaattgtcaatatattaaatgttgactctttgggagagttgttggcaagtttcaatggtgagaaacattattgtcaacttgaaatgtgttctgtaatggggacactacaaaaagctagctttccaatgtgtgcatagtattggcaatatgaatatatattatatataatctaatacttattataagctgctccctgtctatgtatttggaaaccttttcacaaagggaattgcctaacatgtggacttttacaataaaaatgctgcattctaatccatggtggcat

SEQ ID NO: 64592 - DNA, 1676 bp, Homo sapiens
cgggggtgtcccggctataaagcgtggccgcctcccgcggcgctcgggacagccgtaccccgggcggtcggacgggcgggcgccggtgggagctcgggccgtgcccgctgagagatccagagcgctccgttcccccggggccggagcgggggcgggtgggggcgtaagcccgggggatgctgggctcagtgaagatggaggcccatgacctggccgagtggagctactacccggaggcgggcgaggtctactcgccggtgaccccagtgcccaccatggcccccctcaactcctacatgaccctgaatcctctaagctctccctatccccctggggggctccctgcctccccactgccctcaggacccctggcacccccagcacctgcagcccccctggggcccactttcccaggcctgggtgtcagcggtggcagcagcagctccgggtacggggccccgggtcctgggctggtgcacgggaaggagatgccgaaggggtatcggcggcccctggcacacgccaagccaccgtattcctatatctcactcatcaccatggccatccagcaggcgccgggcaagatgctgaccttgagtgaaatctaccagtggatcatggacctcttcccttactaccgggagaatcagcagcgctggcagaactccattcgccactcgctgtctttcaacgactgcttcgtcaaggtggcgcgttccccagacaagcctggcaagggctcctactgggccctacaccccagctcagggaacatgtttgagaatggctgctacctgcgccgccagaaacgcttcaagctggaggagaaggtgaaaaaagggggcagcggggctgccaccaccaccaggaacgggacagggtctgctgcctcgaccaccacccccgcggccacagtcacctccccgccccagcccccgcctccagcccctgagcctgaggcccagggcggggaagatgtgggggctctggactgtggctcacccgcttcctccacaccctatttcactggcctggagctcccaggggagctgaagctggacgcgccctacaacttcaaccaccctttctccatcaacaacctaatgtcagaacagacaccagcacctcccaaactggacgtggggtttgggggctacggggctgaaggtggggagcctggagtctactaccagggcctctattcccgctctttgcttaatgcatcctagcaggggttgggaacatggtggtgggtatggctggagctcacaccacgaagctcttggggcctgatccttctggtgacacttcacttgtcccattggttaacatctgggtgggtctattacttactgtgatgactgctgtctcagtgggcatggtgttgatccacggggtactgtgataaccaccatgtgccatgatggctgctgcagccccgtgttggccatgtcgtcaccattctctctggcatgggttgggtaggggatggaggtgagaatactccttggttttctctgaagcccaccctttcccccaactctggtccaggagaaaccagaaaaggctggttagggtgtggggaatttctactgaagtctgattctttcccgggaagcggggtactggctgtgtttaatcattaaaggtaccgtgtccgcctcttaaaaaaaaac

SEQ ID NO: 64593 - DNA, 1977 bp, Homo sapiens
cgggggtgtcccggctataaagcgtggccgcctcccgcggcgctcgggacagccgtaccccgggcggtcggacgggcgggcgccggtgggagctcgggccgtgcccgctgagagatccagagcgctccgttcccccggggccggagcgggggcgggtgggggcgtaagcccgggggatgctgggctcagtgaagatggaggcccatgacctggccgagtggagctactacccggaggcgggcgaggtctactcgccggtgaccccagtgcccaccatggcccccctcaactcctacatgaccctgaatcctctaagctctccctatccccctggggggctccctgcctccccactgccctcaggacccctggcacccccagcacctgcagcccccctggggcccactttcccaggcctgggtgtcagcggtggcagcagcagctccgggtacggggccccgggtcctgggctggtgcacgggaaggagatgccgaaggggtatcggcggcccctggcacacgccaagccaccgtattcctatatctcactcatcaccatggccatccagcaggcgccgggcaagatgctgaccttgagtgaaatctaccagtggatcatggacctcttcccttactaccgggagaatcagcagcgctggcagaactccattcgccactcgctgtctttcaacgactgcttcgtcaaggtggcgcgttccccagacaagcctggcaagggctcctactgggccctacaccccagctcagggaacatgtttgagaatggctgctacctgcgccgccagaaacgcttcaagctggaggagaaggtgaaaaaagggggcagcggggctgccaccaccaccaggaacgggacagggtctgctgcctcgaccaccacccccgcggccacagtcacctccccgccccagcccccgcctccagcccctgagcctgaggcccagggcggggaagatgtgggggctctggactgtggctcacccgcttcctccacaccctatttcactggcctggagctcccaggggagctgaagctggacgcgccctacaacttcaaccaccctttctccatcaacaacctaatgtcagaacagacaccagcacctcccaaactggacgtggggtttgggggctacggggctgaaggtggggagcctggagtctactaccagggcctctattcccgctctttgcttaatgcatcctagcaggggttgggaacatggtggtgggtatggctggagctcacaccacgaagctcttggggcctgatccttctggtgacacttcacttgtcccattggttaacatctgggtgggtctattacttactgtgatgactgctgtctcagtgggcatggtgttgatccacggggtactgtgataaccaccatggatacattttggtggcccactgggtactgtgaggactgctacattgatggatgttattggctaatccactgcatggtttgatggccaccatctcggttggccctttgggtgtgatggtgatagcatttcagtgacatcttctttggccccccccattaggtgctgtgcccacttcttttttggtgtacttggcacagtaggtgccaagttggccaccattctgtgtaacaccttttttggcccattgggtgctttgatggacatcatactgggtaggtgacaacgtcagtgggccaccatgtgccatgatggctgctgcagccccgtgttggccatgtcgtcaccattctctctggcatgggttgggtaggggatggaggtgagaatactccttggttttctctgaagcccaccctttcccccaactctggtccaggagaaaccagaaaaggctggttagggtgtggggaatttctactgaagtctgattctttcccgggaagcggggtactggctgtgtttaatcattaaaggtaccgtgtccgcctcttaaaaaaaaac

SEQ ID NO: 64594 - DNA, 729 bp, Homo sapiens
gtcgagatgattgatccaatggtgagagtagggtgttgaagttcccaactattagtgtattggaatctctttctttagatctagcatttgccttaaatatctgggtgctctggtgttgggtacatacatgtttagaattgttacatcttcttgctgaattgatttttttatcattatttaatgaccttctttgtctcattttacagtttttgacttaaagtttgttttatctgataacaactcctgctcacttttggtttccatttgcgggagatatttttttccttccctttcagtctatatgtgtctttacaggtgaaatgggtttctggtaggcagcatataggtggatcatgtttaaaaaatccattcagctagtatgtatcttttaagtggggaatttaatccatttacactcaaggttattattgataggtgaggacttgttcctgtaattttgttcattattttctgttaattttatacatcctttgcttttttcttctgttcttgtttatcatgtggtttggtggttttctgtagtgacaacatttgtctccattttctttctcatttttgtgtatctgctgtaccagtgaattttatacttcagtgtgttttcatgatggtagatattattctttagctttcagatgtagaattcccttaagtattttaggactggtttagtggtgatgaatgaatgccctcagtttttgcacatttgga

SEQ ID NO: 64595 - DNA, 525 bp, Homo sapiens
cttgaagtttaatctcacatcgaatttgatatcccctcctccctccccttagcacttcaggagggtatggccagctccttcactctcccttccttgcctctgtctcctgggtccctgtgttgcagagttgaggtgaggggatgggagggcagagccatgtttacgtggggacggtgcagaagccagggtggccgtcgatggagatgcccaatgcgtgtgaaggccaaggctggcaggagccgtgggggagcccctggccagcagtgagcatggctatcttcagctcctgcccttttgggttggggttctgctccaaacagtgggtgggccagaggggctgggcaaacagaggctgtgctgttagttccctcagatgaggctgcccaggcaactggagcacttttggatggaacgagatactgcattggtgtattaaaagtctgattactgccgggcgcagtgcctcgcacctgtaatcccagcactttgggaggtcgaggtgggtggatcacttgaggtcaggag

SEQ ID NO: 64596 - DNA, 518 bp, Homo sapiens
attaagagaaaaataaatatataaactaaattatagttgatgtggtttggctatgtctccacccaaaatctcatcttgaattgtaatccccataattcccacgtgtgaagggagaggccagatgggggtaattgaatcactggggtggcttccccatgctgttctcttgatagtgagttctcatgagatctgatggctttgtaagtgtttggtagtttttcctgtattcattctccctcctgccaccttgtgaagaaggtgccttggttcccctttaccttcaaccatgactgtaaatttcctgaggcccccccagccatgggggactgtgagtcaattaaacctctttcctttataaattacccagtctcgggcagtttcttatagcagtatgagaatggactaatacagtagtttaaaagtatggctgggcattgtagctcacacctgtaatcacagctacttgggtggctgaggcaggaggacgtttgagtcaaggagttcaagaccagcttaag

SEQ ID NO: 64597 - DNA, 2042 bp, Homo sapiens
aggcatgtggatcttttcctaagcaagatgctgagctggaaagatgggggtgtaaggtaatgtcccaaactgaaactttgccaggcactgggagaggctgtgaactcttttctggctttagaatttaggtctagatcccaaaaggctaagtaccccctgggggctaaccagaggcatgcctgggctgagctgaaccttctggtgcactggcccctggctgactgctcttctgcaggaagttggaggagattcctgaagttgattcctcaggctggatgtccaagggggttggagtttctgatgtctttctgtctccctctcttttctttctctccctaccaggtccacttctttcagaggggcctgcggtgctctaaaagttctcctgttaaagtttagagcaaattggttattattttaaaatcaataaaacttttaaaagtactaagacaacttctaagaggggagtggacagagggcctggtggcagctcacagtttcttttctgacctttggtctcacccaccaagtgtcccacctgagtgcccaccttgcccacctgaggtaatgccctggggctccaccagtccagatccacagggcgcagccatgtgggagtggcggctgattgttacccagtagtgttgatagcacattattcataacagccaaagagaggaagcaacccaaatgtccattagctgataaatggataaatgaaatatggtacgtccgaagaatggaatatcattcacccatgaaaaagaacgaagtccagcaccaaaacgtgctacaacatggatgaacttcgatgactttgtgccacatgaaagaagaagccagccacaaaaggccatatattgtatgaaatgaaatgtccagaatgggcaaacccatagagacacaaaaatctccgccacctccctactctcggctgtctcctcgcgacgagtacaagccactggatctgtccgattccacattgtcttacactgaaacggaggctaccaactccctcatcactgctccgggtgaattctcagacgccagcatgtctccggacgccaccaagccgagccactggtgcagcgtggcgtactgggagcaccggacgcgcgtgggccgcctctatgcggtgtacgaccaggccgtcagcatcttctacgacctacctcagggcagcggcttctgcctgggccagctcaacctggagcagcgcagcgagtcggtgcggcgaacgcgcagcaagatcggcttcggcatcctgctcagcaaggagcccgacggcgtgtgggcctacaaccgcggcgagcaccccatcttcgtcaactccccgacgctggacgcgcccggcggccgcgccctggtcgtgcgcaaggtgccccccggctactccatcaaggtgttcgacttcgagcgctcgggcctgcagcacgcgcccgagcccgacgccgccgacggcccctacgaccccaacagcgtccgcatcagcttcgccaagggctgggggccctgctactcccggcagttcatcacctcctgcccctgctggctggagatcctcctcaacaaccccagatagtggcggccccggcgggaggggcgggtgggaggccgcggccaccgccacctgccggcctcgagaggggccgatgcccagagacacagcccccacggacaaaaccccccagatatcatctacctagatttaatataaagttttatatattatatggaaatatatattatacttgtaattatggagtcatttttacaatgtaattatttatgtatggtgcaatgtgtgtatatggacaaaacaagaaagacgcactttggcttataattctttcaatacagatatattttctttctcttcctccttcctcttccttactttttatatatatatataaagaaaatgatacagcagagctaggtggaaaagcctgggtttggtgtatggtttttgagatattaatgcccagacaaaaagctaataccagtcactcgataataaagtattcgcattataaaaaaga

SEQ ID NO: 64598 - DNA, 2578 bp, Homo sapiens
  misc_feature (4)..(5): n is a, c, g, or t
  misc_feature (10)..(10): n is a, c, g, or t
  misc_feature (12)..(12): n is a, c, g, or t
gaanncggcngnggagcgatcgagggagctgagccgagagaaagagccgccgggcgctgcctcgccagacctcgctgggaccccggggccaccgggaggcacttttgtggaggggggagggggggcgacctcggcagcctcggcgcacgaagcgtccgagggcagcgtggggcgggctgcgacctctgcatcggtggactgcatttttaattaaggattcccagcagctctttgggatttttacagcttccactcatgtgttgacacccgcgtccaggagaaactcgctccaagtgcatctagcgcctgggacctgagacggcgttggcctttcgtgcatgcaaatccagggatttaggttttgtttgggatttccttttctttctttccttttttttttctttttgcagggagtaagaagggagctgggggtatcaacaagcctgcctttcggatcctgcgggaaaagcccatgtagttaagcgctttggtttaaaaaaaaggcaaggtaaaggcagggctttccagacacatttaggggttcgcgcgagcgctttgtgctcatggaccagccgcacaacttttgaaggctcgccggcccatgtggggtctttctggcggcgcgccgcctgcagcccccctaaagcgcgggggctggagttgttgagcagccccgccgctgtggtccatgtagccgctggccgcgcgcggactgcggctcggcgtgcgcgtgttcccggccgtcccgcctcggcgagctccctcatgttgtcgccctgcggcgccccttcgacgacaggctgtgcgcggtctgcacggcgctccgcggcggagcttcatgtggggctgcgacccgcgcagccggcgcctcgctgagggaacggacccccggtaaccggagaccgcctcccccccacccctggcgccaaaggatatcgtatgttcaggtccaaacgctcggggctggtgcggcgactttggcgaagtcgtgtggtccccgaccgggaggaaggcggcagcggcggcggcggtggcggcgacgaggatgggagcttgggcagccgagctgagccggccccgcgggcaagagagggcggaggctgcggccgctccgaagtccgcccggtagccccgcggcggccccgggacgcagtgggacagcgaggcgcccagggcgcggggaggcgccggcgcgcagggggccccccgaggcccatgtcggagccaggggccggcgctgggagctccctgctggacgtggcggagccgggaggcccgggctggctgcccgagagtgactgcgagacggtgacctgctgtctcttttcggagcgggacgccgccggcgcgccccgggacgccagcgaccccctggccggggcggccctggagccggcgggcggcgggcggagtcgcgaagcgcgctcgcggctgctgctgctggagcaggaactcaaaaccgtcacgtactcgctgctgaagcggctcaaggagcgctcgctggacacgctgctggaggcggtggagtcccgcggcggcgtgccgggcggctgcgtgctggtgccgcgcgccgacctccgcctgggcggccagcccgcgccgccgcagctgctgctcggccgcctctttcgctggcccgacctgcagcacgccgtggagctgaagcccctgtgcggctgccacagcttcgccgccgccgccgacggccctaccgtgtgctgcaacccctaccacttcagccggctctgcgggcccgaatctccgccacctccctactctcggctgtctcctcgcgacgagtacaagccactggatctgtccgattccacattgtcttacactgaaacggaggctaccaactccctcatcactgctccgggtgaattctcagacgccagcatgtctccggacgccaccaagccgagccactggtgcagcgtggcgtactgggagcaccggacgcgcgtgggccgcctctatgcggtgtacgaccaggccgtcagcatcttctacgacctacctcagggcagcggcttctgcctgggccagctcaacctggagcagcgcagcgagtcggtgcggcgaacgcgcagcaagatcggcttcggcatcctgctcagcaaggagcccgacggcgtgtgggcctacaaccgcggcgagcaccccatcttcgtcaactccccgacgctggacgcgcccggcggccgcgccctggtcgtgcgcaaggtgccccccggctactccatcaaggtgttcgacttcgagcgctcgggcctgcagcacgcgcccgagcccgacgccgccgacggcccctacgaccccaacagcgtccgcatcagcttcgccaagggctgggggccctgctactcccggcagttcatcacctcctgcccctgctggctggagatcctcctcaacaaccccagatagtggcggccccggcgggaggggcgggtgggaggccgcggccaccgccacctgccggcctcgagaggggccgatgcccagagacacagcccccacggacaaaaccccccagatatcatctacctagatttaatataaagttttatatatt

SEQ ID NO: 64599 - DNA, 2124 bp, Homo sapiens
aggcatgtggatcttttcctaagcaagatgctgagctggaaagatgggggtgtaaggtaatgtcccaaactgaaactttgccaggcactgggagaggctgtgaactcttttctggctttagaatttaggtctagatcccaaaaggctaagtaccccctgggggctaaccagaggcatgcctgggctgagctgaaccttctggtgcactggcccctggctgactgctcttctgcaggaagttggaggagattcctgaagttgattcctcaggctggatgtccaagggggttggagtttctgatgtctttctgtctccctctcttttctttctctccctaccaggtccacttctttcagaggggcctgcggtgctctaaaagttctcctgttaaagtttagagcaaattggttattattttaaaatcaataaaacttttaaaagtactaagacaacttctaagaggggagtggacagagggcctggtggcagctcacagtttcttttctgacctttggtctcacccaccaagtgtcccacctgagtgcccaccttgcccacctgaggtaatgccctggggctccaccagtccagatccacagggcgcagccatgtgggagtggcggctgattgttacccagtagtgttgatagcacattattcataacagccaaagagaggaagcaacccaaatgtccattagctgataaatggataaatgaaatatggtacgtccgaagaatggaatatcattcacccatgaaaaagaacgaagtccagcaccaaaacgtgctacaacatggatgaacttcgatgactttgtgccacatgaaagaagaagccagccacaaaaggccatatattgtatgaaatgaaatgtccagaatgggcaaacccatagagacacaaaatggtggttgatggttgcacaacactgtgaatatactcaaaaaccactgaatggtatatttttaaaaaggatgaatcttaggaatctccgccacctccctactctcggctgtctcctcgcgacgagtacaagccactggatctgtccgattccacattgtcttacactgaaacggaggctaccaactccctcatcactgctccgggtgaattctcagacgccagcatgtctccggacgccaccaagccgagccactggtgcagcgtggcgtactgggagcaccggacgcgcgtgggccgcctctatgcggtgtacgaccaggccgtcagcatcttctacgacctacctcagggcagcggcttctgcctgggccagctcaacctggagcagcgcagcgagtcggtgcggcgaacgcgcagcaagatcggcttcggcatcctgctcagcaaggagcccgacggcgtgtgggcctacaaccgcggcgagcaccccatcttcgtcaactccccgacgctggacgcgcccggcggccgcgccctggtcgtgcgcaaggtgccccccggctactccatcaaggtgttcgacttcgagcgctcgggcctgcagcacgcgcccgagcccgacgccgccgacggcccctacgaccccaacagcgtccgcatcagcttcgccaagggctgggggccctgctactcccggcagttcatcacctcctgcccctgctggctggagatcctcctcaacaaccccagatagtggcggccccggcgggaggggcgggtgggaggccgcggccaccgccacctgccggcctcgagaggggccgatgcccagagacacagcccccacggacaaaaccccccagatatcatctacctagatttaatataaagttttatatattatatggaaatatatattatacttgtaattatggagtcatttttacaatgtaattatttatgtatggtgcaatgtgtgtatatggacaaaacaagaaagacgcactttggcttataattctttcaatacagatatattttctttctcttcctccttcctcttccttactttttatatatatatataaagaaaatgatacagcagagctaggtggaaaagcctgggtttggtgtatggtttttgagatattaatgcccagacaaaaagctaataccagtcactcgataataaagtattcgcattataaaaaaga

SEQ ID NO: 64600 - DNA, 368 bp, Homo sapiens
gcgataaaaaaaatgtcttgtgtttagatggtggttgatggttgcacaacactgtgaatatactcaaaaaccactgaatggtatatttttaaaaaggatgaatcttagggtatgtgaattatatctcaatttttggaaagggtcacctgatattggtctgtaactggcctcccctgtaacacctgcagctaccttcatgtgtggccttgggcaggtccttcagcaagtgggaccttagtttcatatcagtgaaaagaaggaattgagttgggtgaaccccaaggcctcttctgtctttgacactctaaatccttgtgttgtggggtggagtctaaagccttcatacttttttagttgcctacaatgga

SEQ ID NO: 64601 - DNA, 2890 bp, Homo sapiens
  misc_feature (4)..(5): n is a, c, g, or t
  misc_feature (10)..(10): n is a, c, g, or t
  misc_feature (12)..(12): n is a, c, g, or t
gaanncggcngnggagcgatcgagggagctgagccgagagaaagagccgccgggcgctgcctcgccagacctcgctgggaccccggggccaccgggaggcacttttgtggaggggggagggggggcgacctcggcagcctcggcgcacgaagcgtccgagggcagcgtggggcgggctgcgacctctgcatcggtggactgcatttttaattaaggattcccagcagctctttgggatttttacagcttccactcatgtgttgacacccgcgtccaggagaaactcgctccaagtgcatctagcgcctgggacctgagacggcgttggcctttcgtgcatgcaaatccagggatttaggttttgtttgggatttccttttctttctttccttttttttttctttttgcagggagtaagaagggagctgggggtatcaacaagcctgcctttcggatcctgcgggaaaagcccatgtagttaagcgctttggtttaaaaaaaaggcaaggtaaaggcagggctttccagacacatttaggggttcgcgcgagcgctttgtgctcatggaccagccgcacaacttttgaaggctcgccggcccatgtggggtctttctggcggcgcgccgcctgcagcccccctaaagcgcgggggctggagttgttgagcagccccgccgctgtggtccatgtagccgctggccgcgcgcggactgcggctcggcgtgcgcgtgttcccggccgtcccgcctcggcgagctccctcatgttgtcgccctgcggcgccccttcgacgacaggctgtgcgcggtctgcacggcgctccgcggcggagcttcatgtggggctgcgacccgcgcagccggcgcctcgctgagggaacggacccccggtaaccggagaccgcctcccccccacccctggcgccaaaggatatcgtatgttcaggtccaaacgctcggggctggtgcggcgactttggcgaagtcgtgtggtccccgaccgggaggaaggcggcagcggcggcggcggtggcggcgacgaggatgggagcttgggcagccgagctgagccggccccgcgggcaagagagggcggaggctgcggccgctccgaagtccgcccggtagccccgcggcggccccgggacgcagtgggacagcgaggcgcccagggcgcggggaggcgccggcgcgcagggggccccccgaggcccatgtcggagccaggggccggcgctgggagctccctgctggacgtggcggagccgggaggcccgggctggctgcccgagagtgactgcgagacggtgacctgctgtctcttttcggagcgggacgccgccggcgcgccccgggacgccagcgaccccctggccggggcggccctggagccggcgggcggcgggcggagtcgcgaagcgcgctcgcggctgctgctgctggagcaggaactcaaaaccgtcacgtactcgctgctgaagcggctcaaggagcgctcgctggacacgctgctggaggcggtggagtcccgcggcggcgtgccgggcggctgcgtgctggtgccgcgcgccgacctccgcctgggcggccagcccgcgccgccgcagctgctgctcggccgcctctttcgctggcccgacctgcagcacgccgtggagctgaagcccctgtgcggctgccacagcttcgccgccgccgccgacggccctaccgtgtgctgcaacccctaccacttcagccggctctgcgggcccgaatctccgccacctccctactctcggctgtctcctcgcgacgagtacaagccactggatctgtccgattccacattgtcttacactgaaacggaggctaccaactccctcatcactgctccgggtgaattctcagacgccagcatgtctccggacgccaccaagccgagccactggtgcagcgtggcgtactgggagcaccggacgcgcgtgggccgcctctatgcggtgtacgaccaggccgtcagcatcttctacgacctacctcagggcagcggcttctgcctgggccagctcaacctggagcagcgcagcgagtcggtgcggcgaacgcgcagcaagatcggcttcggcatcctgctcagcaaggagcccgacggcgtgtgggcctacaaccgcggcgagcaccccatcttcgtcaactccccgacgctggacgcgcccggcggccgcgccctggtcgtgcgcaaggtgccccccggctactccatcaaggtgttcgacttcgagcgctcgggcctgcagcacgcgcccgagcccgacgccgccgacggcccctacgaccccaacagcgtccgcatcagcttcgccaagggctgggggccctgctactcccggcagttcatcacctcctgcccctgctggctggagatcctcctcaacaaccccagatagtggcggccccggcgggaggggcgggtgggaggccgcggccaccgccacctgccggcctcgagaggggccgatgcccagagacacagcccccacggacaaaaccccccagatatcatctacctagatttaatataaagttttatatattatatggaaatatatattatacttgtaattatggagtcatttttacaatgtaattatttatgtatggtgcaatgtgtgtatatggacaaaacaagaaagacgcactttggcttataattctttcaatacagatatattttctttctcttcctccttcctcttccttactttttatatatatatataaagaaaatgatacagcagagctaggtggaaaagcctgggtttggtgtatggtttttgagatattaatgcccagacaaaaagctaataccagtcactcgataataaagtattcgcattataaaaaaga

SEQ ID NO: 64602 - DNA, 3019 bp, Homo sapiens
  misc_feature (4)..(5): n is a, c, g, or t
  misc_feature (10)..(10): n is a, c, g, or t
  misc_feature (12)..(12): n is a, c, g, or t
gaanncggcngnggagcgatcgagggagctgagccgagagaaagagccgccgggcgctgcctcgccagacctcgctgggaccccggggccaccgggaggcacttttgtggaggggggagggggggcgacctcggcagcctcggcgcacgaagcgtccgagggcagcgtggggcgggctgcgacctctgcatcggtggactgcatttttaattaaggattcccagcagctctttgggatttttacagcttccactcatgtgttgacacccgcgtccaggagaaactcgctccaagtgcatctagcgcctgggacctgagacggcgttggcctttcgtgcatgcaaatccagggatttaggttttgtttgggatttccttttctttctttccttttttttttctttttgcagggagtaagaagggagctgggggtatcaacaagcctgcctttcggatcctgcgggaaaagcccatgtagttaagcgctttggtttaaaaaaaaggcaaggtaaaggcagggctttccagacacatttaggggttcgcgcgagcgctttgtgctcatggaccagccgcacaacttttgaaggctcgccggcccatgtggggtctttctggcggcgcgccgcctgcagcccccctaaagcgcgggggctggagttgttgagcagccccgccgctgtggtccatgtagccgctggccgcgcgcggactgcggctcggcgtgcgcgtgttcccggccgtcccgcctcggcgagctccctcatgttgtcgccctgcggcgccccttcgacgacaggctgtgcgcggtctgcacggcgctccgcggcggagcttcatgtggggctgcgacccgcgcagccggcgcctcgctgagggaacggacccccggtaaccggagaccgcctcccccccacccctggcgccaaaggatatcgtatgttcaggtccaaacgctcggggctggtgcggcgactttggcgaagtcgtgtggtccccgaccgggaggaaggcggcagcggcggcggcggtggcggcgacgaggatgggagcttgggcagccgagctgagccggccccgcgggcaagagagggcggaggctgcggccgctccgaagtccgcccggtagccccgcggcggccccgggacgcagtgggacagcgaggcgcccagggcgcggggaggcgccggcgcgcagggggccccccgaggcccatgtcggagccaggggccggcgctgggagctccctgctggacgtggcggagccgggaggcccgggctggctgcccgagagtgactgcgagacggtgacctgctgtctcttttcggagcgggacgccgccggcgcgccccgggacgccagcgaccccctggccggggcggccctggagccggcgggcggcgggcggagtcgcgaagcgcgctcgcggctgctgctgctggagcaggaactcaaaaccgtcacgtactcgctgctgaagcggctcaaggagcgctcgctggacacgctgctggaggcggtggagtcccgcggcggcgtgccgggcggctgcgtgctggtgccgcgcgccgacctccgcctgggcggccagcccgcgccgccgcagctgctgctcggccgcctctttcgctggcccgacctgcagcacgccgtggagctgaagcccctgtgcggctgccacagcttcgccgccgccgccgacggccctaccgtgtgctgcaacccctaccacttcagccggctctgcgggcccgaatctccgccacctccctactctcggctgtctcctcgcgacgagtacaagccactggatctgtccgattccacattgtcttacactgaaacggaggctaccaactccctcatcactgctccgggtgaattctcagcagatgctgggataggaagccgagggaaccgtggtttggagtcctctgtcccctgcagttagaagctggtcatagggacccctacatccggaggaatacctgaatcaaactttccttgagaaatgagagacgccagcatgtctccggacgccaccaagccgagccactggtgcagcgtggcgtactgggagcaccggacgcgcgtgggccgcctctatgcggtgtacgaccaggccgtcagcatcttctacgacctacctcagggcagcggcttctgcctgggccagctcaacctggagcagcgcagcgagtcggtgcggcgaacgcgcagcaagatcggcttcggcatcctgctcagcaaggagcccgacggcgtgtgggcctacaaccgcggcgagcaccccatcttcgtcaactccccgacgctggacgcgcccggcggccgcgccctggtcgtgcgcaaggtgccccccggctactccatcaaggtgttcgacttcgagcgctcgggcctgcagcacgcgcccgagcccgacgccgccgacggcccctacgaccccaacagcgtccgcatcagcttcgccaagggctgggggccctgctactcccggcagttcatcacctcctgcccctgctggctggagatcctcctcaacaaccccagatagtggcggccccggcgggaggggcgggtgggaggccgcggccaccgccacctgccggcctcgagaggggccgatgcccagagacacagcccccacggacaaaaccccccagatatcatctacctagatttaatataaagttttatatattatatggaaatatatattatacttgtaattatggagtcatttttacaatgtaattatttatgtatggtgcaatgtgtgtatatggacaaaacaagaaagacgcactttggcttataattctttcaatacagatatattttctttctcttcctccttcctcttccttactttttatatatatatataaagaaaatgatacagcagagctaggtggaaaagcctgggtttggtgtatggtttttgagatattaatgcccagacaaaaagctaataccagtcactcgataataaagtattcgcattataaaaaaga

SEQ ID NO: 64603 - DNA, 423 bp, Homo sapiens
tgcccacatgactgctgaatgctggaaaccttacccagctcccactgtgcagacagcagtgcccacctccgctcctcggtgcctcccacctccccacccagaataacgcggcggtccctgtgcttgtcccgcagacgccagcatgtctccggacgccaccaagccgagccactggtgcagcgtggcgtactgggagcaccggacgcgcgtgggccgcctctatgcggtgtacgaccaggccgtcagcatcttctacgacctacctcagggcagcggcttctgcctgggccagctcaacctggagcagcgcagcgagtcggtgcggcgaacgcgcagcaagatcggcttcggcatcctgctcagcaaggagcccgacggcgtgtgggcctacaaccgcggcgagcaccccatcttcgtcaactc

SEQ ID NO: 64604 - DNA, 504 bp, Homo sapiens
tgcgtccctaaagatctttgagcatcacccttcctgtaggtaatgggaaacaaaattaatagttcatatgtcactcatagcatttctatatttgaaagtagcccaatataaaacttttgattctaaaattaaaccagcagcctattacaagcacattctttgattgagtcattggttataaacttactaaatgcagagaaagcagccaatttaggaaacttctgagttggtgggacactgttgattaataatgtactgtatgaattaagtgatgctttaactttgattttacattttaaagttaaaatgtgggcattatgtcagcaaacttaagggcattatgtcagcaagctaaaacattttttttcctgtgcttttaatgtatctctttacatgatctgagagaggattcaagttgatagaaatagctgaggggaaaagggggaacatcttgggatgaagcttgtccttatggtgatgctcaaagatcttgggggtaccgag

SEQ ID NO: 64605 - DNA, 6078 bp, Homo sapiens
  misc_feature (797)..(797): n is a, c, g, or t
gctgccctccccgtcagccgccctcgccgccgcggtgcgctggctgcaggaagccgccgcgccgccgcttttgttgtcagggacccagcgaggagcgccgctcgccggccgccgccaccctctctcgctgcagcctgctgtgcgctgcacggcctggggcccgggcgcccccgcgtctgcccatgagggggccccgcgaccaccgctgcttccagcccggggcggcgcggcgctgaggcggcggcggcggcggcctgccccctctgcgggaagcgggcggccccggccgcctccgcgagggcaccatggaggtgaatgcaggaggtgtgattgcctatatcagttcttccagctcagcctcaagccctgcctcttgtcacagtgagggttctgagaatagtttccagtcctcctcctcttctgttccatcttctccaaatagctctaattctgataccaatggtaatcccaagaatggtgatctcgccaatattgaaggcatcttgaagaatgatcgaatagattgttctatgaaaacaagcaaatcgagtgcacctgggatgacaaaaagtcatagtggtgtgacaaaatttagtggcatggttctactgtgtaaagtctgtggggatgtggcgtcaggattccactatggagttcatgcttgcgaaggctgtaagggtttctttcggagaagtattcaacaaaacatccagtacaagaagtgcctgaagaatgaaaactgttctataatgagaatgaataggaacagatgtcagcaatgtcgcttcaaaaagtgnctgtctgttggaatgtcaagagatgctgttcggtttggtcgtattcctaagcgtgaaaaacagaggatgctaattgaaatgcaaagtgcaatgaagaccatgatgaacagccagttcagtggtcacttgcaaaatgacacattagtagaacatcatgaacagacagccttgccagcccaggaacagctgcgacccaagccccaactggagcaagaaaacatcaaaagctcttctcctccatcttctgattttgcaaaggaagaagtgattggcatggtgaccagagctcacaaggatacctttatgtataatcaagagcagcaagaaaactcagctgagagcatgcagccccagagaggagaacggattcccaagaacatggagcaatataatttaaatcatgatcattgcggcaatgggcttagcagccattttccctgtagtgagagccagcagcatctcaatggacagttcaaagggaggaatataatgcattacccaaatggtcatgccatttgtattgcaaatggacattgtatgaacttctccaatgcttatactcaaagagtatgtgatagagttccgatagatggattttctcagaatgagaacaagaatagttacctgtgcaacactggaggaagaatgcatctggtttgtccaatgagtaagtctccatatgtggatcctcataaatcaggacatgaaatctgggaagaattttcgatgagcttcactccagcagtgaaagaagtggtggaatttgcaaagcgtattcctgggttcagagatctctctcagcatgaccaggtcaaccttttaaaggctgggacttttgaggttttaatggtacggttcgcatcattatttgatgcaaaggaacgtactgtcacctttttaagtggaaagaaatatagtgtggatgatttacactcaatgggagcaggggatctgctaaactctatgtttgaatttagtgagaagctaaatgccctccaacttagtgatgaagagatgagtttgtttacagctgttgtcctggtatctgcagatcgatctggaatagaaaacgtcaactctgtggaggctttgcaggaaactctcattcgtgcactaaggaccttaataatgaaaaaccatccaaatgaggcctctatttttacaaaactgcttctaaagttgccagatcttcgatctttaaacaacatgcactctgaggagctcttggcctttaaagttcacccttaaggcctttgtttatttaaacatgaactgatggtaactgtacattttgtgctaaaatgcatatttatatgtgtataccatatgtggagatagaaaagacctttaagacaataaaagattgtaggctatctctgtaatcatgcaatagctgttcggattgagaactcttcagccatgattagacgttgactgcatctccctgatagaccaatcagctgtgtcgcacttaaactggagaagttacactgaagtataatcacactgaatgttagactttttcatctgccaaaaccaaaaaccattttgatctccctgtggttatcaatataacgcacaatcacaagtgtatgaggacttagaaattaatcctttgtggtaggagttctgttgaatgatggaaatcttattactaccacaagactatttgatctggtaattggagacttcgggatttaggagatctccatgtctgtatttactctaccactgctaaagtgtgtggtcctgggtagtttacttgcttgcggaaaatgagaattgatggtgtccccaatgccccacctcacagagttactaaaaaatgtctgtaaagcatatttacctcttgggagataggcactatgtaaataaggtaaaatttctgttattacaattattcataataatattcttttcttatttctaagcctttctgggaaatcatttcagtccacaccaaccatattattcagggttcctgccatatgtgtggggtatcctactgatacacacgtattcaaagtttatgggtacaacaaagacatagtacatgtacataatatgtatgtgaatatagttaaatatatttcttcacaatattttaaactgtgaagaactttatcatacaggaaacttaaaacaagaggtgtcaaaagacccaaattaggtgcattttacttgtttatgatggcataaccattgctttaaaatgtttagacagtagaatattgaatttatgctctatttttgtttatttaagcaacacttaatgtaaaagtgcaacaggcaattgaatccaaatttcaacgacaaaaaaaaaacatgtattttagagttcatctttggcaaaatcttgtggttcagggtactagttgtttaaaagttgattcatattcttaccttgtgctgagaaaggttgcattgctgccccttatacacatgctgcagcttgatgttaaagaatttttattctttctgaagaactaattaatgtttaaagcaactgtttaatatgatggcatgtgtgtgtgtgcgtgcgtgtgtatgttctgagtccacttcttttttcctaaataacactacagggattttgtcatattagatttaatttataatttgaaaaatcatctagtgtgtgacctacaggcttagaaatggtatagtcaaagacattttatccacatttctaatagtggacttgattaagtagataagatcagcatctgtttatggtagtaggagaaatagccaaagttgaggattttatgtatgttttcctgtttacctggaaaatagcaattaattggattttttggtaaagattgccttctgtataatgtttggattatataaaattgcaaaaatgataacagcccgctttactgtactaagcctgttactttcatgacgtgtgagcagaatgccttattttgtaatcttgtttaacttgttgctactgggacttgatttactgtggcactagttaagtaagttaaaaaaaagttaaaccctctcattattaaagaggaaaggcgatggtgatgtctgtagtacaatataaaccataattgtgatttaccttaagtaggtataactcttatgggatatacagtatagtttttgtgaatctttacatgatagcattatctttttataattttttttcctaagataaacaaatgcatagttttcttctatgggtgatagaaacagctttttgaagtaatgaaaacctcaaaagatcatgttgattcttaatttttgccttttgcataagcctctttataacatgtatctttaaaacaattaagtctttaggaatgtgtaaccagaactatgttagtattgcttataaaactttagttaggttcaatatatacatatatacatctctatataggtatatagatttgcattttgtcttgtaaaattttatttgaataaattcttcctgtaggtaatgggaaacaaaattaatagttcatatgtcactcatagcatttctatatttgaaagtagcccaatataaaacttttgattctaaaattaaaccagcagcctattacaagcacattctttgattgagtcattggttataaacttactaaatgcagagaaagcagccaatttaggaaacttctgagttggtgggacactgttgattaataatgtactgtatgaattaagtgatgctttaactttgattttacattttaaagttaaaatgtgggcattatgtcagcaaacttaagggcattatgtcagcaagctaaaacattttttttcctgtgcttttaatgtatctctttacatgatctgagagaggattcaagttgatagaaatagctgaggggaaaagggggaacatcttgggatgaagcttgtccttatggtgatggtttaattacagattaaaaaattagaaggaaatttcagtggattaagtgtatagctttcatatctacatttcaagaaattaccattgtaacttgataagagatgatttattttatgtaaacatctttgcaaagcaaggtgtagcagctcagctagatttattactgtgcacgaaagtaaatacctatctcaattattctttttcttttccaatataaagtttgctgaatgtacaagaagagtttatcacttaggatatagaatttttttaggggttgggggaggggatctgttaggaaactgttacctataaacaaagattgactggattcgatccaaaagataaaacttgaagctattctggaactaacatggaaaaatgaaatggctattgtttaaaaaaatgatagaaatacattgttgatgggatatgagttaagtttattttctacaaactgtaattgatgaggacatggataatatcttcatgtttctgagaagtaatctgtatgtggggggaggggataataaatatttctaaccaaaaaaaaaaaaaaaaaaaaaaaaaaaaaaaaaaaaaaaaaaaaaaaaaaaaaaaaaaaaaaaaaaaggggggggggcgccaaaaaatatccccccggggggcgccccattcgcgcccaccctttttttgtgaaaaagggggcccccatggggggtcttattaaaccaggggggggcgcgctaaacaggggggggggaacaactacgcctgtggggcacttgtggggaagacgaggcaccccctacactcggggggggggccgaaacaatgggggggcaaccaccactccagaaagttatgtaagacgcgtaagggggataaatacacaaactagcggcgtggagctggtgggtggcagcccacaggcgcgtatatttgcgaagcagaaaagaagttgggctacccgagcgtatcgtattgacgacctttctttcgcggggctccgtgagttattacgtcgaaccaaaagtcaaaagcgaccaagagacaacgaagcgagccaggtatgaacacgagggcacgactgacggcaagacgacacgaagggaaggcaacaaagcaaaggagacacacccacaagaagcgagcaaaccgccacacacggaagacaaggcccgaaacgacgagcgaaagagagcgacaaagacagaagaagaatagatacaaaaacgcggggccacaaagcagcgcacaaagcaggcgaacaacacacaacaacacgcacgaccaacaacgacgacagcacaagcagagatccaagacagacacgagaccaagagcagacagccgagagcactaaggcccggagacgaacacacacggtgaccgaacaagcac

SEQ ID NO: 64606 - DNA, 2275 bp, Homo sapiens
gtgatttatattgtactacagacatcacaattatggttgatattgtactacagacatcaccataattgtgatttaccttaagtaggtataactcttatgggatatacagtatagtttttgtgaatctttacatgatagcattatctttttataattttttttcctaagataaacaaatgcatagttttcttctatgggtgatagaaacagctttttgaagtaatgaaaacctcaaaagatcatgttgattcttaatttttgccttttgcataagcctctttataacatgtatctttaaaacaattaagtctttaggaatgtgtaaccagaactatgttagtattgcttataaaactttagttaggttcaatatatacatatatacatctctatataggtatatagatttgcattttgtcttgtaaaattttatttgaataaattcttcctgtaggtaatgggaaacaaaattaatagttcatatgtcactcatagcatttctatatttgaaagtagcccaatataaaacttttgattctaaaattaaaccagcagcctattacaagcacattctttgattgagtcattggttataaacttactaaatgcagagaaagcagccaatttaggaaacttctgagttggtgggacactgttgattaataatgtactgtatgaattaagtgatgctttaactttgattttacattttaaagttaaaatgtgggcattatgtcagcaaacttaagggcattatgtcagcaagctaaaacattttttttcctgtgcttttaatgtatctctttacatgatctgagagaggattcaagttgatagaaatagctgaggggaaaagggggaacatcttgggatgaagcttgtccttatggtgatggtttaattacagattaaaaaattagaaggaaatttcagtggattaagtgtatagctttcatatctacatttcaagaaattaccattgtaacttgataagagatgatttattttatgtaaacatctttgcaaagcaaggtgtagcagctcagctagatttattactgtgcacgaaagtaaatacctatctcaattattctttttcttttccaatataaagtttgctgaatgtacaagaagagtttatcacttaggatatagaatttttttaggggttgggggaggggatctgttaggaaactgttacctataaacaaagattgactggattcgatccaaaagataaaacttgaagctattctggaactaacatggaaaaatgaaatggctattgtttaaaaaaatgatagaaatacattgttgatgggatatgagttaagtttattttctacaaactgtaattgatgaggacatggataatatcttcatgtttctgagaagtaatctgtatgtggggggaggggataataaatatttctaaccaaaaaaaaaaaaaaaaaaaaaaaaaaaaaaaaaaaaaaaaaaaaaaaaaaaaaaaaaaaaaaaaaaaggggggggggcgccaaaaaatatccccccggggggcgccccattcgcgcccaccctttttttgtgaaaaagggggcccccatggggggtcttattaaaccaggggggggcgcgctaaacaggggggggggaacaactacgcctgtggggcacttgtggggaagacgaggcaccccctacactcggggggggggccgaaacaatgggggggcaaccaccactccagaaagttatgtaagacgcgtaagggggataaatacacaaactagcggcgtggagctggtgggtggcagcccacaggcgcgtatatttgcgaagcagaaaagaagttgggctacccgagcgtatcgtattgacgacctttctttcgcggggctccgtgagttattacgtcgaaccaaaagtcaaaagcgaccaagagacaacgaagcgagccaggtatgaacacgagggcacgactgacggcaagacgacacgaagggaaggcaacaaagcaaaggagacacacccacaagaagcgagcaaaccgccacacacggaagacaaggcccgaaacgacgagcgaaagagagcgacaaagacagaagaagaatagatacaaaaacgcggggccacaaagcagcgcacaaagcaggcgaacaacacacaacaacacgcacgaccaacaacgacgacagcacaagcagagatccaagacagacacgagaccaagagcagacagccgagagcactaaggcccggagacgaacacacacggtgaccgaacaagcac

SEQ ID NO: 64607 - DNA, 1421 bp, Homo sapiens
tgttcagaggatcccccttattccttgtccttatggtgatggtttaattacagattaaaaaattagaaggaaatttcagtggattaagtgtatagctttcatatctacatttcaagaaattaccattgtaacttgataagagatgatttattttatgtaaacatctttgcaaagcaaggtgtagcagctcagctagatttattactgtgcacgaaagtaaatacctatctcaattattctttttcttttccaatataaagtttgctgaatgtacaagaagagtttatcacttaggatatagaatttttttaggggttgggggaggggatctgttaggaaactgttacctataaacaaagattgactggattcgatccaaaagataaaacttgaagctattctggaactaacatggaaaaatgaaatggctattgtttaaaaaaatgatagaaatacattgttgatgggatatgagttaagtttattttctacaaactgtaattgatgaggacatggataatatcttcatgtttctgagaagtaatctgtatgtggggggaggggataataaatatttctaaccaaaaaaaaaaaaaaaaaaaaaaaaaaaaaaaaaaaaaaaaaaaaaaaaaaaaaaaaaaaaaaaaaaaggggggggggcgccaaaaaatatccccccggggggcgccccattcgcgcccaccctttttttgtgaaaaagggggcccccatggggggtcttattaaaccaggggggggcgcgctaaacaggggggggggaacaactacgcctgtggggcacttgtggggaagacgaggcaccccctacactcggggggggggccgaaacaatgggggggcaaccaccactccagaaagttatgtaagacgcgtaagggggataaatacacaaactagcggcgtggagctggtgggtggcagcccacaggcgcgtatatttgcgaagcagaaaagaagttgggctacccgagcgtatcgtattgacgacctttctttcgcggggctccgtgagttattacgtcgaaccaaaagtcaaaagcgaccaagagacaacgaagcgagccaggtatgaacacgagggcacgactgacggcaagacgacacgaagggaaggcaacaaagcaaaggagacacacccacaagaagcgagcaaaccgccacacacggaagacaaggcccgaaacgacgagcgaaagagagcgacaaagacagaagaagaatagatacaaaaacgcggggccacaaagcagcgcacaaagcaggcgaacaacacacaacaacacgcacgaccaacaacgacgacagcacaagcagagatccaagacagacacgagaccaagagcagacagccgagagcactaaggcccggagacgaacacacacggtgaccgaacaagcac

SEQ ID NO: 64608 - DNA, 2390 bp, Homo sapiens
  misc_feature (797)..(797): n is a, c, g, or t
gctgccctccccgtcagccgccctcgccgccgcggtgcgctggctgcaggaagccgccgcgccgccgcttttgttgtcagggacccagcgaggagcgccgctcgccggccgccgccaccctctctcgctgcagcctgctgtgcgctgcacggcctggggcccgggcgcccccgcgtctgcccatgagggggccccgcgaccaccgctgcttccagcccggggcggcgcggcgctgaggcggcggcggcggcggcctgccccctctgcgggaagcgggcggccccggccgcctccgcgagggcaccatggaggtgaatgcaggaggtgtgattgcctatatcagttcttccagctcagcctcaagccctgcctcttgtcacagtgagggttctgagaatagtttccagtcctcctcctcttctgttccatcttctccaaatagctctaattctgataccaatggtaatcccaagaatggtgatctcgccaatattgaaggcatcttgaagaatgatcgaatagattgttctatgaaaacaagcaaatcgagtgcacctgggatgacaaaaagtcatagtggtgtgacaaaatttagtggcatggttctactgtgtaaagtctgtggggatgtggcgtcaggattccactatggagttcatgcttgcgaaggctgtaagggtttctttcggagaagtattcaacaaaacatccagtacaagaagtgcctgaagaatgaaaactgttctataatgagaatgaataggaacagatgtcagcaatgtcgcttcaaaaagtgnctgtctgttggaatgtcaagagatgctgttcggtttggtcgtattcctaagcgtgaaaaacagaggatgctaattgaaatgcaaagtgcaatgaagaccatgatgaacagccagttcagtggtcacttgcaaaatgacacattagtagaacatcatgaacagacagccttgccagcccaggaacagctgcgacccaagccccaactggagcaagaaaacatcaaaagctcttctcctccatcttctgattttgcaaaggaagaagtgattggcatggtgaccagagctcacaaggatacctttatgtataatcaagagcagcaagaaaactcagctgagagcatgcagccccagagaggagaacggattcccaagaacatggagcaatataatttaaatcatgatcattgcggcaatgggcttagcagccattttccctgtagtgagagccagcagcatctcaatggacagttcaaagggaggaatataatgcattacccaaatggtcatgccatttgtattgcaaatggacattgtatgaacttctccaatgcttatactcaaagagtatgtgatagagttccgatagatggattttctcagaatgagaacaagaatagttacctgtgcaacactggaggaagaatgcatctggtttgtccaatgagtaagtctccatatgtggatcctcataaatcaggacatgaaatctgggaagaattttcgatgagcttcactccagcagtgaaagaagtggtggaatttgcaaagcgtattcctgggttcagagatctctctcagcatgaccaggtcaaccttttaaaggctgggacttttgaggttttaatggtacggttcgcatcattatttgatgcaaaggaacgtactgtcacctttttaagtggaaagaaatatagtgtggatgatttacactcaatgggagcaggggatctgctaaactctatgtttgaatttagtgagaagctaaatgccctccaacttagtgatgaagagatgagtttgtttacagctgttgtcctggtatctgcagatcgatctggaatagaaaacgtcaactctgtggaggctttgcaggaaactctcattcgtgcactaaggaccttaataatgaaaaaccatccaaatgaggcctctatttttacaaaactgcttctaaagttgccagatcttcgatctttaaacaacatgcactctgaggagctcttggcctttaaagttcacccttaaggcctttgtttatttaaacatgaactgatggtaactgtacattttgtgctaaaatgcatatttatatgtgtataccatatgtggagatagaaaagacctttaagacaataaaagattgtaggctatctctgtaatcatgcaatagctgttcggattgagaactcttcagccatgattagacgttgactgcatctccctgatagaccaatcagctgtgtcgcacttaaactggagaagttacactgaagtataatcacactgaatgttagactttttccccaaaaccttgtgatctccctgtggttatctatataacgcacatcaccccgggattctggaccgccg

SEQ ID NO: 64609 - DNA, 1717 bp, Homo sapiens
ctctgttgcccaggctgcagtgcagtggtgtgatctcggctcactgcaacctccacctcccgggttcaagcaattctcttgcctcagcttctccagttactgggactacaggtgcataccaccatgcccggctaatttttgtatttttagtagaggcggggttttgtcatgttggccaggctgatctcaaactcctgacctcaggtgatccgcctgcctcagccttccaaagtgctgagattacaggcatgagccgctgtacccggcctgattttctatgattctgcctttaaaagacagcacgtataccaagcctttttcagaaagcttttctcttaactccttctaatgctgaattttctctctattatcctcacccaattttggctgagagttagtgtacacaatttaacttcttagaaaaattccagtgtctatgcttatattgctcacttgaatcatttgaattagaaagggatctacaaataataaaagcaaagagtgcagacagattagggatagtaattcttaaagtgccatctatcccagatttccgttatagaccagcatatgtgtaattgtgcagtgggaggtaagtagtacccaggacattgcatgtacaatactttgaaacaaagtggcaacaaagatttcctggctcaggtatgcaccccagctgctggtttagatgaagtgctgagaatatttagaaaaagcgctttaaaaagcatctagagattatcatgaaaataattggagacaaagtcactaggctgctttgtgagaggcagcataccatggctctaaacccgttcacaaaaaaacaatgttagagacattaggaattcaggttttgaaaatctttttttcgatttatttgtaatttacataccaaaaaaccacattaaaatagtcctcccttcaacatggctatcttttttcaagttttatatgcatagctctctcagcacttgaatggaaaaactgttacagcatttgggagttgtttttcttttagacatttgcagatcttatctcaaggtgactaggaacccagagctaagtatctgtgaggcaatctctgcgaacgctgaacttacctagttggtttctatgaaatatgtagaatgcactgcagtagccattgtaagaaggtactataccggttttttggggcttgttgttgttgtttggtctgagaatgtactgccaacccctcttttataagagagaactgattttgatacatattttaaaatatgatagtacagagttaatggatgttaaaattttatttctttgttttggtaagtagattaaatcgagaatcatataatcagtacatttgagaattatataaccagtatataataatactggacacaaccatttgccatcttttcctgttatcatcccatagagtgggtggggagaatgaatagacataaacctagaataatgataaatggtttttaaaactctatattgaatacattccagctgataatgacttttctttttcaccttggtgatatcagcctcagggtaaaaaaaaaagtttcataaatcttttagttataaacaggaaagttttatattagtgtgtcatttcatttctagactgttgatggtgatgatgataaagaatttggagccaattttgatatatgaatgtattgcttttacatgtgatgattaaagctctccattagcagtt

SEQ ID NO: 64610 - DNA, 644 bp, Homo sapiens
tccggcgtccagtcttcgtccgccgttaggttgcggctgctgtggttgccaacgctacactgggtagaacgccagacaggggccacttttcgagaccgagtagagacggacagtgaggaggataggacccacttacacgcttttatgtcagccgcgatcccacccccacaagcgtctgcaaaacccttcctggggccttggcgacagccctgtgtcctcacggcgcgcagaggcggcgccgcgaaccttgtgtgcattttacacgacggcggggactgaggtccctcgcagcccagagccggagcccggggtcggccgagcccgcaggaccggcttcctcgccgactctcacggcctcacccagccccctgggcccatggcggcgccggcgttgtgctcggagagcatcactctaggtgccgtctttgaagaaggactctctaggtcctgctgttgttttaggggatcattccagcggaagtctggccctaccaaaagctgggagagggaatgagagcctcgagggcaagaggtgaggcgggagcagcatttttggcaggaggctagaagacaagaagctcattggatttatctttgcagatgccgtctgtttattacaaatgaatctggcttgccgcctaaca

SEQ ID NO: 64611 - DNA, 967 bp, Homo sapiens
tccggcgtccagtcttcgtccgccgttaggttgcggctgctgtggttgccaacgctacactgggtagaacgccagacaggggccacttttcgagaccgagtagagacggacagtgaggaggataggacccacttacacgcttttatgtcagccgcgatcccacccccacaagcgtctgcaaaacccttcctggggccttggcgacagccctgtgtcctcacggcgcgcagaggcggcgccgcgaaccttgtgtgcattttacacgacggcggggactgaggtccctcgcagcccagagccggagcccggggtcggccgagcccgcaggaccggcttcctcgccgactctcacggcctcacccagccccctgggcccatggcggcgccggcgttggcattagtatcatttgaagacgtggttgtgaccttcactggagaggaatgggggcacctggacctggcccagaggaccctgtaccaggaggtgatgctggagacctgcaggctcctggtctcactggggcatcctgttcccaaaccagagctgatctatctactggaacatggacaggaactgtggacagtgaagagaggcctctcccaaagcacctgcgcaggttggtgactgagagtctggcagcgggtatcagggcagcctgcagaccacccaggcatcactgtgtctgaaatgccatgggcagctattttgtggtcttgagcagtcatggagcccttgaccccatggtcccccgtcttcccacttctgtcacacactctttgcctttattcaggttggaatatgttaggtaggagacagattctaggctttaatgatttgccactcactagcctcatgactctggagaggttgtgtgacgtcactgtgcctttggtatataagttaggctgagttaatgaccttctctgaaaaataaactccaaaatcatgtgactcaacagaaaaaaa

SEQ ID NO: 64612 - DNA, 1537 bp, Homo sapiens
tccggcgtccagtcttcgtccgccgttaggttgcggctgctgtggttgccaacgctacactgggtagaacgccagacaggggccacttttcgagaccgagtagagacggacagtgaggaggataggacccacttacacgcttttatgtcagccgcgatcccacccccacaagcgtctgcaaaacccttcctggggccttggcgacagccctgtgtcctcacggcgcgcagaggcggcgccgcgaaccttgtgtgcattttacacgacggcggggactgaggtccctcgcagcccagagccggagcccggggtcggccgagcccgcaggaccggcttcctcgccgactctcacggcctcacccagccccctgggcccatggcggcgccggcgttgtgctcggagagcatcactctaggtgccgtctttgaagaaggactctctaggtcctgctgttgttttaggggatcattccagcggaagtctggccctaccaaaagctgggagagggaatgagagcctcgagggcaagaggcattagtatcatttgaagacgtggttgtgaccttcactggagaggaatgggggcacctggacctggcccagaggaccctgtaccaggaggtgatgctggagacctgcaggctcctggtctcactggggcatcctgttcccaaaccagagctgatctatctactggaacatggacaggaactgtggacagtgaagagaggcctctcccaaagcacctgcgcagcttccttctcacttctgtggaagagttatcatcctggccatggctaatttctccagcagaatctagattacactttctgccttctcaggtgtattagccatctactattaatatgtaacaatattaccacaaaccctgcagctgaaaacatcacttatttattatctcccacctatggattgggagtccaggcacagcttagctgggtcctctcaggcgtgtcataggcagctcatagctcatcatcaccatcagctcacttcttcaaatcaagccactgtgtgagactccagcaagacggatgttccagtcttataaaattacatatattttatcatgtacattccatcatctttgccatattctatactttagaagcaaatcgaggtcctgccaacattttaacaggggaactacaaaagggtgtgaacactatgacttggggatcatgagaagccatacgtgaatctctcagctgcatcagggaacatgcttcttcacttacttcctacctcttctatattttcatcccctctctactcaacattaaaaaaaaatgatgatgtttctgatacctgggggagacttttttttttttagtgctcttacgtctccagcagcatctacatattgttgactctatttcacctgaacagccaagcttgttggagaagtcttctcattctttgaagagacatctacacaagactttcctttatttattttttcccttatttttgtactgaggtgcaatttatacataataagtgtacaaatcataa

SEQ ID NO: 64613 - DNA, 1105 bp, Homo sapiens
tccggcgtccagtcttcgtccgccgttaggttgcggctgctgtggttgccaacgctacactgggtagaacgccagacaggggccacttttcgagaccgagtagagacggacagtgaggaggataggacccacttacacgcttttatgtcagccgcgatcccacccccacaagcgtctgcaaaacccttcctggggccttggcgacagccctgtgtcctcacggcgcgcagaggcggcgccgcgaaccttgtgtgcattttacacgacggcggggactgaggtccctcgcagcccagagccggagcccggggtcggccgagcccgcaggaccggcttcctcgccgactctcacggcctcacccagccccctgggcccatggcggcgccggcgttgtgctcggagagcatcactctaggtgccgtctttgaagaaggactctctaggtcctgctgttgttttaggggatcattccagcggaagtctggccctaccaaaagctgggagagggaatgagagcctcgagggcaagaggcattagtatcatttgaagacgtggttgtgaccttcactggagaggaatgggggcacctggacctggcccagaggaccctgtaccaggaggtgatgctggagacctgcaggctcctggtctcactggggcatcctgttcccaaaccagagctgatctatctactggaacatggacaggaactgtggacagtgaagagaggcctctcccaaagcacctgcgcaggttggtgactgagagtctggcagcgggtatcagggcagcctgcagaccacccaggcatcactgtgtctgaaatgccatgggcagctattttgtggtcttgagcagtcatggagcccttgaccccatggtcccccgtcttcccacttctgtcacacactctttgcctttattcaggttggaatatgttaggtaggagacagattctaggctttaatgatttgccactcactagcctcatgactctggagaggttgtgtgacgtcactgtgcctttggtatataagttaggctgagttaatgaccttctctgaaaaataaactccaaaatcatgtgactcaacagaaaaaaa

SEQ ID NO: 64614 - DNA, 343 bp, Homo sapiens
tgtgtgtaaccctttgaggtacaacatcattatgaacagcagcaccttcatttgggtgataattgtgtcatgggttttggggtttctttctgaaatctggccagtttatgccacttttcagcttactttctgcaaatcaagtgtgttagatcatttttattgtgaccgaggacaattgctcaaggtatcctgtgaggacactcttttcagagagtttattctttttctaatggctgttttcattatcattggttctttgatccctacgattgtctcctacacctacatcatctccaccaacctcaagattccgtcagcctctggctggaggaaatccttttcc

SEQ ID NO: 64615 - DNA, 826 bp, Homo sapiens
aaatgttcaaggtctatctgctgaagaaataagaaatggaaacttaaaagccattctagggctgtttttcagtttatctcgctacaagcagcaacaacaccatcaacaacagtactatcagtccttggtggaacttcagcagcgagttactcacgcttcccctccatcggaagccagccaggccaaaacccagcaagatatgcagtccaggcttccagggccctctagggtgcctgctgcaggaagcagcagcaaggtccagggagcctctaatttaaataggagaagtcagagctttaacagcattgacaaaaacaagcctccaaattatgcaaatggaaacgaaaaagattcctccaaaggacctcaatcgtcttcaggtgtaaatggtaacgtgcagcctcccagtactgctgggcagcctcctgcctctgccatcccttctccaagtgccagcaagccctggcgcagcaagtccatgaatgtcaaacacagtgccacctccaccatgttgactgtaaagcagtcaagtacagccacctcccccacaccatcttcagacagactgaagccacctgtctcagaaggggtcaaaactgctccctcaggacagaaatccatgcttgagaaattcaagctagtcaatgcccggactgctttacgccccccgcagcctcccagttcaggacctagtgatggtgggaaggatgatgatgccttttctgaatctggtgaaatggaaggttttaacagtggtctgaatagtggtggctcaacaaatagcagtcccaaagtgtcacctaagttggcccctccaaaagctgga

SEQ ID NO: 64616 - DNA, 770 bp, Homo sapiens
aaatgttcaaggtctatctgctgaagaaataagaaatggaaacttaaaagccattctagggctgtttttcagtttatctcgctacaagcagcaacaacaccatcaacaacagtactatcagtccttggtggaacttcagcagcgagttactcacgcttcccctccatcggaagccagccaggccaaaacccagcaagatatgcagtccaggcttccagggccctctagggtgcctgctgcaggaagcagcagcaaggtccagggagcctctaatttaaataggagaagtcagagctttaacagcattgacaaaaacaagcctccaaattatgcaaatggaaacgaaaaagattcctccaaaggacctcaatcgtcttcaggtgtaaatggtaacgtgcagcctcccagtactgctgggcagcctcctgcctctgccatcccttctccaagtgccagcaagccctggcgcagcaagtccatgaatgtcaaacacagtgccacctccaccatgttgactgtaaagcagtcaagtacagccacctcccccacaccatcttcagacagactgaagccacctgtctcagaagggtgcccggactgctttacgccccccgcagcctcccagttcaggacctagtgatggtgggaaggatgatgatgccttttctgaatctggtgaaatggaaggttttaacagtggtctgaatagtggtggctcaacaaatagcagtcccaaagtgtcacctaagttggcccctccaaaagctgga

SEQ ID NO: 64617 - DNA, 775 bp, Homo sapiens
aaatgttcaaggtctatctgctgaagaaataagaaatggaaacttaaaagccattctagggctgtttttcagtttatctcgctacaagcagcaacaacaccatcaacaacagtactatcagtccttggtggaacttcagcagcgagttactcacgcttcccctccatcggaagccagccaggccaaaacccagcaagatatgcagtccaggcttccagggccctctagggtgcctgctgcaggaagcagcagcaaggtccagggagcctctaatttaaataggagaagtcagagctttaacagcattgacaaaaacaagcctccaaattatgcaaatggaaacgaaaaagctcccagtactgctgggcagcctcctgcctctgccatcccttctccaagtgccagcaagccctggcgcagcaagtccatgaatgtcaaacacagtgccacctccaccatgttgactgtaaagcagtcaagtacagccacctcccccacaccatcttcagacagactgaagccacctgtctcagaaggggtcaaaactgctccctcaggacagaaatccatgcttgagaaattcaagctagtcaatgcccggactgctttacgccccccgcagcctcccagttcaggacctagtgatggtgggaaggatgatgatgccttttctgaatctggtgaaatggaaggttttaacagtggtctgaatagtggtggctcaacaaatagcagtcccaaagtgtcacctaagttggcccctccaaaagctgga

SEQ ID NO: 64618 - DNA, 111 bp, Homo sapiens
ctcgcctcgggatattcagaagtgctagtccagttctggcagcctgaactcttcctcctccaaggtgaaatccgagaatactcttccttccagggagagcgactgacctgc

SEQ ID NO: 64619 - DNA, 385 bp, Homo sapiens
tggaaatggagtctcactgtgtcgcccaggatggagtgcagtggcgcgatctccgctcactgcaacctccacctcctgggttcaagcgattcttctgcctcagcttcccaagtagctgggattacaggtgtcctccaacacaccctgctaatttttgtgtttttagtagagacagggttttaccatgttggccaggctggtctcgaatgcctgacctccggtgatccacccgccttggcctcccaaagtgttgagattacaggcctgagccatcgcacccagcctcaggtcaggttttgaagccaaatgagatgtgaaaaaaaattttggttttcagaggtttttggattttggaattgcacataagggactgtggatgtgcgta

SEQ ID NO: 64620 - DNA, 442 bp, Homo sapiens
acattttctattaaacattggagtcatcctgatagacatctttgtaacttcctgtcaaaacaacatgtgggacaggcgtggtggctcatgtgtgtaattccagcactttgggaggccaaagtggaagaactgcttgagcccgggaatttgagagcagtctgggccacaaagtgagaacccagctctacaaaaaataaaataattagccggagtggtggctcacacctgtagtcccagctacttggaagactgaggcaggaagattgcttgagcccaggaaatcagggccacagtgagttatgatcacaccactgcactccagcctgggcagctgagtgagaccctgtctcaaaaacaaacaaaaaaacccaacgtattatgaattatttttccatagcagtaaatgtactatatttctattaaattattgtctttaaacaaa

SEQ ID NO: 64621 - DNA, 1387 bp, Homo sapiens
ggatccagaagggtcattcaatcagttctcagtcttatcaggtctaagttcctttcttatcaggtcctaaaggcctaatcttatcattgtgacaaagataactgtagagtctgttaaacttttttttaataacatgaagattatgatttatagctgaatttctcccttttattccaattcaacaattttcatggctttttgtgtttgttttgttctggacatatttacagaaaattacctgaagagttccaacctgaggcctcctcatggatgggtcaaacgtgacatcatttgttgttgaggaacccacgaacatctcaactggcaggaacgcctcagtcgggaatgcacatcggcaaatccccatcgtgcactgggtcattatgagcatctccccagtggggtttgttgagaatgggattctcctctggttcctgtgcttccggatgagaagaaatcccttcactgtctacatcacccacctgtctatcgcagacatctcactgctcttctgtattttcatcttgtctatcgactatgctttagattatgagctttcttctggccattactacacaattgtcacattatcagtgacttttctgtttggctacaacacgggcctctatctgctgacggccattagtgtggagaggtgcctgtcagtcctttaccccatctggtaccgatgccatcgccccaagtaccagtcggcattggtctgtgcccttctgtgggctctttcttgcttggtgaccaccatggagtatgtcatgtgcatcgacagagaagaagagagtcactctcggaatgactgccgagcagtcatcatctttatagccatcctgagcttcctggtcttcacgcccctcatgctggtgtccagcaccatcttggtcgtgaagatccggaagaacacgtgggcttcccattcctccaagctttacatagtcatcatggtcaccatcattatattcctcatcttcgctatgcccatgagactcctttacctgctgtactatgagtattggtcgacctttgggaacctacaccacatttccctgctcttctccacaatcaacagtagcgccaaccctttcatttacttctttgtgggaagcagtaagaagaagagattcaaggagtccttaaaagttgttctgaccagggctttcaaagatgaaatgcaacctcggcgccagaaagacaattgtaatacggtcacagttgagactgtcgtctaagaactgtgagggaagttgtggataaaaatggtggaacacaggtcatttttagtttgtgcttggaatatgacttaagtatctcctaaatgtgatacagaagaacatctcatcccatatgcatgagatactaattaatgatgaaa

SEQ ID NO: 64622 - DNA, 425 bp, Homo sapiens
atgatgatgaactccctgagcttttgtcagagaaagtatcactccttcatttttgtagaccaacttttctggaaactgctcattcaatgactaatcgatttaatgccatgttgaaagtatttgaaaaccaggcaaatatgttggagaggaggaaaaaaaagcctatttaatgaactcagaaaaaatgaagacaaaagaaacataaaatgaacatatggccttttccatgatacatgctgttattttacctgtcttctattactcatgtgttattcatctttcttccagatttgcatatttctccatttatacatagggaattgggaacttttagaagtttttccctgtctctgatggattggacaatgtttgcaattctaggagacatctgattattctttcaaaataaatttatcagaaggagt

SEQ ID NO: 64623 - DNA, 4442 bp, Homo sapiens
gcgacgccggcggcgccaaggcgtcgtggcgtcgggcgcctgggacgtggcttcaacggccccatccggcgccggcggcgggtgcccggcggtctttgctgccgcccgggggcgcagaggccgggccttttctttcagcacaaacgtcagtttgtaaaagggaggtgctggagtctgaggagttttcaggcttccgtctcgaaggaagtctggcaggctcggaattgtcatcttcctcaggcaaatagtttttcaccttagagccagcaaggccaaaccgcccagtcacccgacttcccacagtctcagcaggtacacagggcggggagcctcgggagcggctcccttagcaggacctgagggtttcgggagagtcctggctttgcacttagttttcccgctgcctggctgcctccgtggcggttgtgctgctttttatgcaggatgtaggatcgaaggcaaatcatcctttccctacgtcccctgccaacccctgccgctctcctctattttgtacactttatcattaaaggatttgaaatgaatggaggaataagtttttttcatctgtaatttggaagccaagtcagtaacaaaatgaaaccagtaaagcatctgttgaccaccagtaacaaatcggcaaatgttccagcattaactactaaaaaaggactacataatttaccattatcacctgagctaaaggaaaaacataatgcaaaattaattcatgataaaattgaaccaatggtcctaagatctccaccaacaggagaatccattttacggtatgctttgcccattccatcgagtaagacaaagaacttactaccagaagatgaaatgatcggaaaaattatcaaacatctgaagatggttgtttccactttggaagaaacctatggacattgcgatcagaatggagaagaaccatttgtaaagcatgaacatgaagaattatctttatctgttggggatgatatgaattcattcttgacatattgttcgcaatttgcagctcagctagaagaagcacttaaagaagaacaaaatatttggaatctctttttaagtggtttcagtggcaggtcaatcagatggaagaaataagtaaagatcaaactcttttacaagcagagcctccaaaacctgacaaaacagtcattttaaatattgcagaaatagtaaggcttgtacaaagatttgaagaactgaagaatcgccttaaacagaggtctaaatcctccgtgaaagtcatgttgtctaaaactatggataaagaaaatcgaccagaagcagtgaaaagttgtgaagctctggcacagaaaattgaagaattcttagaagcccactcaactgatgaatttaaagatgtttctgcaacagaaccacaaactgctcattcaatgactaatcgatttaatgccatgttgaaagtatttgaaaaccaggcaaatatgttggagagaaaactaagcctacaaataatcgaacaaagaaagctgtgaaaacagtgaagaaaaaagacaaaggaaaatctgaggattcagaaaagaagatgtctccagaaaaagagtttaaaataaaagaagatttggatcaagtacagaaagtagcacgtctggaaattgagaacaaagtccttcaggagcaattgaaacaggctttacaggaagctgaaaaagctaagcatcaacttaactatttcctaaatcaagagaagttacttaaaagtgaggggaaaactgagacaacaatgcaagtgggtaatagtcaaacaaaagttaaaggtgaagattcaaaaaatataccattggagaaagaaacaagaaaatcactggtttcagattcaggtggacaaaggacaagtgataaaatccaagaatatccacagctcagagaagaaacgatctagccctgctatttcagatctttcacagatccttaagtctcaagatgaatcagcatttttagagagttcaaatgaagtttcagttgctgaaaaccaatcctataaatctccatcagagacccatgataaatcacttacaacagtatcatccagcaaagaagttcaagattcactgtctgttggaacattggctcaaaaaaacgaaacagtgatatcaccattcattttacctcctgttcttacagaaagtaaaaaggctgatgtttcagaagaacaattacaaaagatgactgaagaacaaacttaccaagcagcagaaaaatctcaagctcataatgaagtaccaaatgaaaggcttgtagttgagcatcaagaatcattgtcaaaaaccaaattacaagtaaagaaacaagaaacttctacagagcaaccactcaccactcctgataaagaaccaaatgaaaatcttatacttaggcatcaagactcaatgtcaaaatcagaaatgcaagtgaaggaacaaagaactctcaaagggcaaagaattattactcatgatgaagaaccaggcaaaaatcttgtgcctgaacatcaagattcagtgtcaaaactggaaatgcaaattgaaaaaaccaaaaaacttcctagagagaaaagacatagtactcatgatgaagaatcaggtgaaaatcctatgcttaaacatcaagattcagtgtcaaaaatccaagtgcaattagagattcaagaaacttctgaaggagaaggacgtagcataccagataaaaattctatgtttgttcatcaagattcagtgtcaaaactccaaatgcaagaaaagaaaaaaataactcctggaagggaaaggcgtaatactcgtattgtagtaccaaatgaaagtgtgatttctgttcatcaagattcaaagtcaaaactccaaatgcaagaaaagaaacaaataaattctggagtggaaagacacaagacgtttcctttagaaatcaaaaaaaaggatatatcacttgaacatctgttgcctgaggagaaagttttattatcaagaagcgaatctcaaaccaagaaacttcaagctaaagtaacttcaagaaaaaagactgatatagaaagcttgagaggtgctttgggaagacgcttattaaatgatgaattcaagacacagtcaaagagtttccctgggcctgatatagaacaattgacagatgcatttggaagagatatactaaaggatgaattcaagacacgatcaaagagtctccctgagactgatgaacgattgcatagtacaactgagagaggtacaataaatgatgcaattaagacgcagttaaagagaaagagttaccctgagactgtcttaaaacacttgaaaggtgttaatggaaaagatataataaagcatctaatcaacatacagtcaaagagtcatgcagagactgataagaacttctttgcctatgctactggaagaggtctaatgaaggagtcaaccacgacacaattaaaaagtcacccagagactgataaggaattcttggcagatgctattggaagaggtataataatagggccaatcactacacaactgaagagtcaccgagagactgataaagaactcttaaaagatgctattggaagagatataataaagggaccaatcagtgcacaattaaagagtcaccaggagactgatgtagaacccttgacaaatgccattggttcaagtaaaacaattggtgagataaagacacaactaaggactcactatgatgtgaacttatttaaaaacaaagatatgtccgtacaacgtcaagaaggtatctttactaggagcattacaccaagtaaattcccaacaaaagtgatcaatttatcaccctttgaaaataaagaggaaacttatgagtactcttcaccctatgtgactgcaccttcaaaagcaatttatagaacatatagggctggtccaagcttttctaaagacatccaccttcctttactgaatcaactcccttcagggcattcgaaagttgttaccttaagccaaaaaactattgaatttactctgcctactgtgaccaatacaattggaaaacctacctataaagtgttacatgctgctgcccgaaaatctgtaccacacccatacttttgagaatgaaggaaattctgagcaagataagcaacatgacaaattcagaaatgcaggaaaggaaatcgcaagtatagaagccttttgaaaataatactgactcgtgtggatggtgcttattgaaaaacagctggaaatacagtggatcaacagggtaggcccagatcacagaaggcctgaccaggcagtgaatgtgtctttaccatatggaacaattttgaacttctaagatcaagcctttttgttgctgagggtaagaaaggagctctgtgatgaggttccagcttacttctattcgccagtgtccctgtaatgctttctggtgtgatgtaaaatcaattaaacaaaacttgtgctctg

SEQ ID NO: 64624 - DNA, 4208 bp, Homo sapiens
gcgacgccggcggcgccaaggcgtcgtggcgtcgggcgcctgggacgtggcttcaacggccccatccggcgccggcggcgggtgcccggcggtctttgctgccgcccgggggcgcagaggccgggccttttctttcagcacaaacgtcagtttgtaaaagggaggtgctggagtctgaggagttttcaggcttccgtctcgaaggaagtctggcaggctcggaattgtcatcttcctcaggcaaatagtttttcaccttagagccagcaaggccaaaccgcccagtcacccgacttcccacagtctcagcagggaggaataagtttttttcatctgtaatttggaagccaagtcagtaacaaaatgaaaccagtaaagcatctgttgaccaccagtaacaaatcggcaaatgttccagcattaactactaaaaaaggactacataatttaccattatcacctgagctaaaggaaaaacataatgcaaaattaattcatgataaaattgaaccaatggtcctaagatctccaccaacaggagaatccattttacggtatgctttgcccattccatcgagtaagacaaagaacttactaccagaagatgaaatgatcggaaaaattatcaaacatctgaagatggttgtttccactttggaagaaacctatggacattgcgatcagaatggagaagaaccatttgtaaagcatgaacatgaagaattatctttatctgttggggatgatatgaattcattcttgacatattgttcgcaatttgcagctcagctagaagaagcacttaaagaagaacaaaatatttggaatctctttttaagtggtttcagtggcaggtcaatcagatggaagaaataagtaaagatcaaactcttttacaagcagagcctccaaaacctgacaaaacagtcattttaaatattgcagaaatagtaaggcttgtacaaagatttgaagaactgaagaatcgccttaaacagaggtctaaatcctccgtgaaagtcatgttgtctaaaactatggataaagaaaatcgaccagaagcagtgaaaagttgtgaagctctggcacagaaaattgaagaattcttagaagcccactcaactgatgaatttaaagatgtttctgcaacagaaccacaaactgctcattcaatgactaatcgatttaatgccatgttgaaagtatttgaaaaccaggcaaatatgttggagagaaaactaagcctacaaataatcgaacaaagaaagctgtgaaaacagtgaagaaaaaagacaaaggaaaatctgaggattcagaaaagaagatgtctccagaaaaagagtttaaaataaaagaagatttggatcaagtacagaaagtagcacgtctggaaattgagaacaaagtccttcaggagcaattgaaacaggctttacaggaagctgaaaaagctaagcatcaacttaactatttcctaaatcaagagaagttacttaaaagtgaggggaaaactgagacaacaatgcaagtgggtaatagtcaaacaaaagttaaaggtgaagattcaaaaaatataccattggagaaagaaacaagaaaatcactggtttcagattcaggtggacaaaggacaagtgataaaatccaagaatatccacagctcagagaagaaacgatctagccctgctatttcagatctttcacagatccttaagtctcaagatgaatcagcatttttagagagttcaaatgaagtttcagttgctgaaaaccaatcctataaatctccatcagagacccatgataaatcacttacaacagtatcatccagcaaagaagttcaagattcactgtctgttggaacattggctcaaaaaaacgaaacagtgatatcaccattcattttacctcctgttcttacagaaagtaaaaaggctgatgtttcagaagaacaattacaaaagatgactgaagaacaaacttaccaagcagcagaaaaatctcaagctcataatgaagtaccaaatgaaaggcttgtagttgagcatcaagaatcattgtcaaaaaccaaattacaagtaaagaaacaagaaacttctacagagcaaccactcaccactcctgataaagaaccaaatgaaaatcttatacttaggcatcaagactcaatgtcaaaatcagaaatgcaagtgaaggaacaaagaactctcaaagggcaaagaattattactcatgatgaagaaccaggcaaaaatcttgtgcctgaacatcaagattcagtgtcaaaactggaaatgcaaattgaaaaaaccaaaaaacttcctagagagaaaagacatagtactcatgatgaagaatcaggtgaaaatcctatgcttaaacatcaagattcagtgtcaaaaatccaagtgcaattagagattcaagaaacttctgaaggagaaggacgtagcataccagataaaaattctatgtttgttcatcaagattcagtgtcaaaactccaaatgcaagaaaagaaaaaaataactcctggaagggaaaggcgtaatactcgtattgtagtaccaaatgaaagtgtgatttctgttcatcaagattcaaagtcaaaactccaaatgcaagaaaagaaacaaataaattctggagtggaaagacacaagacgtttcctttagaaatcaaaaaaaaggatatatcacttgaacatctgttgcctgaggagaaagttttattatcaagaagcgaatctcaaaccaagaaacttcaagctaaagtaacttcaagaaaaaagactgatatagaaagcttgagaggtgctttgggaagacgcttattaaatgatgaattcaagacacagtcaaagagtttccctgggcctgatatagaacaattgacagatgcatttggaagagatatactaaaggatgaattcaagacacgatcaaagagtctccctgagactgatgaacgattgcatagtacaactgagagaggtacaataaatgatgcaattaagacgcagttaaagagaaagagttaccctgagactgtcttaaaacacttgaaaggtgttaatggaaaagatataataaagcatctaatcaacatacagtcaaagagtcatgcagagactgataagaacttctttgcctatgctactggaagaggtctaatgaaggagtcaaccacgacacaattaaaaagtcacccagagactgataaggaattcttggcagatgctattggaagaggtataataatagggccaatcactacacaactgaagagtcaccgagagactgataaagaactcttaaaagatgctattggaagagatataataaagggaccaatcagtgcacaattaaagagtcaccaggagactgatgtagaacccttgacaaatgccattggttcaagtaaaacaattggtgagataaagacacaactaaggactcactatgatgtgaacttatttaaaaacaaagatatgtccgtacaacgtcaagaaggtatctttactaggagcattacaccaagtaaattcccaacaaaagtgatcaatttatcaccctttgaaaataaagaggaaacttatgagtactcttcaccctatgtgactgcaccttcaaaagcaatttatagaacatatagggctggtccaagcttttctaaagacatccaccttcctttactgaatcaactcccttcagggcattcgaaagttgttaccttaagccaaaaaactattgaatttactctgcctactgtgaccaatacaattggaaaacctacctataaagtgttacatgctgctgcccgaaaatctgtaccacacccatacttttgagaatgaaggaaattctgagcaagataagcaacatgacaaattcagaaatgcaggaaaggaaatcgcaagtatagaagccttttgaaaataatactgactcgtgtggatggtgcttattgaaaaacagctggaaatacagtggatcaacagggtaggcccagatcacagaaggcctgaccaggcagtgaatgtgtctttaccatatggaacaattttgaacttctaagatcaagcctttttgttgctgagggtaagaaaggagctctgtgatgaggttccagcttacttctattcgccagtgtccctgtaatgctttctggtgtgatgtaaaatcaattaaacaaaacttgtgctctg

SEQ ID NO: 64625 - DNA, 1931 bp, Homo sapiens
gcgacgccggcggcgccaaggcgtcgtggcgtcgggcgcctgggacgtggcttcaacggccccatccggcgccggcggcgggtgcccggcggtctttgctgccgcccgggggcgcagaggccgggccttttctttcagcacaaacgtcagtttgtaaaagggaggtgctggagtctgaggagttttcaggcttccgtctcgaaggaagtctggcaggctcggaattgtcatcttcctcaggcaaatagtttttcaccttagagccagcaaggccaaaccgcccagtcacccgacttcccacagtctcagcaggtacacagggcggggagcctcgggagcggctcccttagcaggacctgagggtttcgggagagtcctggctttgcacttagttttcccgctgcctggctgcctccgtggcggttgtgctgctttttatgcaggatgtaggatcgaaggcaaatcatcctttccctacgtcccctgccaacccctgccgctctcctctattttgtacactttatcattaaaggatttgaaatgaatggaggaataagtttttttcatctgtaatttggaagccaagtcagtaacaaaatgaaaccagtaaagcatctgttgaccaccagtaacaaatcggcaaatgttccagcattaactactaaaaaaggactacataatttaccattatcacctgagctaaaggaaaaacataatgcaaaattaattcatgataaaattgaaccaatggtcctaagatctccaccaacaggagaatccattttacggtatgctttgcccattccatcgagtaagacaaagaacttactaccagaagatgaaatgatcggaaaaattatcaaacatctgaagatggttgtttccactttggaagaaacctatggacattgcgatcagaatggagaagaaccatttgtaaagcatgaacatgaagaattatctttatctgttggggatgatatgaattcattcttgacatattgttcgcaatttgcagctcagctagaagaagcacttaaagaagaacaaaatatttggaatctctttttaagtggtttcagtggcaggtcaatcagatggaagaaataagtaaagatcaaactcttttacaagcagagcctccaaaacctgacaaaacagtcattttaaatattgcagaaatagtaaggcttgtacaaagatttgaagaactgaagaatcgccttaaacagaggtctaaatcctccgtgaaagtcatgttgtctaaaactatggataaagaaaatcgaccagaagcagtgaaaagttgtgaagctctggcacagaaaattgaagaattcttagaagcccactcaactgatgaatttaaagatgtttctgcaacagaaccacaaactgctcattcaatgactaatcgatttaatgccatgttgaaagtatttgaaaaccaggcaaatatgttggagagaaacagacatcgtggtcttcagcatctcatccacagcaccaatggaattctcaaacgctgacaaatactcgtgaatttctactggatagtcttcattaatttcttcacctgccgttatggctgactcacggccttcgactccagcctcccggaaagcggtcgggcaacgatgacgacaatgacgcgccagctctgcccgcgccaccagcggcgctttccgatgatctcaccaatgtatagctttttatacacaaattacataccaataaagtgatttaaaagtataggataaaatatagaaactaggattttattaaattattatgcataaatttatatagtagcaggataggacaatcatgttggtctttgggggagctaatagacatattcttcaggatcttgtcagtgcattgtctagctgttcacctgtgcatattgagaaataaataaataggcatag

SEQ ID NO: 64626 - DNA, 2071 bp, Homo sapiens
gcgacgccggcggcgccaaggcgtcgtggcgtcgggcgcctgggacgtggcttcaacggccccatccggcgccggcggcgggtgcccggcggtctttgctgccgcccgggggcgcagaggccgggccttttctttcagcacaaacgtcagtttgtaaaagggaggtgctggagtctgaggagttttcaggcttccgtctcgaaggaagtctggcaggctcggaattgtcatcttcctcaggcaaatagtttttcaccttagagccagcaaggccaaaccgcccagtcacccgacttcccacagtctcagcaggtacacagggcggggagcctcgggagcggctcccttagcaggacctgagggtttcgggagagtcctggctttgcacttagttttcccgctgcctggctgcctccgtggcggttgtgctgctttttatgcaggatgtaggatcgaaggcaaatcatcctttccctacgtcccctgccaacccctgccgctctcctctattttgtacactttatcattaaaggatttgaaatgaatggaggaataagtttttttcatctgtaatttggaagccaagtcagtaacaaaatgaaaccagtaaagcatctgttgaccaccagtaacaaatcggcaaatgttccagcattaactactaaaaaaggactacataatttaccattatcacctgagctaaaggaaaaacataatgcaaaattaattcatgataaaattgaaccaatggtcctaagatctccaccaacaggagaatccattttacggtatgctttgcccattccatcgagtaagacaaagaacttactaccagaagatgaaatgatcggaaaaattatcaaacatctgaagatggttgtttccactttggaagaaacctatggacattgcgatcagaatggagaagaaccatttgtaaagcatgaacatgaagaattatctttatctgttggggatgatatgaattcattcttgacatattgttcgcaatttgcagctcagctagaagaagcacttaaagaagaacaaaatatttggaatctctttttaagtggtttcagtggcaggtcaatcagatggaagaaataagtaaagatcaaactcttttacaagcagagcctccaaaacctgacaaaacagtcattttaaatattgcagaaatagtaaggcttgtacaaagatttgaagaactgaagaatcgccttaaacagaggtctaaatcctccgtgaaagtcatgttgtctaaaactatggataaagaaaatcgaccagaagcagtgaaaagttgtgaagctctggcacagaaaattgaagaattcttagaagcccactcaactgatgaatttaaagatgtttctgcaacagaaccacaaactgctcattcaatgactaatcgatttaatgccatgttgaaagtatttgaaaaccaggcaaatatgttggagagaaaactaagcctacaaataatcgaacaaagaaagctgtgaaaacagtgaagaaaaaagacaaaggaaaatctgaggattcagaaaagaagatgtctccagaaaaagagtttaaaataaaagaagatttggatcaagtacagaaagtagcacgtctggaaattgagaacaaagtccttcaggagcaattgaaacaggctttacaggaagctgaaaaagctaagcatcaacttaactatttcctaaatcaagagaagttacttaaaagtgaggggaaaactgagacaacaatgcaagtgggtaatagtcaaacaaaagttaaaggtgaagattcaaaaaatataccattggagaaagaaacaagaaaatcactggtttcagattcaggtggacaaaggacaagtgataaaatccaagaatatccacagatcactgcccaaagcggaagactgattgaaaagagatgctaatagagtttctgaaatactttggaaaagtctcccaaaccttcagagagtggatgggagcgaagtaaggagaccccacctgagcagatacatggtattgcttacaataaagtacatttttgctctttacaacattta

SEQ ID NO: 64627 - DNA, 960 bp, Homo sapiens
gcgacgccggcggcgccaaggcgtcgtggcgtcgggcgcctgggacgtggcttcaacggccccatccggcgccggcggcgggtgcccggcggtctttgctgccgcccgggggcgcagaggccgggccttttctttcagcacaaacgtcagtttgtaaaagggaggtgctggagtctgaggagttttcaggcttccgtctcgaaggaagtctggcaggctcggaattgtcatcttcctcaggcaaatagtttttcaccttagagccagcaaggccaaaccgcccagtcacccgacttcccacagtctcagcaggtacacagggcggggagcctcgggagcggctcccttagcaggacctgagggtttcgggagagtcctggctttgcacttagttttcccgctgcctggctgcctccgtggcggttgtgctgctttttatgcaggatgtaggatcgaaggcaaatcatcctttccctacgtcccctgccaacccctgccgctctcctctattttgtacactttatcattaaaggatttgaaatgaatggaggaataagtttttttcatctgtaatttggaagccaagtcagtaacaaaatgaaaccagtaaagcatctgttgaccaccagtaacaaatcggcaaatgttccagcattaactactaaaaaaggactacataatttaccattatcacctgagctaaaggaaaaacataatgcaaaattaattcatgataaaattgaaccaatggtcctaagatctccaccaacaggagaatccattttacggtatgctttgcccattccatcgagtaagacaaagaacttactaccagaagatgaaatgatcggaaaaattatcaaacatctgaagatgggtttgtttccacctttggaaggaaacctatgtggacattggcgattcagaatggcggaagaaccctttggtaagcatgaacct

SEQ ID NO: 64628 - DNA, 3445 bp, Homo sapiens
ttcaagaagaacaaaatattttggaatctctttttaagtggtttcagtggcaggtcaatcagatggaagaaataagtggtttcagtggcaggtcaatcagatggaagaaataagtaaagatcaaactcttttacaagcagagcctccaaaacctgacaaaacagtcattttaaatattgcagaaatagtaaggcttgtacaaagatttgaagaactgaagaatcgccttaaacagaggtctaaatcctccgtgaaagtcatgttgtctaaaactatggataaagaaaatcgaccagaagcagtgaaaagttgtgaagctctggcacagaaaattgaagaattcttagaagcccactcaactgatgaatttaaagatgtttctgcaacagaaccacaaactgctcattcaatgactaatcgatttaatgccatgttgaaagtatttgaaaaccaggcaaatatgttggagagaaaactaagcctacaaataatcgaacaaagaaagctgtgaaaacagtgaagaaaaaagacaaaggaaaatctgaggattcagaaaagaagatgtctccagaaaaagagtttaaaataaaagaagatttggatcaagtacagaaagtagcacgtctggaaattgagaacaaagtccttcaggagcaattgaaacaggctttacaggaagctgaaaaagctaagcatcaacttaactatttcctaaatcaagagaagttacttaaaagtgaggggaaaactgagacaacaatgcaagtgggtaatagtcaaacaaaagttaaaggtgaagattcaaaaaatataccattggagaaagaaacaagaaaatcactggtttcagattcaggtggacaaaggacaagtgataaaatccaagaatatccacagctcagagaagaaacgatctagccctgctatttcagatctttcacagatccttaagtctcaagatgaatcagcatttttagagagttcaaatgaagtttcagttgctgaaaaccaatcctataaatctccatcagagacccatgataaatcacttacaacagtatcatccagcaaagaagttcaagattcactgtctgttggaacattggctcaaaaaaacgaaacagtgatatcaccattcattttacctcctgttcttacagaaagtaaaaaggctgatgtttcagaagaacaattacaaaagatgactgaagaacaaacttaccaagcagcagaaaaatctcaagctcataatgaagtaccaaatgaaaggcttgtagttgagcatcaagaatcattgtcaaaaaccaaattacaagtaaagaaacaagaaacttctacagagcaaccactcaccactcctgataaagaaccaaatgaaaatcttatacttaggcatcaagactcaatgtcaaaatcagaaatgcaagtgaaggaacaaagaactctcaaagggcaaagaattattactcatgatgaagaaccaggcaaaaatcttgtgcctgaacatcaagattcagtgtcaaaactggaaatgcaaattgaaaaaaccaaaaaacttcctagagagaaaagacatagtactcatgatgaagaatcaggtgaaaatcctatgcttaaacatcaagattcagtgtcaaaaatccaagtgcaattagagattcaagaaacttctgaaggagaaggacgtagcataccagataaaaattctatgtttgttcatcaagattcagtgtcaaaactccaaatgcaagaaaagaaaaaaataactcctggaagggaaaggcgtaatactcgtattgtagtaccaaatgaaagtgtgatttctgttcatcaagattcaaagtcaaaactccaaatgcaagaaaagaaacaaataaattctggagtggaaagacacaagacgtttcctttagaaatcaaaaaaaaggatatatcacttgaacatctgttgcctgaggagaaagttttattatcaagaagcgaatctcaaaccaagaaacttcaagctaaagtaacttcaagaaaaaagactgatatagaaagcttgagaggtgctttgggaagacgcttattaaatgatgaattcaagacacagtcaaagagtttccctgggcctgatatagaacaattgacagatgcatttggaagagatatactaaaggatgaattcaagacacgatcaaagagtctccctgagactgatgaacgattgcatagtacaactgagagaggtacaataaatgatgcaattaagacgcagttaaagagaaagagttaccctgagactgtcttaaaacacttgaaaggtgttaatggaaaagatataataaagcatctaatcaacatacagtcaaagagtcatgcagagactgataagaacttctttgcctatgctactggaagaggtctaatgaaggagtcaaccacgacacaattaaaaagtcacccagagactgataaggaattcttggcagatgctattggaagaggtataataatagggccaatcactacacaactgaagagtcaccgagagactgataaagaactcttaaaagatgctattggaagagatataataaagggaccaatcagtgcacaattaaagagtcaccaggagactgatgtagaacccttgacaaatgccattggttcaagtaaaacaattggtgagataaagacacaactaaggactcactatgatgtgaacttatttaaaaacaaagatatgtccgtacaacgtcaagaaggtatctttactaggagcattacaccaagtaaattcccaacaaaagtgatcaatttatcaccctttgaaaataaagaggaaacttatgagtactcttcaccctatgtgactgcaccttcaaaagcaatttatagaacatatagggctggtccaagcttttctaaagacatccaccttcctttactgaatcaactcccttcagggcattcgaaagttgttaccttaagccaaaaaactattgaatttactctgcctactgtgaccaatacaattggaaaacctacctataaagtgttacatgctgctgcccgaaaatctgtaccacacccatacttttgagaatgaaggaaattctgagcaagataagcaacatgacaaattcagaaatgcaggaaaggaaatcgcaagtatagaagccttttgaaaataatactgactcgtgtggatggtgcttattgaaaaacagctggaaatacagtggatcaacagggtaggcccagatcacagaaggcctgaccaggcagtgaatgtgtctttaccatatggaacaattttgaacttctaagatcaagcctttttgttgctgagggtaagaaaggagctctgtgatgaggttccagcttacttctattcgccagtgtccctgtaatgctttctggtgtgatgtaaaatcaattaaacaaaacttgtgctctg

SEQ ID NO: 64629 - DNA, 2036 bp, Homo sapiens
gcgacgccggcggcgccaaggcgtcgtggcgtcgggcgcctgggacgtggcttcaacggccccatccggcgccggcggcgggtgcccggcggtctttgctgccgcccgggggcgcagaggccgggccttttctttcagcacaaacgtcagtttgtaaaagggaggtgctggagtctgaggagttttcaggcttccgtctcgaaggaagtctggcaggctcggaattgtcatcttcctcaggcaaatagtttttcaccttagagccagcaaggccaaaccgcccagtcacccgacttcccacagtctcagcaggtacacagggcggggagcctcgggagcggctcccttagcaggacctgagggtttcgggagagtcctggctttgcacttagttttcccgctgcctggctgcctccgtggcggttgtgctgctttttatgcaggatgtaggatcgaaggcaaatcatcctttccctacgtcccctgccaacccctgccgctctcctctattttgtacactttatcattaaaggatttgaaatgaatggaggaataagtttttttcatctgtaatttggaagccaagtcagtaacaaaatgaaaccagtaaagcatctgttgaccaccagtaacaaatcggcaaatgttccagcattaactactaaaaaaggactacataatttaccattatcacctgagctaaaggaaaaacataatgcaaaattaattcatgataaaattgaaccaatggtcctaagatctccaccaacaggagaatccattttacggtatgctttgcccattccatcgagtaagacaaagaacttactaccagaagatgaaatgatcggaaaaattatcaaacatctgaagatggttgtttccactttggaagaaacctatggacattgcgatcagaatggagaagaaccatttgtaaagcatgaacatgaagaattatctttatctgttggggatgatatgaattcattcttgacatattgttcgcaatttgcagctcagctagaagaagcacttaaagaagaacaaaatatttggaatctctttttaagtggtttcagtggcaggtcaatcagatggaagaaataagtaaagatcaaactcttttacaagcagagcctccaaaacctgacaaaacagtcattttaaatattgcagaaatagtaaggcttgtacaaagatttgaagaactgaagaatcgccttaaacagaggtctaaatcctccgtgaaagtcatgttgtctaaaactatggataaagaaaatcgaccagaagcagtgaaaagttgtgaagctctggcacagaaaattgaagaattcttagaagcccactcaactgatgaatttaaagatgtttctgcaacagaaccacaaactgctcattcaatgactaatcgatttaatgccatgttgaaagtatttgaaaaccaggcaaatatgttggagagaaaactaagcctacaaataatcgaacaaagaaagctgtgaaaacagtgaagaaaaaagacaaaggaaaatctgaggattcagaaaagaagatgtctccagaaaaagagtttaaaataaaagaagatttggatcaagtacagaaagtagcacgtctggaaattgagaacaaagtccttcaggagcaattgaaacaggctttacaggaagctgaaaaagctaagcatcaacttaactatttcctaaatcaagagaagttacttaaaagtgaggggaaaactgagacaacaatgcaagtgggtaatagtcaaacaaaagttaaaggtgaagattcaaaaaatataccattggagaaagaaacaagaaaatcactggtttcagattcaggtggacaaaggacaagtgataaaatccaagaatatccacagatgctaatagagtttctgaaatactttggaaaagtctcccaaaccttcagagagtggatgggagcgaagtaaggagaccccacctgagcagatacatggtattgcttacaataaagtacatttttgctctttacaacattta

SEQ ID NO: 64630 - DNA, 1752 bp, Homo sapiens
gcgacgccggcggcgccaaggcgtcgtggcgtcgggcgcctgggacgtggcttcaacggccccatccggcgccggcggcgggtgcccggcggtctttgctgccgcccgggggcgcagaggccgggccttttctttcagcacaaacgtcagtttgtaaaagggaggtgctggagtctgaggagttttcaggcttccgtctcgaaggaagtctggcaggctcggaattgtcatcttcctcaggcaaatagtttttcaccttagagccagcaaggccaaaccgcccagtcacccgacttcccacagtctcagcaggtacacagggcggggagcctcgggagcggctcccttagcaggacctgagggtttcgggagagtcctggctttgcacttagttttcccgctgcctggctgcctccgtggcggttgtgctgctttttatgcaggatgtaggatcgaaggcaaatcatcctttccctacgtcccctgccaacccctgccgctctcctctattttgtacactttatcattaaaggatttgaaatgaatggaggaataagtttttttcatctgtaatttggaagccaagtcagtaacaaaatgaaaccagtaaagcatctgttgaccaccagtaacaaatcggcaaatgttccagcattaactactaaaaaaggactacataatttaccattatcacctgagctaaaggaaaaacataatgcaaaattaattcatgataaaattgaaccaatggtcctaagatctccaccaacaggagaatccattttacggtatgctttgcccattccatcgagtaagacaaagaacttactaccagaagatgaaatgatcggaaaaattatcaaacatctgaagatggttgtttccactttggaagaaacctatggacattgcgatcagaatggagaagaaccatttgtaaagcatgaacatgaagaattatctttatctgttggggatgatatgaattcattcttgacatattgttcgcaatttgcagctcagctagaagaagcacttaaagaagaacaaaatatttggaatctctttttaagtggtttcagtggcaggtcaatcagatggaagaaataagtaaagatcaaactcttttacaagcagagcctccaaaacctgacaaaacagtcattttaaatattgcagaaatagtaaggcttgtacaaagatttgaagaactgaagaatcgccttaaacagaggtctaaatcctccgtgaaagtcatgttgtctaaaactatggataaagaaaatcgaccagaagcagtgaaaagttgtgaagctctggcacagaaaattgaagaattcttagaagcccactcaactgatgaatttaaagatgtttctgcaacagaaccacaaactgctcattcaatgactaatcgatttaatgccatgttgaaagtatttgaaaaccaggcaaatatgttggagagaaaactaagcctacaaataatcgaacaaagaaagctgtgaaaacagtgaagaaaaaagacaaaggaaaatctgaggattcagaaaagaagatgtctccagaaaaagagtttaaaataaaagaagatttggatcaagtacaggtaacacacccactctctctatgcatcaatatttgattaatacttgctctgatagtcatatatagagaaacattattacgtatgtgattatagggtatatatgtctgtgtgtgtgtatgtgtctctgtgtgtgtgtgtactaa

SEQ ID NO: 64631 - DNA, 242 bp, Homo sapiens
ggttgcagtgagctgagattgtgccactgcgctccagcctgagcaacagagcaagactccgtctcaaaaaacagaaattctttttgtaatattgtttcctgtctgctgtcatgtgctgagttgttctaagccagtgttggctgtttccttgttctgtctttccctttgttcttacatcatgtatgtctcatgtacttggttatcttggtggtgggatcatcttctgtggtcagaagatgcaa

SEQ ID NO: 64632 - DNA, 338 bp, Homo sapiens
cctagtaatccatcatccccaaagactttggtatatgttttctacagatcagaacatttcctacataaccacagtataacaagtagaaagttaataaagcaggagctgtggggacttagaagaggaaaaaaaccaaaaatacaattaagtagatttggcagaatttgatgactgcttagatggtggggggaagggcagaaaaaccataacattgtatgtttgtgtgtgtgaattgggaaatgaccaacattaaaaatgttcagttacttaacacctctgttgatattctgtgggaatatggttttaaaatgctgtattctagtagcagaggaaatatt

SEQ ID NO: 64633 - DNA, 749 bp, Homo sapiens
  misc_feature (433)..(433): n is a, c, g, or t
  misc_feature (447)..(447): n is a, c, g, or t
  misc_feature (449)..(449): n is a, c, g, or t
  misc_feature (504)..(504): n is a, c, g, or t
  misc_feature (509)..(509): n is a, c, g, or t
  misc_feature (520)..(520): n is a, c, g, or t
  misc_feature (534)..(534): n is a, c, g, or t
  misc_feature (540)..(540): n is a, c, g, or t
  misc_feature (546)..(547): n is a, c, g, or t
  misc_feature (549)..(549): n is a, c, g, or t
  misc_feature (554)..(554): n is a, c, g, or t
  misc_feature (556)..(556): n is a, c, g, or t
  misc_feature (559)..(559): n is a, c, g, or t
  misc_feature (564)..(564): n is a, c, g, or t
  misc_feature (568)..(568): n is a, c, g, or t
  misc_feature (573)..(573): n is a, c, g, or t
  misc_feature (576)..(576): n is a, c, g, or t
  misc_feature (579)..(580): n is a, c, g, or t
  misc_feature (583)..(583): n is a, c, g, or t
  misc_feature (588)..(588): n is a, c, g, or t
  misc_feature (590)..(590): n is a, c, g, or t
  misc_feature (596)..(596): n is a, c, g, or t
tagctatttattcagatcggacatttccccctgggcaaaactaaaatgtatccctgctggatggcctcactgagtttcttgtcttaagattttttttttttctgtgaactctgcggagaagtatctttcggatttttggctcagtaatccttcactgtcatattagttctttgatgcctatatgaagtttttgtttttattaatccaacattttaataaatcattataaattttctgagattgggcatgttgtatgttttgttcacttctattctagaagagtactggtatatagcatgcatccagtagttaccgaatgattgagttttgtttgtttttgttgttttttgtttttttgagtctgaatcttgctctatcgcctaggttgtagtgagctgagatcacaccactgcacaccagcctgggcgacaanagcgaaactccgtntnaaaaaaaaaaaaactgttgcagccccgttgagcctttgacaccgcctgaaatccnccccnctcccggaggnggaggaggaaggantgccantgcctnnanacacnanaantcctntggnggccncancanntgntgganancccagnctggacctgcccttaaaagaatgagtgggaaaggggagggaggaagggcaggtaaaacgtcctccccagggccccctgcaacggggaaggtactttttacaaaagctatcattgtcaccctaaatgtggaataaaataagatgcatcgacgta

SEQ ID NO: 64634 - DNA, 208 bp, Homo sapiens
ctacaattccctactagcccatctttctacttctactctaactcagtcagctctccagacagtagctcaaataatcttgttaaaatgcatatcataccatgtcactttcctgttcaaaaccctccagtgacttccattacattaaaataaaacaagagtttcttaccatggtttgtaaagctgtatataatctaatccctagaaacaa

SEQ ID NO: 64635 - DNA, 142 bp, Homo sapiens
ttgcaactggcagagctggagggcgagtttctggtcaacgagttcatcacacgccagcgccggagggaactctcagaccgcttgaatcttagtgaccagcaggtcaagatctggtttcagaaccggagaatgaaaaagaaaa

SEQ ID NO: 64636 - DNA, 423 bp, Homo sapiens
gtgttcttaggatggattgctcttttcttagaaaatggcaacttctttccctctttctggaagaaagtcagaagagaaaatccagaaccagagagcagcccaaagggccaccgatggagacaccagcaggaccagcaaggacccaccttgggtacggacccaggcacaggggccagggagccactgtcggcctcaagcagggaaacgctaactgtggaatgaacgagttccacataaggaggcaggaatcttctcctgtaaagctttttcttcatttctttttctttgatattcactaagaagacttctcataccttttgggattttgattaacaacaaacataagtaagtgttatggttttcttctcgtagacgctgcactccttattaaacttatagatgctgtactccttattaaactta

SEQ ID NO: 64637 - DNA, 345 bp, Homo sapiens
  misc_feature (111)..(111): n is a, c, g, or t
  misc_feature (136)..(136): n is a, c, g, or t
  misc_feature (144)..(144): n is a, c, g, or t
agtcacttgtttatttctcaagatgtgcacagcaagcgtggaataatcagccaatatataacattccatcagtattttattaaggaaataacctgaatgtggttgattttnacatagctgcaattacagttttctnctattttncaagccacaataagaggcagagacacaggtgctgtgttgttcatttatttcttgtaaatttgttgcaagcttaatcattcagggttaaagctatttgcaatattattgaaaagactaatgaggattagaaaacaaagctacaactacacctttcgccataattattatttactatttccctttcccatcactcattttaga

SEQ ID NO: 64638 - DNA, 288 bp, Homo sapiens
ggtttccaaaggtatatgctttcactaaggaatgcagcaggaatctcactaaattataagtcatgattactgcttgtgaatttgggggatctttgcggcaaggggacaacagacaacaagaggaatcaccatcctagaatagcagctgaccctgaagatcagaagctagggctgtcaagacacaatgatgaatatgtctgacaagcaggagacccacttgaatgcttctcggtgttcccttgtccagttttgttggtaagtggacagaccagcagccccaagctgaga

SEQ ID NO: 64639 - DNA, 275 bp, Homo sapiens
aagacattaaacacagactgggtattagattaagaaagtgttttgctgggtgcagtaatgacattgtggttatattaaaaagagcatgtgtatgtatgtggtaaaattatatactcggtagttaagcatggtggtgtgcacctgtggtgccagctgcttggaaggttgaggtgtgaagatggtttgaggccagcattctgaggctgcagtgtactgtgttcacacctatgaatgcacaccacctggacaacatagacccatctctaaacaaaagt

SEQ ID NO: 64640 - DNA, 912 bp, Homo sapiens
atttgtcattttatgaaaatgttttactgatagttaagaatttttattctagtggttatctttgtatttatactttattctccattttcttatttaagatttactatctagtttgtcaggttttaatgcctgtaattcacacttattgcctatacagcgatcaatgattttaatctcacgtctttttgctcccattttttagttgttttatttctacctgattgcaacatataatgtttgtgtattggttttgcactcgaattcctactgttggtttagtctgaaagctactattaaatatagtaaatattgtaattttattttgctgaagtttttcagtcatctcttgttgaatgaagctcattcattagtagatcttcatgagtggctcaggggtacataattgtctaagttatgtgtttgaagctgtttttctattatagtgttttatactgaaggacagcttgactgaatataaaatcttggttcacactttcagttttttgaaaatttattgtcttgctttatatatattttttgagaaatctgataccagtctaattattttgcccttgtaaattatttgatcacgtatccctgaatcctcgaggattaaaaaatttttttcggcctggctcggtggctcacgcctgtaattccagcactttgggaggctgaggcgggcagatcacgaggtcaggagatcaaggccatcctggctaacatggtgaaaccccatctctactaaaaatacaaaaaattagcctggtgtggtggtgggcgcctgtagtcctggctactcgggaggctgaggcaggagaatggcgtgaacccgggaggcagagcttgcagtgagccgagagtgcgccactgcactccagcctgggcaacagagcgagactccgtctcaaa

SEQ ID NO: 64641 - DNA, 771 bp, Homo sapiens
agtaagggcttaatcatactcattggcttttctgcctttgcctgtttctgcattgccacctggctgccattagagggaattcattacaactctgagtccctgcagggagctgagaggagctatccttgtgtttaggatgggacatgtgttcttaaaactgggccaggcacggtggctcccagcactttgggaggccgaagcaggtggatcacttgaggccaggagttcgagaccagcctggccaacatggtgaaactccgtttctattaaacatacaaaaattagctgggtgtggtggtgtatgcctgtaatcccagctactcaggagactgaggcacaagaattgcttgaacctgggaagtggagattgcagtgagccgatatctcaccactgcactccagcctgggcgacacagcaagactctgtctcaaaaaaagaaaaaaacaaaaaacttaaaaatggttacccagatttccttttatgacttgttcagtcagaggcagctgggaggatgcacgctggggaaagcattactcaccaggcacacatagtggccctgactgctggcaagtagtctgggctgtgttaagagtgagtcacctcggggaatggaaaaattgcaaggtactgaggggtaggagttgtgtgccagtgactgctccttttctgtctgctattttctctataaggactcatcacaaaaccataaatactgacgatcctgttgaggcagccgtgaagccaaccaactttatggtgataatgtttcc

SEQ ID NO: 64642 - DNA, 411 bp, Homo sapiens
tgtttttaatttggtaatgatatctgctgatttattaagtgaaaaaagtaatggtgtcattaccttggatgaagaaacaaaaataaagcatttgccacatttttcaactttgttttcctttcttacaaaattgctataagctcattgcccccaaattggacaatatagggaataaaaaagataatttggggtggggttagacacgggtcttgttatgttgccgaggctggtctctaactcctggcctcatgcaatcttcctaccttggcctcccaaagtgctgggattataggtgtgagccacttcaccaagctgagatgccacctcttaaaagagagaataaggacagattacagccactgctcatgcctgtaatgtcagtactttgggaggccaaggtgggagaattgc

SEQ ID NO: 64643 - DNA, 821 bp, Homo sapiens
cacaatctgaagggccggtctcactcccaccatgacctccacccaacagcactgagtctgtttccacgtagtgggtgagcaggtctgagaacttgccccaggctacccacctcccagctgtgaaagcaaatatggcttttttttcttctcccacctgtggagtctgcacaccagattcatgccctccctcgagttctggctaggaggcttctcagtcacttcaaattgttacaaagttcagctggagatttccttctccctgtagcctttcccaatgcctctgtctgccctcccaaaagacctctgtgaggccaggcaaaaacggcttgttaggggacccagtgagctcccagtgcttttcctgctgcttctcctaacactgtatgtttcttggctctctaaactcactcagctccagatgcctctgagtcatttaaagtcaatggccacaatttccttggcattttctcctcccttggcttccataacatttcttgaagtcatttcttttacctctgtggctttttttgttacttctttgcaagttttgccagaactgaagaggccttgcaattgtgaagagaaaaatgcagcagtgagttggaactgacgaccagagaacagttgggagggcagtcatgctggatgtcagcagggcaatgatgacaaccccaacaccttggcacaatgtagcccttctgggactatgggcacaagtgaaactgaagtaggggggaagcctgaatcaactgagattaatttttcacacctagggaaacgggaactcaaaattaaaattaaatttagttgtgaaaatacaa

SEQ ID NO: 64644 - DNA, 775 bp, Homo sapiens
acctgtaatcccagcactttgggaggccaaggcaggaagatcacttcaatccaggaattcaagaccagcctgggtaacatggcgaaaccccgtctctacagaaaatacaaaaacaaaattaaccgggcgtggtggcacatgcctgtagtcccagctgcttgggaggctgaggtggaagggtcactagagcctaggagattgagaccacaatgagccacgatcacgccactgcactccaacctgggcgacagagaaaaccctgtctcaaacaaacaacaacaacaaaggcttagagaaaaaagtcagaagtgggaatcagtgaacagtggagtaagactatgtggcagtcaacaagcaatctttttgaactacctcgctagggattgttggggagaactaggagactcacaaaagagaaaaatgaaaccaaatgtatatttgtgatatatctgtctcacagagcacctcttgtgtgccaggtatttgatgtctgtcttctcctttaatctttgcaattgccctttggagtaggtagatttcctctttatagaggatgaaaaggatcacccaagctagcgagttgcagagctgggattttaatccaaaacctggactgagcacatgcattagctggtacaaactgcattatgaaaacatttctaggtgcaaaatggcaggagtgaagatggagcacctctagacataatatgggatgaaccaaaatctagtttgaaaatgacttccagaacctttgacaggtttgcaaccttcttat

SEQ ID NO: 64645 - DNA, 1687 bp, Homo sapiens
gagttaaagatgatatttttaggagaatttgggaagcgatgatgttttatttctgtaggtcagtcctgtgacggctttgcgaggagtatggcccttcagagatggatgatgccaccttactccatgtttggggtacagtccagcactccccatgaaaaattctaagttgtgagggaatctgcccatttgctggagattgagtgcagaggaattccctaaccaatcagagatatcccgtgattccaggatttcagagtcctttgtctcctctgaggtgtcaccttctttgtgatgtttcctttgactcactccttcatgttagattcctcacaccaagggtctatccctacagtagcataactcaaggaacgggactcttcccagtgggtccctagtagcatctacatcacatcaaagggcaatatatcctgcacctgctcttcccctcggagcaaagccccaagtgggataggatgttggggactgccagagcattcccattctctgagcagcatcatacctccattattttatatttgcaaatgtgttttgtagaggattacactggccaacatttatatacctttaaagaaattattttagtgactgtctgttgaggcagtgaagagctgatttgctgtgtgtcatcccattggatagctgagtgaccgctcttgcatcattgaagttgaatcatgccttagctaactgaatataatctttgtaaaataattttctactgagctgttttctagtcagctaaagccttgcttatttttcctgtttattattaacttctgcctttctctcaaattgaaacagtcaggccatacacagcaagctcccaaggataacacttgttattatttattttcaccatgagattctctgcttattttctttggaatcctagttctgttgcatcagggaagcctaagggacttgttcccctcacctctgtgtgcctcttagggtctggtcacttttgaagtcctgggcatggttacatttcattcatactggtttttcaccaactgtcagggtttctgtgttccattagcacaaaatagctaaaagaagatattttcactgtctaattcactattttcatgttacatttctgaaataattgaactttaggggcaagatactacttactgaagcacaggtaattactgagaacccacagcccagcaaattctaagagacagtcatttcctcagcccctcccagtccaaatttatagacccaaacaatgaaatgaaaactgtttgctttgatcctcaccctgttctctagagcacaaacaaatagtaacaaacaattgaaagaaagtgcttcatagtaggagagagattggaattctctatagtgactgagttcttaaatttctttagttttagttttgccactttgttgagagatgggccttttagaaaggaagacatatttaaagtattgatttcttttcccccagtgttttattgtgaaaaaatttcagcaaacagcttaaaagaaatataaatatattgtaaaccaaaaagtatctgagacaggtctcaatacatttagaggtttattttgccaaggttcagagcccatgatggggcctcaggaggttcttagaacatgtgcccgaggtagtcgggttacagttttatacatttgagggagacagaaggtccag

SEQ ID NO: 64646 - DNA, 455 bp, Homo sapiens
cagcctcttgagtagctgggactacaggtctgtgccaccaggttttaaattttttgtagagactggatctccctatgttactgctagtcccaaactcctgggctcaagcgatcctcctatcttggctttccaaagtgctgagatcacaggtgtgagccactgcacccatcaggcctgttttctgatcctatagttttaccttttagagaatgttacatcaatgtaatcacacagcatgtattttttctgaccgcttttctgcacttagcgtagtgctttccagaggcatccatgttgtagcatgtttcccgactcccttcctttctattgttgagtattattgcctgtacagatgtacctcagtttgtttacccactggccaggtgatgaatgcctgagttgtgtccagtttttggttatgaataaagcttctatgaatatttacatacaaatct

SEQ ID NO: 64647 - DNA, 346 bp, Homo sapiens
cctaaagggaagggtttgggtcattggggcactgccctcgtgactggattaatgccattatcttgggcttgttatctcaggagtgtgttccttattaaaaagatgacttcaccctcccatctctcacccatgtgatgctttctgccatgttatggtgtgacaagaaggcccttaccagatgttggtacctagatcttggacttcccatgctccagaactgtaagaaaataaatttctgttctttataaattacccagcctgtggtaatttgttatagcagcacaaaatggactaagacagagggttacatacaagagattcattgagggagggagcagaaggcagg

SEQ ID NO: 64648 - DNA, 1639 bp, Homo sapiens
tgtaaacagctttcatataattcatgatagaatattactatgtgctttggaagacactgaggaaagacaaaaggtcattgggcagaaccaccctagattgactgttaaggccatcttctagtttgcaggacttgtggtagacagacagaataatatcctggacctcttgggtgtatacaggacaaactgaaataaactctcatttttagatcataatgtcatcatgaaacatatcaattcggtctatttctgaagaaaacaagcacaatgataaagtttgaatgtttgtctcctccaaatctcatgctgacatttgatccccaatgttggaggtggggcgcactgggaggtgttttggttacgggggcagatccctcatgaatggcttggtgctgtcttcatgggattatgttctcactcctacttcctgtgagatcttattgttaaaaagaatctgataccttcctcccctctcttgctctcttcctccctgatcatgtgacacacgggttcccctttgccttccaccacgatggaggcttcctgaggccctcaacagaagcagatgctggtgccatgcttctcgtacagcctgcagaattgtgtgagccaaataaacctcttttccttatatattacccagcctcaggtatttgtttatagcaataaaaacagactgagacacatgatgaagaccctttgatatcctataaatattgatttctctccctgagagaagagcatgaatctaagtgatgccattactgtaatgtgaattccacaacttttctcaaagatgtggcccatatgtttctaataatggctttctaagaatctgttctgaaggggtaccttctctctgattttcatttgcatttcctgcttagcttacacacttcaacttgcctatccacctgtcctgaccccaataacctccatcatcagacatctcatcttacctacctactttctacttttcccagtccttcccgtgcttcataaaccatgatcatgagctagagacacaaggtcatagctaaggagttgggatcagaaaatcaccttctgtgattttccattattctcaatacgtaacttcaacaaaatcaagaaaatcatgaaaggacatcctaaggggtcaggtgaggttgcagtggggttagtcggtcaatagtttctttatgccaattaggatttctgcagaaaacaatgaaacactggtttaaacagtaaaaatattttaattccttacagaagcccatggaacatacactccaggtttaattcatcagctcaatagcatcatcaacgacttaggttctttccactttctgcttgtcatctgtgttggctttattttcaagctagctcctccctggttgcaagataattgcagcaggtttagttatcatattcggacatgctaacgcccaggctagtgatcccttccttacatttctttctcattttaagaacaaagtgtttaaaaaattatacttaaaattattggcatctctgtcaattgaaagatgtcaatctctttcatttttcctaatcactaataacatctactaaaaacaaaatgtctgtgtaaataatttatttgaataaaattaaagttgttgagtgaaatcggctt

SEQ ID NO: 64649 - DNA, 361 bp, Homo sapiens
aaccagaagggcggccagggccggcggcatgccatgccaggcagccccgcgccaccccggaacactgggacactctcatattcccaaagggacttctccatgcggcgctctgaccaggcatcgccgcaggacgcataacagagagagcgagcgcagggcacccggcccatcagctcttccttcacctgaactgccccggcctcgctgagacgcggattttaaaaccgccctgcacctatgtgctggcagccaggccctgggaacttcctccaaacactcccatgagttcgggatgactagcatcagttttcagctggagagcagacggcaactgaacgctgcgaagtcccacgatggggat

SEQ ID NO: 64650 - DNA, 2546 bp, Homo sapiens
ttttttttttgcactgaagagtttctgtgaaggagccccagagttgggaatgtgccagaatcaggccaacaccagccacacctgtccacagtgccccttcctgctccagttgatccagagagctcctccctctaccctcatgatgccagggagcgtgattgtgggtgtgtctctgactgggacacccaggatagggtgtgcaatgaggccaggaccctcctaaaccctaacagcatcctaacgaggcccattgcagctttcgatttccttcgtaacagagctcgcaggccctcagttgcagagctctcaccttctggagtgactccatcgttactccagtctttctaggtggtggaacactccaccacacatgccatttagaaagacgccagcttggcctttccaaaaagttaaccagtcgtctccccaccacaaaccctgtgggagcaggttactcttaggatgcacacccgtcaacgaggccattgcatttttttgcaggcatgaacggctcccatctaggcactaacccaggagccaaacaactgctggggagagttcagggcagctctttgggcggtgcctccagctgcagctttgccttgccacctggagccagcacgcctctgcccgacccaaggaggatgccatcactagatcctatttttttttttttttaactcttgaatctgaatagttcctgccgtggggagaggtattgttcagggaaaatgtgatcgggattttagtgtggctgtaaacacagtcttcccgaaaggcttactgacgtttgaatgtgcaaatggtatgacgaaagatgtagggctctttcgttgaacttctctacggcgggcgggcggacacgtgttccaggtggacttgcctgccggccaggctttgagtctgaacttcctctaactgcagctgggctcctggcacacgcggtgccctggcatgatggtcctccctggccaggagcgagtcctaaggaaattcattccattgaccggactcctcccatgataggcccatggcttctctgctggccttagttcttggcccttcagattccctggggatataaggcccaagcggatctccctgcagccagccagcagacagcccagggtttccgcccaaagtgccctcatgttgcagtccactttgtgcatggaagatattgaacacaatttccactgctcttcctgcagggcctcctttccagcagtcacttgctcagactgaggggtgcacctcccctgccattgacaggtcctgcgccttcaggatgggctatttcaagcccgttttaagtggctcttacacaggctcagcaacctctgtggcctgcaggatgggccttctgctgtctctttcctttcttaaaaccttaaggtctttctagagacctattcaattttctttttttttttttttcactacaatgtcatgacaactgcagcaatttgtgttactttccaagatgacaatttgacattaattaagggaaaaaataaaaaggtgagctagatgacttaaaatgcatctcttttttgaaaaagctgtagctggcaagtcaaagtttattttatgtgtgtaaattcccagttgagcattttttcatttggattagcgtgagaggaaaaaatgtgaaatgtctcaaatcaaatgcttccttctaaagattagacattgcccaaccctgcccccgcccccaatcaatcagtgacagaagagaccgccatcagccaactagctttttttaaatggctgatatattcatctctaaaggccctcaaagcactgtaaaacttttaaaactttagcctttatgtcagattagagaaaccaaacaacgtgacggtacatgtgatgaaaagctctgggtttatttttctcccgcttatgaacatgtatttttatttgccgaatgaaaatcgtggtgtgttgctttgatgaatggaatttcaggctctccctgtgcacagccggtgggcaaaggtcaccttaaatgactttttctccctatctgtctgttaatccccagaccggttgcattttccagttgcttcctgggtgtctgtacatagtttgtctttgtataggagtgagtgtggtgaccgtcaatcccctaatctcccaggttctaatttaacagatgatggctgtatgaggaaaacgatgtaaatagagaatacaaattaaactggatctctgtggcctaggttttgtacatacagaaactgcatggtatttaaattattgtttgtctctgatgatgtatgcagtttctttaaaaacaaaccaaaaaaaagtaaaaaaaaaaaaaaaaaaattcttgactcttgtgtgttttgttatcaaccagcagcagaaaccaccaaaaatgctttgactgggaaagggaggttgcaggaatgggagaggtcagctcatctgcaaaatacatagtgagagtgagtggacatacgggacaaccgcatgtctcctctggtattattgggggaaggaagtattgtagcacatacattaactttctagaagac

SEQ ID NO: 64651 - DNA, 307 bp, Homo sapiens
agatctcagccaaaaggttgtgtgatctttgattttaaaaatttaagaggaacttttcctcactggaacacaatgattttattaataaagaatgtaggctgggtgcggtggctcatgcacgtaatcccaacaatttgggaggctgaggcgggcagatcacgtgaggtcaggagtttgagaccagcctggccaacatggtgaaaccctgtctctagtaaaaatacaaaaattagctgggcacggtggcgggcacctgtagttccagctgcttgggaggctgaggcacgagaatcacttgagcccagga

SEQ ID NO: 64652 - DNA, 1000 bp, Homo sapiens
atttcattcaaaagacaattaggaagatggttttctatggaaaatatttaagtgtaggtcttaatgtgaaagaaagagggagagaaagaaacccctttattatgttctcccttccttaggcattttttgtcccgtgggaaaaaactgtactagggacagagacctctgttaagttttagagaaaagggatcttttttttttttatttgagacagagtcttgctctgtcgcccaggctggagtgcagtggcacgatctcggctcactgcaactccgcctcctgggttcaagcaattctcctgcttcatcctcccgagtagctgggattacaggcgctggccaccacgcccggctaatttttgtatttttagtagagaccgggtttcaccatgttggccaggctagtctggaacccctgactttgtgatccgcccgcctcggcctcccaaagtgctgggattacaggcgtgagccaccgtttcaggccgagaaaagggatttaaaatgagaagcttgaatcttattgaacataattgtaggactgccagagaggactggtggatgaggaatatggcaagggacatgagatgggaaaaattaaataggctgtggtttggaagtctcaaagtgaaattcaaggtgcaaggctcttaaaagttaaatccagcgattcggtacatagcttaggccctattaaatgacccagtgctttaagaactatcttttgaaaggaacacttcacacaagcaccctcaaaaataattagacacctccccatttctctgttaaatggtgaaagacacccaagactagacctaactactgtcaccctctcctggcctcttggcagccaaaaggccacatggcccaggctctccagcatcactgtgtagccgacttggacaaaaatggacttctccccattgccacttgcagatctcttcaaagaatcagcagatctgatagtgtgcccctcttcatccccggcaaccactgttaaa

SEQ ID NO: 64653 - DNA, 773 bp, Homo sapiens
cggccgcttcctgcagactcgtgtttgcagcgtatctgtagacggggaggctgcagtcctcctggaagtcctgtcttggagggtgcaggagagcctcgagtttccaccagcaagtttgagggacactgagaggctccctcccttcctccggaccgagctgttgcccccatgtctctggcaggttctggggccgactggagcgttatctgcccacacatagcatctgctccttgcctttcgtcacgtccttctgcctgggcatgggtgcacggagggtctgctatggccaggaagaggcggtagggccctggtaccacctgagcgcccaggagatccagcccttgtttggagaacacaggctgggaggggatggccggggctgggtgaggacgcactgctgcctggaggatgcctggcacggaggcagctccctgctcgtccggggtgtgatcccaccggaggttggaaatgtggctgtgaggtgggtgagtgacggaggacggtgggcccaccagcttctcccatcacacgtggtggccatggaactggacagatggggcagtggaggccagaacaaggacagaggacagacccagatgggttttttaaaattgtgatcaaaaatgcattaacgtgaaattcaccatcttgaccctgttgaagtgaacggtacaggagtgttaactctgcgtacgttgctacgtgacagatccctagaactgtgtcatcttgtaggactggactctccccattgcacattagccccccatcct

SEQ ID NO: 64654 - DNA, 3320 bp, Homo sapiens
ctttactctgcatctgtgagtttggatactttagatgccccatatgagggaatcccatacggtatttcagaactgagatgtttcagcccacaaaagaatctggccttgggggaggacttgtcccctggctacggacaggaccacgatgtgggagcatttggcacccaggccccctgttcctggagggaggggctggtggacgcgatttggagctggcttcgatttctcagtggtctctccacggcacccatcacaggacctttttccccaggttattttccctgcaggccccagtgccacccaagatttacctgtccatggtgtataagcttgaggggcccacggacgtcacagttgctttggagctgaccacaggggatgccggcagctgccacatcggtggcatctcagtgttgaacgcagaaacaagctcaagacacagcctccgacccctccgggtgccccccaccaagctggccagatgggtgggccgctgcggccggcagctgagtgggggctgggtccagcactgctacgaggtgagcctgcgtgggtgcctgctgctagacctcctcgtttgcttctcacggccgccgggtagtcgggaggaggagaacttcacctgtcggcttggagagatccaggtggtggacgctgccagcctgctggcccctctgccccaggtgcaggccgtcaccatctctcacatccgctggcagccatccgcctctgagcgggaggggccccctgctctgctccagctcagctgcaccctgcactggtccttcctcctctcacaagtccgttgcttccgaatccactgctggggagggatgagtgatgactctccgggcagggagctgccgaggccagagatgcccatgttcctggggttggcttttgccaccagtaccggatagtggacctgctggtggaagccgccgggcccggccaggatcgtcgcatggaatttctggtggagcctgtccccaaggaagggttccgggtacctcaggccgagtggggcagggcagttctgctttattcagcccctgcatgagcggatgctaaggccgggtggtctcctggcctcgggctgaggcctcttcccggctgtctgcccctggcctgcgctggacctgctaagtgcccacagtggcagcgaggtcccggtcccggggctggggtgggagaccccgggctgagtgctgtggctttctggtggggggcgatggaaacaggaaaccaagcagtgggatcgcagcgttggtcactgcgaggcgagtggcgggctttctgtttctgccttgtccctccccacggtacctggttcccaggtgaaaatgaaaggaggggagaagttgagaacagaacattccataaaggatatttcctaataggctgcaagatgctgatgccgagaatgatgattttctttcctgcagatgaaactattagaaagggtcttagattgtggcaggtaggctttggagcaggcgccgagacatttctgagcatgaggacgagctacagcagctcctggggtggggctgcctgcgggatggcgggagaggatgccctggagaaccgtcctcccagtgtggaaggcccttttccctgaggagtgggcattctgggccagccggcgctggcttcgtgcctccacgtgggccagccccagctgctccgtgtttcctggcgttggcaatttactgtgctgctgagtgtgaggtcatctccggagcgttttcagcagcccctggctctgcggcgtctcttccgggctgtgggcatgcagggaagtggctctgaggcagtctgcgctgtggccctgcctctgcccagcgagaggccgtgggctctggacaagccgcccttcaggctggggtagcaggtcagtccaggcaggaagcagcacctgccccccgcgccagcccagccccagcctgagtgcaggagctgcaggacccgcgggggcttttccagctactctgttccttcacgtcctcccttctcagcctcgtccaagcaccgggaagacctccaggctgaccccttgagcagcagtcagcacaggtgcgtgggggcgtgagggaggcagggtcttcaccacaggcgccttcctctgtccttcctgctctttcttctctgcccaggccgctgcagctgcacagcctctgctacacctgggctgcctgggaggcttcctggtgtggtgtctggaccccacggccttgggtcatcctgcggctggtctggggtggggtctgttgtggtccttccacggtgtcagtggcctgaagtccctcgcttttggggggggggtctctcacccccaggccacatagggccagtggtaggggttccctctatgtcgggcagtgctgagggctgggatgctctgtgaccccagctggagcccacacctaagggctggcatccacatcatttcaccctgcagtgagggaagaggccaccaggtggcagcacagccacacccgttcccacgtcagaggagggcaaggctgggtactcagcagccactctgagccggggctccttccaggagctgaaatccacctgtctccatcttccttgcctgcctgggtactcatgccaagcagagactgggattaggggttctgtgctcttgcctaattaggaacattctcccatgtctcttgtgtggtcccagaaggagaagtgagtttgccaaggatatggggcaggaggctccctctgctgaccccctgcagcctggagccagcccggggactgtcctgggtggagggcaggtgaacacaagctgctgccggggactgtcctgggtggacggcaggtgaacacaagcggctgccgcatgtagccactcactcgactttttttcagctgtgaccattcctgggagctctttgagcctttctgtctcatttggaaccagggggaaccaggaaggggctcctggcctctctgtgtcctctgcagtgggggttgtggggggcgcagcatccacgccttgctgcccttctttcatgaagtctgttttttaagtgctggttcccccgaatattttatgcagaggagggaaaatttatagtggcaattattttctcacagtctggtgagcaggcaattaattaggagtaagggggcctagtagagcgtggcgtgtggcagaatcgcaccgccccggctccccagcccaccgccatgcagggctcgcgtgcgggaaaactaatatgccggcgtttaagcctgtgcccctctgctgggtgtaactgcgctgaaataaatgatctgacaatgtgaaaaaaaaaaaa

SEQ ID NO: 64655 - DNA, 3362 bp, Homo sapiens
  misc_feature (2774)..(2774): n is a, c, g, or t
  misc_feature (2788)..(2788): n is a, c, g, or t
  misc_feature (2815)..(2815): n is a, c, g, or t
ctttactctgcatctgtgagtttggatactttagatgccccatatgagggaatcccatacggtatttcagaactgagatgtttcagcccacaaaagaatctggccttgggggaggacttgtcccctggctacggacaggaccacgatgtgggagcatttggcacccaggccccctgttcctggagggaggggctggtggacgcgatttggagctggcttcgatttctcagtggtctctccacggcacccatcacaggacctttttccccaggttattttccctgcaggccccagtgccacccaagatttacctgtccatggtgtataagcttgaggggcccacggacgtcacagttgctttggagctgaccacaggggatgccggcagctgccacatcggtggcatctcagtgttgaacgcagaaacaagctcaagacacagcctccgacccctccgggtgccccccaccaagctggccagatgggtgggccgctgcggccggcagctgagtgggggctgggtccagcactgctacgaggtgagcctgcgtgggtgcctgctgctagacctcctcgtttgcttctcacggccgccgggtagtcgggaggaggagaacttcacctgtcggcttggagagatccaggtggtggacgctgccagcctgctggcccctctgccccaggtgcaggccgtcaccatctctcacatccgctggcagccatccgcctctgagcgggaggggccccctgctctgctccagctcagctgcaccctgcactggtccttcctcctctcacaagtccgttgcttccgaatccactgctggggagggatgagtgatgactctccgggcagggagctgccgaggccagagatgcccatgttcctggggttggcttttgccaccagtaccggatagtggacctgctggtggaagccgccgggcccggccaggatcgtcgcatggaatttctggtggagcctgtccccaaggaagggttccgggtacctcaggccgagtggggcagggcagttctgctttattcagcccctgcatgagcggatgctaaggccgggtggtctcctggcctcgggctgaggcctcttcccggctgtctgcccctggcctgcgctggacctgctaagtgcccacagtggcagcgaggtcccggtcccggggctggggtgggagaccccgggctgagtgctgtggctttctggtggggggcgatggaaacaggaaaccaagcagtgggatcgcagcgttggtcactgcgaggcgagtggcgggctttctgtttctgccttgtccctccccacggtacctggttcccaggtgaaaatgaaaggaggggagaagttgagaacagaacattccataaaggatatttcctaataggctgcaagatgctgatgccgagaatgatgattttctttcctgcagatgaaactattagaaagggtcttagattgtggcaggtaggctttggagcaggcgccgagacatttctgagcatgaggacgagctacagcagctcctggggtggggctgcctgcgggatggcgggagaggatgccctggagaaccgtcctcccagtgtggaaggcccttttccctgaggagtgggcattctgggccagccggcgctggcttcgtgcctccacgtgggccagccccagctgctccgtgtttcctggcgttggcaatttactgtgctgctgagtgtgaggtcatctccggagcgttttcagcagcccctggctctgcggcgtctcttccgggctgtgggcatgcagggaagtggctctgaggcagtctgcgctgtggccctgcctctgcccagcgagaggccgtgggctctggacaagccgcccttcaggctggggtagcaggtcagtccaggcaggaagcagcacctgccccccgcgccagcccagccccagcctgagtgcaggagctgcaggacccgcgggggcttttccagctactctgttccttcacgtcctcccttctcagcctcgtccaagcaccgggaagacctccaggctgaccccttgagcagcagtcagcacaggtgcgtgggggcgtgagggaggcagggtcttcaccacaggcgccttcctctgtccttcctgctctttcttctctgcccaggccgctgcagctgcacagcctctgctacacctgggctgcctgggaggcttcctggtgtggtgtctggaccccacggccttgggtcatcctgcggctggtctggggtggggtctgttgtggtccttccacggtgtcagtggcctgaagtccctcgcttttggggggggggtctctcacccccaggccacatagggccagtggtaggggttccctctatgtcgggcagtgctgagggctgggatgctctgtgaccccagctggagcccacacctaagggctggcatccacatcatttcaccctgcagtgagggaagaggccaccaggtggcagcacagccacacccgttcccacgtcagaggagggcaaggctgggtactcagcagccactctgagccggggctccttccaggagctgaaatccacctgtctccatcttccttgcctgcctgggtactcatgccaagcagagactgggattaggggttctgtgctcttgcctaattaggaacattctcccatgtctcttgtgtggtcccagaaggagaagtgagtttgccaaggatatggggcaggaggctccctctgctgaccccctgcagcctggagccagcccgggnactgtcctgggtgnagggcaggtgaacaaagctgctgcggngactgtcctgggtggagggcaggtgaacacaagctgctgccggggactgtcctgggtggacggcaggtgaacacaagcggctgccgcatgtagccactcactcgactttttttcagctgtgaccattcctgggagctctttgagcctttctgtctcatttggaaccagggggaaccaggaaggggctcctggcctctctgtgtcctctgcagtgggggttgtggggggcgcagcatccacgccttgctgcccttctttcatgaagtctgttttttaagtgctggttcccccgaatattttatgcagaggagggaaaatttatagtggcaattattttctcacagtctggtgagcaggcaattaattaggagtaagggggcctagtagagcgtggcgtgtggcagaatcgcaccgccccggctccccagcccaccgccatgcagggctcgcgtgcgggaaaactaatatgccggcgtttaagcctgtgcccctctgctgggtgtaactgcgctgaaataaatgatctgacaatgtgaaaaaaaaaaaa

SEQ ID NO: 64656 - DNA, 3468 bp, Homo sapiens
ctttactctgcatctgtgagtttggatactttagatgccccatatgagggaatcccatacggtatttcagaactgagatgtttcagcccacaaaagaatctggccttgggggaggacttgtcccctggctacggacaggaccacgatgtgggagcatttggcacccaggccccctgttcctggagggaggggctggtggacgcgatttggagctggcttcgatttctcagtggtctctccacggcacccatcacaggacctttttccccaggttattttccctgcaggccccagtgccacccaagatttacctgtccatggtgtataagcttgaggggcccacggacgtcacagttgctttggagctgaccacaggggatgccggcagctgccacatcggtggcatctcagtgttgaacgcagaaacaagctcaagacacagcctccgacccctccgggtgccccccaccaagctggccagatgggtgggccgctgcggccggcagctgagtgggggctgggtccagcactgctacgaggtgagcctgcgtgggtgcctgctgctagacctcctcgtttgcttctcacggccgccgggtagtcgggaggaggagaacttcacctgtcggcttggagagatccaggtgatgcttcccagaggggctcgggctgggctggctgtttgtccagctggagtgggggtggaggagtcagggaggggaaatgtgtgcgtgggggcaccctctccccgcccccgggcgtccagccgtgctgagccttctctcctgccaggtggtggacgctgccagcctgctggcccctctgccccaggtgcaggccgtcaccatctctcacatccgctggcagccatccgcctctgagcgggaggggccccctgctctgctccagctcagctgcaccctgcactggtccttcctcctctcacaagtccgttgcttccgaatccactgctggggagggatgagtgatgactctccgggcagggagctgccgaggccagagatgcccatgttcctggggttggcttttgccaccagtaccggatagtggacctgctggtggaagccgccgggcccggccaggatcgtcgcatggaatttctggtggagcctgtccccaaggaagggttccgggtacctcaggccgagtggggcagggcagttctgctttattcagcccctgcatgagcggatgctaaggccgggtggtctcctggcctcgggctgaggcctcttcccggctgtctgcccctggcctgcgctggacctgctaagtgcccacagtggcagcgaggtcccggtcccggggctggggtgggagaccccgggctgagtgctgtggctttctggtggggggcgatggaaacaggaaaccaagcagtgggatcgcagcgttggtcactgcgaggcgagtggcgggctttctgtttctgccttgtccctccccacggtacctggttcccaggtgaaaatgaaaggaggggagaagttgagaacagaacattccataaaggatatttcctaataggctgcaagatgctgatgccgagaatgatgattttctttcctgcagatgaaactattagaaagggtcttagattgtggcaggtaggctttggagcaggcgccgagacatttctgagcatgaggacgagctacagcagctcctggggtggggctgcctgcgggatggcgggagaggatgccctggagaaccgtcctcccagtgtggaaggcccttttccctgaggagtgggcattctgggccagccggcgctggcttcgtgcctccacgtgggccagccccagctgctccgtgtttcctggcgttggcaatttactgtgctgctgagtgtgaggtcatctccggagcgttttcagcagcccctggctctgcggcgtctcttccgggctgtgggcatgcagggaagtggctctgaggcagtctgcgctgtggccctgcctctgcccagcgagaggccgtgggctctggacaagccgcccttcaggctggggtagcaggtcagtccaggcaggaagcagcacctgccccccgcgccagcccagccccagcctgagtgcaggagctgcaggacccgcgggggcttttccagctactctgttccttcacgtcctcccttctcagcctcgtccaagcaccgggaagacctccaggctgaccccttgagcagcagtcagcacaggtgcgtgggggcgtgagggaggcagggtcttcaccacaggcgccttcctctgtccttcctgctctttcttctctgcccaggccgctgcagctgcacagcctctgctacacctgggctgcctgggaggcttcctggtgtggtgtctggaccccacggccttgggtcatcctgcggctggtctggggtggggtctgttgtggtccttccacggtgtcagtggcctgaagtccctcgcttttggggggggggtctctcacccccaggccacatagggccagtggtaggggttccctctatgtcgggcagtgctgagggctgggatgctctgtgaccccagctggagcccacacctaagggctggcatccacatcatttcaccctgcagtgagggaagaggccaccaggtggcagcacagccacacccgttcccacgtcagaggagggcaaggctgggtactcagcagccactctgagccggggctccttccaggagctgaaatccacctgtctccatcttccttgcctgcctgggtactcatgccaagcagagactgggattaggggttctgtgctcttgcctaattaggaacattctcccatgtctcttgtgtggtcccagaaggagaagtgagtttgccaaggatatggggcaggaggctccctctgctgaccccctgcagcctggagccagcccggggactgtcctgggtggagggcaggtgaacacaagctgctgccggggactgtcctgggtggacggcaggtgaacacaagcggctgccgcatgtagccactcactcgactttttttcagctgtgaccattcctgggagctctttgagcctttctgtctcatttggaaccagggggaaccaggaaggggctcctggcctctctgtgtcctctgcagtgggggttgtggggggcgcagcatccacgccttgctgcccttctttcatgaagtctgttttttaagtgctggttcccccgaatattttatgcagaggagggaaaatttatagtggcaattattttctcacagtctggtgagcaggcaattaattaggagtaagggggcctagtagagcgtggcgtgtggcagaatcgcaccgccccggctccccagcccaccgccatgcagggctcgcgtgcgggaaaactaatatgccggcgtttaagcctgtgcccctctgctgggtgtaactgcgctgaaataaatgatctgacaatgtgaaaaaaaaaaaa

SEQ ID NO: 64657 - DNA, 3518 bp, Homo sapiens
ctttactctgcatctgtgagtttggatactttagatgccccatatgagggaatcccatacggtatttcagaactgagatgtttcagcccacaaaagaatctggccttgggggaggacttgtcccctggctacggacaggaccacgatgtgggagcatttggcacccaggccccctgttcctggagggaggggctggtggacgcgatttggagctggcttcgatttctcagtggtctctccacggcacccatcacaggacctttttccccaggttattttccctgcaggccccagtgccacccaagatttacctgtccatggtgtataagcttgaggggcccacggacgtcacagttgctttggagctgaccacaggggatgccggcagctgccacatcggtggcatctcagtgttgaacgcagaaacaagctcaagacacagcctccgacccctccgggtgccccccaccaagctggccagatgggtgggccgctgcggccggcagctgagtgggggctgggtccagcactgctacgaggtgagcctgcgtgggtgcctgctgctagacctcctcgtttgcttctcacggccgccgggtagtcgggaggaggagaacttcacctgtcggcttggagagatccaggtgatgcttcccagaggggctcgggctgggctggctgtttgtccagctggagtgggggtggaggccgccccaggccgcccccttcttgggttcagcggggaactggggtggaggagtcagggaggggaaatgtgtgcgtgggggcaccctctccccgcccccgggcgtccagccgtgctgagccttctctcctgccaggtggtggacgctgccagcctgctggcccctctgccccaggtgcaggccgtcaccatctctcacatccgctggcagccatccgcctctgagcgggaggggccccctgctctgctccagctcagctgcaccctgcactggtccttcctcctctcacaagtccgttgcttccgaatccactgctggggagggatgagtgatgactctccgggcagggagctgccgaggccagagatgcccatgttcctggggttggcttttgccaccagtaccggatagtggacctgctggtggaagccgccgggcccggccaggatcgtcgcatggaatttctggtggagcctgtccccaaggaagggttccgggtacctcaggccgagtggggcagggcagttctgctttattcagcccctgcatgagcggatgctaaggccgggtggtctcctggcctcgggctgaggcctcttcccggctgtctgcccctggcctgcgctggacctgctaagtgcccacagtggcagcgaggtcccggtcccggggctggggtgggagaccccgggctgagtgctgtggctttctggtggggggcgatggaaacaggaaaccaagcagtgggatcgcagcgttggtcactgcgaggcgagtggcgggctttctgtttctgccttgtccctccccacggtacctggttcccaggtgaaaatgaaaggaggggagaagttgagaacagaacattccataaaggatatttcctaataggctgcaagatgctgatgccgagaatgatgattttctttcctgcagatgaaactattagaaagggtcttagattgtggcaggtaggctttggagcaggcgccgagacatttctgagcatgaggacgagctacagcagctcctggggtggggctgcctgcgggatggcgggagaggatgccctggagaaccgtcctcccagtgtggaaggcccttttccctgaggagtgggcattctgggccagccggcgctggcttcgtgcctccacgtgggccagccccagctgctccgtgtttcctggcgttggcaatttactgtgctgctgagtgtgaggtcatctccggagcgttttcagcagcccctggctctgcggcgtctcttccgggctgtgggcatgcagggaagtggctctgaggcagtctgcgctgtggccctgcctctgcccagcgagaggccgtgggctctggacaagccgcccttcaggctggggtagcaggtcagtccaggcaggaagcagcacctgccccccgcgccagcccagccccagcctgagtgcaggagctgcaggacccgcgggggcttttccagctactctgttccttcacgtcctcccttctcagcctcgtccaagcaccgggaagacctccaggctgaccccttgagcagcagtcagcacaggtgcgtgggggcgtgagggaggcagggtcttcaccacaggcgccttcctctgtccttcctgctctttcttctctgcccaggccgctgcagctgcacagcctctgctacacctgggctgcctgggaggcttcctggtgtggtgtctggaccccacggccttgggtcatcctgcggctggtctggggtggggtctgttgtggtccttccacggtgtcagtggcctgaagtccctcgcttttggggggggggtctctcacccccaggccacatagggccagtggtaggggttccctctatgtcgggcagtgctgagggctgggatgctctgtgaccccagctggagcccacacctaagggctggcatccacatcatttcaccctgcagtgagggaagaggccaccaggtggcagcacagccacacccgttcccacgtcagaggagggcaaggctgggtactcagcagccactctgagccggggctccttccaggagctgaaatccacctgtctccatcttccttgcctgcctgggtactcatgccaagcagagactgggattaggggttctgtgctcttgcctaattaggaacattctcccatgtctcttgtgtggtcccagaaggagaagtgagtttgccaaggatatggggcaggaggctccctctgctgaccccctgcagcctggagccagcccggggactgtcctgggtggagggcaggtgaacacaagctgctgccggggactgtcctgggtggacggcaggtgaacacaagcggctgccgcatgtagccactcactcgactttttttcagctgtgaccattcctgggagctctttgagcctttctgtctcatttggaaccagggggaaccaggaaggggctcctggcctctctgtgtcctctgcagtgggggttgtggggggcgcagcatccacgccttgctgcccttctttcatgaagtctgttttttaagtgctggttcccccgaatattttatgcagaggagggaaaatttatagtggcaattattttctcacagtctggtgagcaggcaattaattaggagtaagggggcctagtagagcgtggcgtgtggcagaatcgcaccgccccggctccccagcccaccgccatgcagggctcgcgtgcgggaaaactaatatgccggcgtttaagcctgtgcccctctgctgggtgtaactgcgctgaaataaatgatctgacaatgtgaaaaaaaaaaaa

SEQ ID NO: 64658 - DNA, 2932 bp, Homo sapiens
tatagttagtgaagaagccgtcgcaggaatcaaagaagaccctgttgtgctgattgagttcgtcttgccatttgagctgcccactttgcaccacgctgggtgtatgagtgtctggagaagaaggatttcttccagaaccaggacaagttctggggccgactggagcgttatctgcccacacatagcatctgctccttgcctttcgtcacgtccttctgcctgggcatgggtgcacggagggtctgctatggccaggaagaggcggtagggccctggtaccacctgagcgcccaggagatccagcccttgtttggagaacacaggctgggaggggatggccggggctgggtgaggacgcactgctgcctggaggatgcctggcaccctgcactggtccttcctcctctcacaagtccgttgcttccgaatccactgctggggagggatgagtgatgactctccgggcagggagctgccgaggccagagatgcccatgttcctggggttggcttttgccaccagtaccggatagtggacctgctggtggaagccgccgggcccggccaggatcgtcgcatggaatttctggtggagcctgtccccaaggaagggttccgggtacctcaggccgagtggggcagggcagttctgctttattcagcccctgcatgagcggatgctaaggccgggtggtctcctggcctcgggctgaggcctcttcccggctgtctgcccctggcctgcgctggacctgctaagtgcccacagtggcagcgaggtcccggtcccggggctggggtgggagaccccgggctgagtgctgtggctttctggtggggggcgatggaaacaggaaaccaagcagtgggatcgcagcgttggtcactgcgaggcgagtggcgggctttctgtttctgccttgtccctccccacggtacctggttcccaggtgaaaatgaaaggaggggagaagttgagaacagaacattccataaaggatatttcctaataggctgcaagatgctgatgccgagaatgatgattttctttcctgcagatgaaactattagaaagggtcttagattgtggcaggtaggctttggagcaggcgccgagacatttctgagcatgaggacgagctacagcagctcctggggtggggctgcctgcgggatggcgggagaggatgccctggagaaccgtcctcccagtgtggaaggcccttttccctgaggagtgggcattctgggccagccggcgctggcttcgtgcctccacgtgggccagccccagctgctccgtgtttcctggcgttggcaatttactgtgctgctgagtgtgaggtcatctccggagcgttttcagcagcccctggctctgcggcgtctcttccgggctgtgggcatgcagggaagtggctctgaggcagtctgcgctgtggccctgcctctgcccagcgagaggccgtgggctctggacaagccgcccttcaggctggggtagcaggtcagtccaggcaggaagcagcacctgccccccgcgccagcccagccccagcctgagtgcaggagctgcaggacccgcgggggcttttccagctactctgttccttcacgtcctcccttctcagcctcgtccaagcaccgggaagacctccaggctgaccccttgagcagcagtcagcacaggtgcgtgggggcgtgagggaggcagggtcttcaccacaggcgccttcctctgtccttcctgctctttcttctctgcccaggccgctgcagctgcacagcctctgctacacctgggctgcctgggaggcttcctggtgtggtgtctggaccccacggccttgggtcatcctgcggctggtctggggtggggtctgttgtggtccttccacggtgtcagtggcctgaagtccctcgcttttggggggggggtctctcacccccaggccacatagggccagtggtaggggttccctctatgtcgggcagtgctgagggctgggatgctctgtgaccccagctggagcccacacctaagggctggcatccacatcatttcaccctgcagtgagggaagaggccaccaggtggcagcacagccacacccgttcccacgtcagaggagggcaaggctgggtactcagcagccactctgagccggggctccttccaggagctgaaatccacctgtctccatcttccttgcctgcctgggtactcatgccaagcagagactgggattaggggttctgtgctcttgcctaattaggaacattctcccatgtctcttgtgtggtcccagaaggagaagtgagtttgccaaggatatggggcaggaggctccctctgctgaccccctgcagcctggagccagcccggggactgtcctgggtggagggcaggtgaacacaagctgctgccggggactgtcctgggtggacggcaggtgaacacaagcggctgccgcatgtagccactcactcgactttttttcagctgtgaccattcctgggagctctttgagcctttctgtctcatttggaaccagggggaaccaggaaggggctcctggcctctctgtgtcctctgcagtgggggttgtggggggcgcagcatccacgccttgctgcccttctttcatgaagtctgttttttaagtgctggttcccccgaatattttatgcagaggagggaaaatttatagtggcaattattttctcacagtctggtgagcaggcaattaattaggagtaagggggcctagtagagcgtggcgtgtggcagaatcgcaccgccccggctccccagcccaccgccatgcagggctcgcgtgcgggaaaactaatatgccggcgtttaagcctgtgcccctctgctgggtgtaactgcgctgaaataaatgatctgacaatgtgaaaaaaaaaaaa

SEQ ID NO: 64659 - DNA, 753 bp, Homo sapiens
tttatcttttgttgtgaattcctcttccttgcctgcctgggtactcatgccaagcagagactgggattaggggttctgtgctcttgcctaattaggaacattctcccatgtctcttgtgtggtcccagaaggagaagtgagtttgccaaggatatggggcaggaggctccctctgctgaccccctgcagcctggagccagcccggggactgtcctgggtggagggcaggtgaacacaagctgctgccggggactgtcctgggtggacggcaggtgaacacaagcggctgccgcatgtagccactcactcgactttttttcagctgtgaccattcctgggagctctttgagcctttctgtctcatttggaaccagggggaaccaggaaggggctcctggcctctctgtgtcctctgcagtgggggttgtggggggcgcagcatccacgccttgctgcccttctttcatgaagtctgttttttaagtgctggttcccccgaatattttatgcagaggagggaaaatttatagtggcaattattttctcacagtctggtgagcaggcaattaattaggagtaagggggcctagtagagcgtggcgtgtggcagaatcgcaccgccccggctccccagcccaccgccatgcagggctcgcgtgcgggaaaactaatatgccggcgtttaagcctgtgcccctctgctgggtgtaactgcgctgaaataaatgatctgacaatgtgaaaaaaaaaaaa

SEQ ID NO: 64660 - DNA, 1742 bp, Homo sapiens
acagtgtcatggaggccgcggcggtgacggtcacccggtcggctacacggcggcggcggcggcagctgcaggggctggcggccccggaggcggggacgcaggaggagcaggaggatcaggagccgcggccgcggcggcggcggccgggaaggagcatcaaagatgaagaagaagagacagtctttcgagaggtggtcagtttttccccggaccccctgccagttagatattatgacaaggacaccaccaaaccaatcagcttttacttgtcttcgctggaggagctcttggcgtggaagccccgcttggaggatggctttaatgtggccctggagcccctggcgtgtcgccagccccctctgagcagccagaggccccggactttgttgtgtcatgacatgatgggcgggtacctggatgacaggttcattcagggctcggtggtgcagactccctatgctttctaccactggcagtgcatcgacgtctttgtgtacttcagccaccacaccgtcaccattcccccagtgggctggaccaacactgcccacaggcatggggtctgcgtgctggggactttcatcacggagtggaatgaagggggaaggctctgtgaagccttcctggccggggatgagcgctcgtaccaggcagtggctgaccggctggtccagatcactcagttttttcgttttgatggctggctgatcaacatcgagaactcgctgagtctggccgctgtggggaacatgcctcctttcctgcggtacctcaccacacagctgcaccggcaggtcccagggggcctggtgctctggtatgacagcgtggtgcaaagtgggcagctcaaatggcaagacgaactcaaccagcacaacagggtcttctttgattcctgcgacggcttcttcactaactataactggcgggaggagcacttggagcggatgctggggcaggctggggagcgccgggctgatgtgtacgtgggcgtggatgtgtttgctcgagggaacgtggtcggaggccgattcgacacagacaagtcgttggagctgatccgaaagcatggcttctccgtggctttgtttgcccccggctgggtgtatgagtgtctggagaagaaggatttcttccagaaccaggacaagttctggggccgactggagcgttatctgcccacacatagcatctgctccttgcctttcgtcacgtccttctgcctgggcatgggtgcacggagggtctgctatggccaggaagaggcggtagggccctggtaccacctgagcgcccaggagatccagcccttgtttggagaacacaggctgggaggggatggccggggctgggtgaggacgcactgctgcctggaggatgcctggcacggaggcagctccctgctcgtccggggtgtgatcccaccggaggttggaaatgtggctgtgaggtgggtgagtgacggaggacggtgggcccaccagcttctcccatcacacgtggtggccatggaactggacagatggggcagtggaggccagaacaaggacagaggacagacccagatgggttttttaaaattgtgatcaaaaatgcattaacgtgaaattcaccatcttgaccctgttgaagtgaacggtacaggagtgttaactctgcgtacgttgctacgtgacagatccctagaactgtgtcatcttgtaggactggactctccccattgcacattagccccccatcct

SEQ ID NO: 64661 - DNA, 460 bp, Homo sapiens
cggccgcggcggcggcggccgggaaggaggtggggctgcggggcccgcgtgaaccccgatccgcggggctgagagtccgtggccccggggcccgaggtttcccggcacgggcgcgccgaggggcggggggccggcgcctgtgtccgctccgtgcacagtaagggacagagggtggcagcgcccctccgccccggtccgccccgccgtcctcgcgccactgccgggcagcggcctccggcccccgtgcgtgacccctgcctatctcagaaatacgggtgcaaacccgagtggccgcggggcccagcgggaatcccgacgccccggccagacccctgcttcccacgtcgctggtctatgcggaagatcccggcggcggtgctcatgcctggctcagtggatgccggctggtggaaggggtggccttctgtaggggtgacactagaactgagtctttggggag

SEQ ID NO: 64662 - DNA, 150 bp, Homo sapiens
ccatccctctgagtactaggaggggaaaggctgagactgcagggttggtgggggtggccccatccttctgggcctgggcctcacagcaggtccttgttgcttctcagggtcttctttgattcctgcgacggcttcttcactaactataac

SEQ ID NO: 64663 - DNA, 221 bp, Homo sapiens
cctgtctggactctggtcctgatgtgcccagcgtctccctctgtctcttcagtcgttggagctgatccgaaagcatggcttctccgtggctttgtttgcccccggctgggtgtatgagtgtctggagaagaaggatttcttccagaaccaggacaagtgagtcctgctgtcctgggtgcttagtgcaggctgatgggagggaggggtttctggtgtctctg

SEQ ID NO: 64664 - DNA, 2738 bp, Homo sapiens
acagtgtcatggaggccgcggcggtgacggtcacccggtcggctacacggcggcggcggcggcagctgcaggggctggcggccccggaggcggggacgcaggaggagcaggaggatcaggagccgcggccgcggcggcggcggccgggaaggagcatcaaagatgaagaagaagagacagtctttcgagaggtggtcagtttttccccggaccccctgccagttagatattatgacaaggacaccaccaaaccaatcagcttttacttgtcttcgctggaggagctcttggcgtggaagccccgcttggaggatggctttaatgtggccctggagcccctggcgtgtcgccagccccctctgagcagccagaggccccggactttgttgtgtcatgacatgatgggcgggtacctggatgacaggttcattcagggctcggtggtgcagactccctatgctttctaccactggcagtgcatcgacgtctttgtgtacttcagccaccacaccgtcaccattcccccagtgggctggaccaacactgcccacaggcatggggtctgcgtgctggggactttcatcacggagtggaatgaagggggaaggctctgtgaagccttcctggccggggatgagcgctcgtaccaggcagtggctgaccggctggtccagatcactcagttttttcgttttgatggctggctgatcaacatcgagaactcgctgagtctggccgctgtggggaacatgcctcctttcctgcggtacctcaccacacagctgcaccggcaggtcccagggggcctggtgctctggtatgacagcgtggtgcaaagtgggcagctcaaatggcaagacgaactcaaccagcacaacagggtcttctttgattcctgcgacggcttcttcactaactataactggcgggaggagcacttggagcggatgctggggcaggctggggagcgccgggctgatgtgtacgtgggcgtggatgtgtttgctcgagggaacgtggtcggaggccgattcgacacagacaagtcgttggagctgatccgaaagcatggcttctccgtggctttgtttgcccccggctgctccgtgtttcctggcgttggcaatttactgtgctgctgagtgtgaggtcatctccggagcgttttcagcagcccctggctctgcggcgtctcttccgggctgtgggcatgcagggaagtggctctgaggcagtctgcgctgtggccctgcctctgcccagcgagaggccgtgggctctggacaagccgcccttcaggctggggtagcaggtcagtccaggcaggaagcagcacctgccccccgcgccagcccagccccagcctgagtgcaggagctgcaggacccgcgggggcttttccagctactctgttccttcacgtcctcccttctcagcctcgtccaagcaccgggaagacctccaggctgaccccttgagcagcagtcagcacaggtgcgtgggggcgtgagggaggcagggtcttcaccacaggcgccttcctctgtccttcctgctctttcttctctgcccaggccgctgcagctgcacagcctctgctacacctgggctgcctgggaggcttcctggtgtggtgtctggaccccacggccttgggtcatcctgcggctggtctggggtggggtctgttgtggtccttccacggtgtcagtggcctgaagtccctcgcttttggggggggggtctctcacccccaggccacatagggccagtggtaggggttccctctatgtcgggcagtgctgagggctgggatgctctgtgaccccagctggagcccacacctaagggctggcatccacatcatttcaccctgcagtgagggaagaggccaccaggtggcagcacagccacacccgttcccacgtcagaggagggcaaggctgggtactcagcagccactctgagccggggctccttccaggagctgaaatccacctgtctccatcttccttgcctgcctgggtactcatgccaagcagagactgggattaggggttctgtgctcttgcctaattaggaacattctcccatgtctcttgtgtggtcccagaaggagaagtgagtttgccaaggatatggggcaggaggctccctctgctgaccccctgcagcctggagccagcccggggactgtcctgggtggagggcaggtgaacacaagctgctgccggggactgtcctgggtggacggcaggtgaacacaagcggctgccgcatgtagccactcactcgactttttttcagctgtgaccattcctgggagctctttgagcctttctgtctcatttggaaccagggggaaccaggaaggggctcctggcctctctgtgtcctctgcagtgggggttgtggggggcgcagcatccacgccttgctgcccttctttcatgaagtctgttttttaagtgctggttcccccgaatattttatgcagaggagggaaaatttatagtggcaattattttctcacagtctggtgagcaggcaattaattaggagtaagggggcctagtagagcgtggcgtgtggcagaatcgcaccgccccggctccccagcccaccgccatgcagggctcgcgtgcgggaaaactaatatgccggcgtttaagcctgtgcccctctgctgggtgtaactgcgctgaaataaatgatctgacaatgtgaaaaaaaaaaaa

SEQ ID NO: 64665 - DNA, 861 bp, Homo sapiens
cttcaaacagtcaaagttcttgtgaatggcggtggtcattgatggtggtgctcattgtcgatgtgtcttggcttactttacacaaaacaaactggcgggaggagcacttggagcggatgctggggcaggctggggagcgccgggctgatgtgtacgtgggcgtggatgtgtttgctcgagggaacgtggtcggaggccgattcgacacagacaaggtgggtggtggctttcgtccaagggccagcggcccagtgcctcccctgggacctcatttcctcatggaccttccattcccgtctgcacctcaaaggaatgacagcagctgttcttcccagagtggggatcccgtggcactgagaaacaggtgtcctgccccggccaagctatgtccccactgaaacccctttcccggctatttctacaatcagataatgtatttttgtgtgggtgttaccagacagaggcgcgtcgttcccccgctgtccggtcctcggcgggcctgggcctcctgtcccagctgcgttccttgatcttccccgtgagggaagcctgcggggacgcacaggggcctgcagcgcctctcactgcggctcaggggcgaggacgggggaggtgcccagggtttggggatcggtaggtgtcatgacgagggagcattttctggcaaggcaggacacaccagcacagaggaaggagcggggccaggccggtgcccctggcgtgggatgcgcagggctctgcctgcctctggtctatcagtcctgcccgttcccagagccccagggatgttctcagcccttaatttagctttaaatgagtaaattaatccaataactaaagagcctctttactgcccgtgat

SEQ ID NO: 64666 - DNA, 3936 bp, Homo sapiens
acagtgtcatggaggccgcggcggtgacggtcacccggtcggctacacggcggcggcggcggcagctgcaggggctggcggccccggaggcggggacgcaggaggagcaggaggatcaggagccgcggccgcggcggcggcggccgggaaggagcatcaaagatgaagaagaagagacagtctttcgagaggtggtcagtttttccccggaccccctgccagttagatattatgacaaggacaccaccaaaccaatcagcttttacttgtcttcgctggaggagctcttggcgtggaagccccgcttggaggatggctttaatgtggccctggagcccctggcgtgtcgccagccccctctgagcagccagaggccccggactttgttgtgtcatgacatgatgggcgggtacctggatgacaggttcattcagggctcggtggtgcagactccctatgctttctaccactggcagtgcatcgacgtctttgtgtacttcagccaccacaccgtcaccattcccccagtgggctggaccaacactgcccacaggcatggggtctgcgtgctggggactttcatcacggagtggaatgaagggggaaggctctgtgaagccttcctggccggggatgagcgctcgtaccaggcagtggctgaccggctggtccagatcactcagttttttcgttttgatggctggctgatcaacatcgagaactcgctgagtctggccgctgtggggaacatgcctcctttcctgcggtacctcaccacacagctgcaccggcaggtcccagggggcctggtgctctggtatgacagcgtggtgcaaagtgggcagctcaaatggcaagacgaactcaaccagcacaacagggtcttctttgattcctgcgacggcttcttcactaactataactggcgggaggagcacttggagcggatgctggggcaggctggggagcgccgggctgatgtgtacgtgggcgtggatgtgtttgctcgagggaacgtggtcggaggccgattcgacacagacaagtcgttggagctgatccgaaagcatggcttctccgtggctttgtttgcccccggctgggtgtatgagtgtctggagaagaaggatttcttccagaaccaggacaagttctggggccgactggagcgttatctgcccacacatagcatctgctccttgcctttcgtcacgtccttctgcctgggcatgggtgcacggagggtctgctatggccaggaagaggcggtagggccctggtaccacctgagcgcccaggagatccagcccttgtttggagaacacaggctgggaggggatggccggggctgggtgaggacgcactgctgcctggaggatgcctggcaccctgcactggtccttcctcctctcacaagtccgttgcttccgaatccactgctggggagggatgagtgatgactctccgggcagggagctgccgaggccagagatgcccatgttcctggggttggcttttgccaccagtaccggatagtggacctgctggtggaagccgccgggcccggccaggatcgtcgcatggaatttctggtggagcctgtccccaaggaagggttccgggtacctcaggccgagtggggcagggcagttctgctttattcagcccctgcatgagcggatgctaaggccgggtggtctcctggcctcgggctgaggcctcttcccggctgtctgcccctggcctgcgctggacctgctaagtgcccacagtggcagcgaggtcccggtcccggggctggggtgggagaccccgggctgagtgctgtggctttctggtggggggcgatggaaacaggaaaccaagcagtgggatcgcagcgttggtcactgcgaggcgagtggcgggctttctgtttctgccttgtccctccccacggtacctggttcccaggtgaaaatgaaaggaggggagaagttgagaacagaacattccataaaggatatttcctaataggctgcaagatgctgatgccgagaatgatgattttctttcctgcagatgaaactattagaaagggtcttagattgtggcaggtaggctttggagcaggcgccgagacatttctgagcatgaggacgagctacagcagctcctggggtggggctgcctgcgggatggcgggagaggatgccctggagaaccgtcctcccagtgtggaaggcccttttccctgaggagtgggcattctgggccagccggcgctggcttcgtgcctccacgtgggccagccccagctgctccgtgtttcctggcgttggcaatttactgtgctgctgagtgtgaggtcatctccggagcgttttcagcagcccctggctctgcggcgtctcttccgggctgtgggcatgcagggaagtggctctgaggcagtctgcgctgtggccctgcctctgcccagcgagaggccgtgggctctggacaagccgcccttcaggctggggtagcaggtcagtccaggcaggaagcagcacctgccccccgcgccagcccagccccagcctgagtgcaggagctgcaggacccgcgggggcttttccagctactctgttccttcacgtcctcccttctcagcctcgtccaagcaccgggaagacctccaggctgaccccttgagcagcagtcagcacaggtgcgtgggggcgtgagggaggcagggtcttcaccacaggcgccttcctctgtccttcctgctctttcttctctgcccaggccgctgcagctgcacagcctctgctacacctgggctgcctgggaggcttcctggtgtggtgtctggaccccacggccttgggtcatcctgcggctggtctggggtggggtctgttgtggtccttccacggtgtcagtggcctgaagtccctcgcttttggggggggggtctctcacccccaggccacatagggccagtggtaggggttccctctatgtcgggcagtgctgagggctgggatgctctgtgaccccagctggagcccacacctaagggctggcatccacatcatttcaccctgcagtgagggaagaggccaccaggtggcagcacagccacacccgttcccacgtcagaggagggcaaggctgggtactcagcagccactctgagccggggctccttccaggagctgaaatccacctgtctccatcttccttgcctgcctgggtactcatgccaagcagagactgggattaggggttctgtgctcttgcctaattaggaacattctcccatgtctcttgtgtggtcccagaaggagaagtgagtttgccaaggatatggggcaggaggctccctctgctgaccccctgcagcctggagccagcccggggactgtcctgggtggagggcaggtgaacacaagctgctgccggggactgtcctgggtggacggcaggtgaacacaagcggctgccgcatgtagccactcactcgactttttttcagctgtgaccattcctgggagctctttgagcctttctgtctcatttggaaccagggggaaccaggaaggggctcctggcctctctgtgtcctctgcagtgggggttgtggggggcgcagcatccacgccttgctgcccttctttcatgaagtctgttttttaagtgctggttcccccgaatattttatgcagaggagggaaaatttatagtggcaattattttctcacagtctggtgagcaggcaattaattaggagtaagggggcctagtagagcgtggcgtgtggcagaatcgcaccgccccggctccccagcccaccgccatgcagggctcgcgtgcgggaaaactaatatgccggcgtttaagcctgtgcccctctgctgggtgtaactgcgctgaaataaatgatctgacaatgtgaaaaaaaaaaaa

SEQ ID NO: 64667 - DNA, 2619 bp, Homo sapiens
  misc_feature (2031)..(2031): n is a, c, g, or t
  misc_feature (2045)..(2045): n is a, c, g, or t
  misc_feature (2072)..(2072): n is a, c, g, or t
ctttactctgcatctgtgagtttggatactttagatgccccatatgagggaatcccatacggtatttcagaactgagatgtttcagcccacaaaagaatctggccttgggggaggacttgtcccctggctacggacaggaccacgatgtgggagcatttggcacccaggccccctgttcctggagggaggggctggtggacgcgatttggagctggcttcgatttctcagtggtctctccacggcacccatcacaggacctttttccccaggttattttccctgcaggccccagtgccacccaagatttacctgtccatggtgtataagcttgaggggcccacggacgtcacagttgctttggagctgaccacaggggatgccggcagctgccacatcggtggcatctcagtgttgaacgcagaaacaagctcaagacacagcctccgacccctccgggtgccccccaccaagctggccagatgggtgggccgctgcggccggcagctgagtgggggctgggtccagcactgctacgaggtgagcctgcgtgggtgcctgctgctagacctcctcgtttgcttctcacggccgccgggtagtcgggaggaggagaacttcacctgtcggcttggagagatccaggtggtggacgctgccagcctgctggcccctctgccccaggtgcaggccgtcaccatctctcacatccgctggcagccatccgcctctgagcgggaggggccccctgctctgctccagctcagctgcaccctgcactggtccttcctcctctcacaagtccgttgcttccgaatccactgctggggagggatgagtgatgactctccgggcagggagctgccgaggccagagatgcccatgttcctggggttggcttttgccaccagtaccggatagtggacctgctggtggaagccgccgggcccggccaggatcgtcgcatggaatttctggtggagcctgtccccaaggaagggttccgggtacctcaggccgagtggggcagggcagttctgctttattcagcccctgcatgagcggatgctaaggccgggtggtctcctggcctcgggctgaggcctcttcccggctgtctgcccctggcctgcgctggacctgctaagtgcccacagtggcagcgaggtcccggtcccggggctggggtgggagaccccgggctgagtgctgtggctttctggtggggggcgatggaaacaggaaaccaagcagtgggatcgcagcgttggtcactgcgaggcgagtggcgggctttctgtttctgccttgtccctccccacggtacctggttcccaggtgaaaatgaaaggaggggagaagttgagaacagaacattccataaaggatatttcctaataggctgcaagatgctgatgccgagaatgatgattttctttcctgcagatgaaactattagaaagggtcttagattgtggcaggtaggctttggagcaggcgccgagacatttctgagcatgaggacgagctacagcagctcctggggtggggctgcctgcgggatggcgggagaggatgccctggagaaccgtcctcccagtgtggaaggcccttttccctgaggagtgggcattctgggccagccggcgctggcttcgtgcctccacgtgggccagccccagctgctccgtgtttcctggcgttggcaatttactgtgctgctgagtgtgaggtcatctccggagcgttttcagcagcccctggctctgcggcgtctcttccgggctgtgggcatgcagggaagtggctctgaggcagtctgcgctgtggccctgcctctgcccagcgagaggccgtgggctctggacaagccgcccttcaggctggggtagcagcctcgtccaagcaccgggaagacctccaggctgaccccttgagcagcagtcagcacagaaggagaagtgagtttgccaaggatatggggcaggaggctccctctgctgaccccctgcagcctggagccagcccgggnactgtcctgggtgnagggcaggtgaacaaagctgctgcggngactgtcctgggtggagggcaggtgaacacaagctgctgccggggactgtcctgggtggacggcaggtgaacacaagcggctgccgcatgtagccactcactcgactttttttcagctgtgaccattcctgggagctctttgagcctttctgtctcatttggaaccagggggaaccaggaaggggctcctggcctctctgtgtcctctgcagtgggggttgtggggggcgcagcatccacgccttgctgcccttctttcatgaagtctgttttttaagtgctggttcccccgaatattttatgcagaggagggaaaatttatagtggcaattattttctcacagtctggtgagcaggcaattaattaggagtaagggggcctagtagagcgtggcgtgtggcagaatcgcaccgccccggctccccagcccaccgccatgcagggctcgcgtgcgggaaaactaatatgccggcgtttaagcctgtgcccctctgctgggtgtaactgcgctgaaataaatgatctgacaatgtgaaaaaaaaaaaa

SEQ ID NO: 64668 - DNA, 3020 bp, Homo sapiens
gaccgcgcagccacagccagttggggcccagcccctgcccccctgcccttgcagcagcgctgaccgcctctcccgcgccctcttctggcgggcttgtggaacgacgggggtgatgcccagcagcctccagtcgttggagctgatccgaaagcatggcttctccgtggctttgtttgcccccggctgggtgtatgagtgtctggagaagaaggatttcttccagaaccaggacaagttctggggccgactggagcgttatctgcccacacatagcatctgctccttgcctttcgtcacgtccttctgcctgggcatgggtgcacggagggtctgctatggccaggaagaggcggtagggccctggtaccacctgagcgcccaggagatccagcccttgtttggagaacacaggctgggaggggatggccggggctgggtgaggacgcactgctgcctggaggatgcctggcaccctgcactggtccttcctcctctcacaagtccgttgcttccgaatccactgctggggagggatgagtgatgactctccgggcagggagctgccgaggccagagatgcccatgttcctggggttggcttttgccaccagtaccggatagtggacctgctggtggaagccgccgggcccggccaggatcgtcgcatggaatttctggtggagcctgtccccaaggaagggttccgggtacctcaggccgagtggggcagggcagttctgctttattcagcccctgcatgagcggatgctaaggccgggtggtctcctggcctcgggctgaggcctcttcccggctgtctgcccctggcctgcgctggacctgctaagtgcccacagtggcagcgaggtcccggtcccggggctggggtgggagaccccgggctgagtgctgtggctttctggtggggggcgatggaaacaggaaaccaagcagtgggatcgcagcgttggtcactgcgaggcgagtggcgggctttctgtttctgccttgtccctccccacggtacctggttcccaggtgaaaatgaaaggaggggagaagttgagaacagaacattccataaaggatatttcctaataggctgcaagatgctgatgccgagaatgatgattttctttcctgcagatgaaactattagaaagggtcttagattgtggcaggtaggctttggagcaggcgccgagacatttctgagcatgaggacgagctacagcagctcctggggtggggctgcctgcgggatggcgggagaggatgccctggagaaccgtcctcccagtgtggaaggcccttttccctgaggagtgggcattctgggccagccggcgctggcttcgtgcctccacgtgggccagccccagctgctccgtgtttcctggcgttggcaatttactgtgctgctgagtgtgaggtcatctccggagcgttttcagcagcccctggctctgcggcgtctcttccgggctgtgggcatgcagggaagtggctctgaggcagtctgcgctgtggccctgcctctgcccagcgagaggccgtgggctctggacaagccgcccttcaggctggggtagcaggtcagtccaggcaggaagcagcacctgccccccgcgccagcccagccccagcctgagtgcaggagctgcaggacccgcgggggcttttccagctactctgttccttcacgtcctcccttctcagcctcgtccaagcaccgggaagacctccaggctgaccccttgagcagcagtcagcacaggtgcgtgggggcgtgagggaggcagggtcttcaccacaggcgccttcctctgtccttcctgctctttcttctctgcccaggccgctgcagctgcacagcctctgctacacctgggctgcctgggaggcttcctggtgtggtgtctggaccccacggccttgggtcatcctgcggctggtctggggtggggtctgttgtggtccttccacggtgtcagtggcctgaagtccctcgcttttggggggggggtctctcacccccaggccacatagggccagtggtaggggttccctctatgtcgggcagtgctgagggctgggatgctctgtgaccccagctggagcccacacctaagggctggcatccacatcatttcaccctgcagtgagggaagaggccaccaggtggcagcacagccacacccgttcccacgtcagaggagggcaaggctgggtactcagcagccactctgagccggggctccttccaggagctgaaatccacctgtctccatcttccttgcctgcctgggtactcatgccaagcagagactgggattaggggttctgtgctcttgcctaattaggaacattctcccatgtctcttgtgtggtcccagaaggagaagtgagtttgccaaggatatggggcaggaggctccctctgctgaccccctgcagcctggagccagcccggggactgtcctgggtggagggcaggtgaacacaagctgctgccggggactgtcctgggtggacggcaggtgaacacaagcggctgccgcatgtagccactcactcgactttttttcagctgtgaccattcctgggagctctttgagcctttctgtctcatttggaaccagggggaaccaggaaggggctcctggcctctctgtgtcctctgcagtgggggttgtggggggcgcagcatccacgccttgctgcccttctttcatgaagtctgttttttaagtgctggttcccccgaatattttatgcagaggagggaaaatttatagtggcaattattttctcacagtctggtgagcaggcaattaattaggagtaagggggcctagtagagcgtggcgtgtggcagaatcgcaccgccccggctccccagcccaccgccatgcagggctcgcgtgcgggaaaactaatatgccggcgtttaagcctgtgcccctctgctgggtgtaactgcgctgaaataaatgatctgacaatgtgaaaaaaaaaaaa

SEQ ID NO: 64669 - DNA, 3176 bp, Homo sapiens
ctttactctgcatctgtgagtttggatactttagatgccccatatgagggaatcccatacggtatttcagaactgagatgtttcagcccacaaaagaatctggccttgggggaggacttgtcccctggctacggacaggaccacgatgtgggagcatttggcacccaggccccctgttcctggagggaggggctggtggacgcgatttggagctggcttcgatttctcagtggtctctccacggcacccatcacaggacctttttccccaggttattttccctgcaggccccagtgccacccaagatttacctgtccatggtgtataagcttgaggggcccacggacgtcacagttgctttggagctgaccacaggggatgccggcagctgccacatcggtggcatctcagtgttgaacgcagaaacaagctcaagacacagcctccgacccctccgggtgccccccaccaagctggccagatgggtgggccgctgcggccggcagctgagtgggggctgggtccagcactgctacgaggtgagcctgcgtgggtgcctgctgctagacctcctcgtttgcttctcacggccgccgggtagtcgggaggaggagaacttcacctgtcggcttggagagatccaggtggtggacgctgccagcctgctggcccctctgccccaggtgcaggccgtcaccatctctcacatccgctggcagccatccgcctctgagcgggaggggccccctgctctgctccagctcagctgcaccctgcactggtccttcctcctctcacaagtccgttgcttccgaatccactgctggggagggatgagtgatgactctccgggcagggagctgccgaggccagagatgcccatgttcctggggttggcttttgccaccagtaccggatagtggacctgctggtggaagccgccgggcccggccaggatcgtcgcatggaatttctggtggagcctgtccccaaggaagggttccgggtacctcaggccgagtggggcagggcagttctgctttattcagcccctgcatgagcggatgctaaggccgggtggtctcctggcctcgggctgaggcctcttcccggctgtctgcccctggcctgcgctggacctgctaagtgcccacagtggcagcgaggtcccggtcccggggctggggtgggagaccccgggctgagtgctgtggctttctggtggggggcgatggaaacaggaaaccaagcagtgggatcgcagcgttggtcactgcgaggcgagtggcgggctttctgtttctgccttgtccctccccacggtacctggttcccaggtgaaaatgaaaggaggggagaagttgagaacagaacattccataaaggatatttcctaataggctgcaagatgctgatgccgagaatgatgattttctttcctgcagatgaaactattagaaagggtcttagattgtggcaggtaggctttggagcaggcgccgagacatttctgagcatgaggacgagctacagcagctcctggggtggggctgcctgcgggatggcgggagaggatgccctggagaaccgtcctcccagtgtggaaggcccttttccctgaggagtgggcattctgggccagccggcgctggcttcgtgcctccacgtgggccagccccagctgctccgtgtttcctggcgttggcaatttactgtgctgctgagtgtgaggtcatctccggagcgttttcagcagcccctggctctgcggcgtctcttccgggctgtgggcatgcagggaagtggctctgaggcagtctgcgctgtggccctgcctctgcccagcgagaggccgtgggctctggacaagccgcccttcaggctggggtagcaggtcagtccaggcaggaagcagcacctgccccccgcgccagcccagccccagcctgagtgcaggagctgcaggacccgcgggggcttttccagctactctgttccttcacgtcctcccttctcagcctcgtccaagcaccgggaagacctccaggctgaccccttgagcagcagtcagcacaggtgcgtgggggcgtgagggaggcagggtcttcaccacaggcgccttcctctgtccttcctgctctttcttctctgcccaggccgctgcagctgcacagcctctgctacacctgggctgcctgggaggcttcctggtgtggtgtctggaccccacggccttgggtcatcctgcggctggtctggggtggggtctgttgtggtccttccacggtgtcagtggcctgaagtccctcgcttttggggggggggtctctcacccccaggccacatagggccagtggtaggggttccctctatgtcgggcagtgctgagggctgggatgctctgtgaccccagctggagcccacacctaagggctggcatccacatcatttcaccctgcagtgagggaagaggccaccaggtggcagcacagccacacccgttcccacgtcagaggagggcaaggctgggtactcagcagccactctgagccggggctccttccaggagctgaaatccacctgtctccatcttccttgcctgcctgggtactcatgccaagcagagactgggattaggggttctgtgctcttgcctaattaggaacattctcccatgtctcttgtgtggtcccagaaggagaagtgagtttgccaaggatatggggcaggaggctccctctgctgaccccctgcagcctggagccagcccggggactgtcctgggtggagggcagctgtgaccattcctgggagctctttgagcctttctgtcctctgcagtgggggttgtggggggcgcagcatccacgccttgctgcccttctttcatgaagtctgttttttaagtgctggttcccccgaatattttatgcagaggagggaaaatttatagtggcaattattttctcacagtctggtgagcaggcaattaattaggagtaagggggcctagtagagcgtggcgtgtggcagaatcgcaccgccccggctccccagcccaccgccatgcagggctcgcgtgcgggaaaactaatatgccggcgtttaagcctgtgcccctctgctgggtgtaactgcgctgaaataaatgatctgacaatgtgaaaaaaaaaaaa

SEQ ID NO: 64670 - DNA, 1692 bp, Homo sapiens
acagtgtcatggaggccgcggcggtgacggtcacccggtcggctacacggcggcggcggcggcagctgcaggggctggcggccccggaggcggggacgcaggaggagcaggaggatcaggagccgcggccgcggcggcggcggccgggaaggagcatcaaagatgaagaagaagagacagtctttcgagaggtggtcagtttttccccggaccccctgccagttagatattatgacaaggacaccaccaaaccaatcagcttttacttgtcttcgctggaggagctcttggcgtggaagccccgcttggaggatggctttaatgtggccctggagcccctggcgtgtcgccagccccctctgagcagccagaggccccggactttgttgtgtcatgacatgatgggcgggtacctggatgacaggttcattcagggctcggtggtgcagactccctatgctttctaccactggcagtgcatcgacgtctttgtgtacttcagccaccacaccgtcaccattcccccagtgggctggaccaacactgcccacaggcatggggtctgcgtgctggggactttcatcacggagtggaatgaagggggaaggctctgtgaagccttcctggccggggatgagcgctcgtaccaggcagtggctgaccggctggtccagatcactcagttttttcgttttgatggctggctgatcaacatcgagaactcgctgagtctggccgctgtggggaacatgcctcctttcctgcggtacctcaccacacagctgcaccggcaggtcccagggggcctggtgctctggtatgacagcgtggtgcaaagtgggcagctcaaatggcaagacgaactcaaccagcacaacagggtcttctttgattcctgcgacggcttcttcactaactataactggcgggaggagcacttggagcggatgctggggcaggctggggagcgccgggctgatgtgtacgtgggcgtggatgtgtttgctcgagggaacgtggtcggaggccgattcgacacagacaaggtgggtggtggctttcgtccaagggccagcggcccagtgcctcccctgggacctcatttcctcatggaccttccattcccgtctgcacctcaaaggaatgacagcagctgttcttcccagagtggggatcccgtggcactgagaaacaggtgtcctgccccggccaagctatgtccccactgaaacccctttcccggctatttctacaatcagataatgtatttttgtgtgggtgttaccagacagaggcgcgtcgttcccccgctgtccggtcctcggcgggcctgggcctcctgtcccagctgcgttccttgatcttccccgtgagggaagcctgcggggacgcacaggggcctgcagcgcctctcactgcggctcaggggcgaggacgggggaggtgcccagggtttggggatcggtaggtgtcatgacgagggagcattttctggcaaggcaggacacaccagcacagaggaaggagcggggccaggccggtgcccctggcgtgggatgcgcagggctctgcctgcctctggtctatcagtcctgcccgttcccagagccccagggatgttctcagcccttaatttagctttaaatgagtaaattaatccaataactaaagagcctctttactgcccgtgat

SEQ ID NO: 64671 - DNA, 469 bp, Homo sapiens
acctgataatttcaaaatgccttcctgctttgagaatcagtgactctaataatagttcaaaaaaaagcaaaccaaccaactcttctggttatttgtatttagtgctatattgctagctttgtaagtgtttatgggtagacagaaccttgagtgctgctgatattatatcccactgtttagtgtttggccatctctattatgaacatcaaagggacttgttaaacaagtaggttcctgggctctacctcaagtactaactcagtctctgaagatagagcctaggaatctgagtctttaacaaacattcctatatatattgaaatttgagaagcactgtttagccttctttacaagatggaaagcaaaatagcttttgtttttttttttttttgagacagggtcttgctttgtcacccaggctgaagtgttgtggtgctgtcatggcttactgtgatctctgcctcctggg

SEQ ID NO: 64672 - DNA, 468 bp, Homo sapiens
tatttctctacaaaagttccttccttaaactatttatttcgtcttagtaagtttccattctctcagatattgtgatttgctaataaattccaaaaatatatttactgtttataacaaacatggtttgggaacctaaaactaaacaaatttcagtttaggccatttttactaatgattaacatttcagccataaaaagttatgagaataagagagaagtgcatctttaaaactatataatgaattatggcatgataatgttttactaaaagaactgaaatggaggtaggtagcaggtccaacctccttgtttaatagataattttttttttttttaagacagggtctctcactttttcgcacaggctggagtgcagtggcgcaaacaaggctcactgcagccttgacctctggggtcaagtgatcgtcccacctccaccccccaaaagtagcggggactacaggcgcgc

SEQ ID NO: 64673 - DNA, 523 bp, Homo sapiens
gtggctgacgcttatatcccagcactttggaggccgagcaagcagactgcctgagcccaggagttgagatcaacctgggtaacatggaaaaccccatctctacaaaaaatacaaaaataagctgggactacaggcacatgccaccacacccggctaatttttgtgggttttttttttttgagatggagtctcactctattgccaggttggagtgcagtggcgcaatcttggctcactacaacctctgcctcccgggttcgagtgattctcctgcctcagctactcgggagactgggccacgagaatggcttgaacgcgggaggcagaggttaccatgagccgagattgcatcactgcactccgtctcaaaaaaaaaaaaaaaaatgataagtgtgaactctctaatcagattgatctgatctggaattctgactctgccattctgtgattaagagaggtttgtgtccttatctttatagactgaggtgatgacctcctgagatcaagcaatcctcccacctca

SEQ ID NO: 64674 - DNA, 468 bp, Homo sapiens
ggtcaaaacatggtgcttataaccccaatcaaattaaaataatgacactgtccctttctacttagtagtgttctcagagttgcatggtatacaatgaaattaatgtaaagagaagaaaagttatataaaagaaatgagatgataatctgccttatcttgggtctaatataaaaatctacataaaaatcaagcaaatatttattgaactttaaattaggtcattaactaaaagctactaatagcttttctgattgatcaactttattcatatacacggacaagggaaaaacaaagaacaatgatcatgtttcatctcggatgaaattattaaagttgaaaggaaactaaaagggcatttattttctagaagaaaatggtctaaagttatacagggaagtacagttgaccctaggtatccaaccacagatataaaataatttggaagaaaaaaaatgaatggttgtgtct

SEQ ID NO: 64675 - DNA, 355 bp, Homo sapiens
tgtgcgtctgttcagtggcagtccccagatatcaccaacacaaccagtggatggaacaaagccgggcttattgctttcggcagtaagggggtttgtttgatggtgctatcagagggggaaaggcaaggccagattactgaaaatttgcagcttggtttaaagtccgtttttgacagggcttgataaggattgggttaggtgtcgtgatatgatgttacaggattgtgggaacaaagtcctagggcataaactgttggtgcttcctattgaagtgttaacgggtcttttgggaagtttccataatgagcaattcatttatttgtgcaggcaagaataaaagtaaagacaatggaaa

SEQ ID NO: 64676 - DNA, 913 bp, Homo sapiens
ccagagaggggcaggcttgtcccctgacaggttgaagcaagtagacgcccaggagccccgggagggggctgcagtttccttccttccttctcggcagcgctccgcgcccccatcgcccctcctgcgctagcggaggtgatcgccgcggcgatgccggaggagggttcgggctgctcggtgcggcgcaggccctatgggtgcgtcctgcgggctgctttggtcccattggtcgcgggcttggtgatctgcctcgtggtgtgcatccagcgcttcgcacaggctcagcagcagctgccgctcgagtcacttgggtgggacgtagctgagctgcagctgaatcacacaggacctcagcaggaccccaggctatactggcaggggggcccagcactgggccgctccttcctgcatggaccagagctggacaaggggcagctacgtatccatcgtgatggcatctacatggtacacatccaggtgacgctggccatctgctcctccacgacggcctccaggcaccaccccaccaccctggccgtgggaatctgctctcccgcctcccgtagcatcagcctgctgcgtctcagcttccaccaaggttgtaccattgcctcccagcgcctgacgcccctggcccgaggggacacactctgcaccaacctcactgggacacttttgccttcccgaaacactgatgagaccttctttggagtgcagtgggtgcgcccctgaccactgctgctgattagggttttttaaattttattttattttatttaagttcaagagaaaaagtgtacacacaggggccacccggggttggggtgggagtgtggtggggggtagtggtggcaggacaagagaaggcattgagctttttctttcattttcctattaaaaaatacaaaaatca

SEQ ID NO: 64677 - DNA, 878 bp, Homo sapiens
ccagagaggggcaggcttgtcccctgacaggttgaagcaagtagacgcccaggagccccgggagggggctgcagtttccttccttccttctcggcagcgctccgcgcccccatcgcccctcctgcgctagcggaggtgatcgccgcggcgatgccggaggagggttcgggctgctcggtgcggcgcaggccctatgggtgcgtcctgcgggctgctttggtcccattggtcgcgggcttggtgatctgcctcgtggtgtgcatccagcgcttcgcacaggctcagcagcagctgccgctcgagtcacttgggtgggacgtagctgagctgcagctgaatcacacaggacctcagcaggaccccaggctatactggcaggggggcccagcactgggccgctccttcctgcatggaccagagctggacaaggggcagctacgtatccatcgtgatggcatctacatggtacacatccaggtgacgctggccatctgctcctccacgacggcctccaggcaccaccccaccaccctggccgtgggaatctgctctcccgcctcccgtagcatcagcctgctgcgtctcagcttccaccaaggttgtaccattgcctcccagcgcctgacgcccctggcccgaggggacacactctgcaccaacctcactgggacacttttgccttcccgaaacactgatgagaccttctttggagtgcagtgggtgcgcccctgaccactgctgctgattagggttttttaaattttattttattttatttaagttcaagagaaaaagttgtggtggggggtagtggtggcaggacaagagaaggcattgagctttttctttcattttcctattaaaaaatacaaaaatca

SEQ ID NO: 64678 - DNA, 483 bp, Homo sapiens
aaccctgtgcccccaggacctcagcaggaccccaggctatactggcaggggggcccagcactgggccgctccttcctgcatggaccagagctggacaaggggcagctacgtatccatcgtgatggcatctacatggtacacatccaggtgacgctggccatctgctcctccacgacggcctccaggcaccaccccaccaccctggccgtgggaatctgctctcccgcctcccgtagcatcagcctgctgcgtctcagcttccaccaaggttgtaccattgcctcccatgggtgcgcccctgaccactgctgctgattagggttttttaaattttattttattttatttaagttcaagagaaaaagtgtacacacaggggccacccggggttggggtgggagtgtggtggggggtagtggtggcaggacaagagaaggcattgagctttttctttcattttcctattaaaaaatacaaaaatca

SEQ ID NO: 64679 - DNA, 1490 bp, Homo sapiens
ctcgcgcttgtccctcattccccacgcaggcctctagttctccatttcagaattcattctattcctgtgcccgaaataaaacccacgtttttcttgcttgtaatttaaaggttgcaagaaaaactcctcggcccctcggaccatctttcctgtttccaaatgccggggaccagtgtctgtgactgcgccgcctgcctgagggcatgtactgaaaagccctgcgactccaacatgtgggactcacaagcaccttggacaggcctcaaaacgcggctgacatacagaatttttaccattaacgacctgaggcaggactggtggaggtcagttcattagttactgatctcaagaaacaagtcaggactattttctaatgtgcttctttcaagttagtgtggaaagagctgatgcatctgttgtagctgacggaatttaaggaactgaataattgacaagatttccagaaaagcagggtcgccagataatgctacctgtttgcgaatgattgttaccgtaatgctctagagagctaatcctttctcggcctagtcagatgattttaaatcatttgattttacagagctttagtttcagttttttaaatgaaaatggggatgggattaggtcatcttctaacacccacgacagccataaattgataatctatggatccatatttaaagttactgataaaaataaccacaattgaccagcctcccttccctgttaggaaatgctttatattttaatttagcaacccatgtgaccaacccttttagaattgaactggctctccctaggaaaggttagaaatctaatcagttatagtaagtttctgttaacaaatggggagtggtcgacttggagtttggaaaaggggagcgtaaagtctaaaagtttgttaatttatctagccgttgctccaggaggacctgtgttatagtttggaaacatttacaaagggtatttttgtggggcagaaaacagttagcagtccttaatgtaatttggttgaaataaccgttcaaaccagactcctcctgttgctttgattcctttttcgcaaactttcttatgttctacgtatccaggtgctcctgatggccagcaatagacttgagacattggaagaatgtatagccttagcgtctatttagtgttaagattttgtaagtctaattactgtgaaatagtcctggtaactttatcgattctggatacaaagaaaaatgcaaagtgaaagacctttggaaattgctattcacaccagagtactctatgagacattacataggtgatcaagaagagtgatcacctggctgcactttagggtatgtttgtccaggtttttctaataagttaattctaatcaataacttttgttctaattagtaacttttgtataaatgttaatgttaaatcgcgaaacaatgtgggatgggatactaagttctctccaggaacatgaaatgtcagcccgtttattcaca

SEQ ID NO: 64680 - DNA, 3647 bp, Homo sapiens
ttggcggcgcctaggctgtatcgcagcgagagcgtttttgcctgtggagagccggccgacgggagccgcggcggagcctgttgagctcgcgcgggctgccgggagtggtctctgaggcggcggcggcggcggggatcgtctccggcactggcgcaccatgtcggtcagtgtccatgagacccgcaagtcgcggagcagcacggggtccatgaacgtcaccctcttccacaaggcctcccacccggactgtgtgctggcccacctcaacacgcttcgcaagcactgcatgttcaccgacgtcacactctgggcgggcgaccgtgccttcccctgtcaccgtgccgtgctggccgcctctagccgctattttgaggccatgttcagccatggccttcgggagagccgggatgacactgtcaacttccaggacaacctgcacccggaggtgctggagctgctgctggactttgcctactcctcacgcatcgccatcaacgaggagaacgctgagtcactgctggaggcaggcgacatgctgcagttccacgatgtgcgggatgctgccgccgagttcctggagaagaaccttttcccctccaactgcctgggcatgatgctgctctcggacgcccaccagtgccgccggctgtatgagttctcctggcgcatgtgcctggtgcactttgagacggtgaggcagagcgaggacttcaacagcctgtccaaggacacactgctggacctcatctcgagtgatgagctggagaccgaggacgagcgggtggtcttcgagaccatcctccagtgggtgaagcacgacctggagccacggaaggtccacttgcccgagctcctccgcagcgtgcgtctggccttgctgccgtccgactgcctgcaggaggccatctccagcgaggccctcctcatggcagacgagcgcaccaagcttatcatggatgaggccctgcgctgcaagaccaggatcctgcagaatgatggcgtggtcaccagcccctgtgcccggccacgcaaggcgggccacacgctactcatcctggggggccagaccttcatgtgtgacaagatctaccaggtggaccacaaggccaaggagatcatccccaaggccgacctgcccagcccccggaaggagttcagcgcctcagcgatcggctgcaaggtctatgtgacggggggcaggggctccgagaacggggtctccaaggatgtctgggtgtacgacaccgtacatgaggaatggtccaaggcggcgcccatgctgattgcccgctttggccatggctcagctgagctggagaactgcctctatgtggtggggggacacacatccctggcaggggtcttcccggcctcgccttctgtctccctgaaacaagtggagaaatacgaccctggggccaacaagtggatgatggtggcccccttgcgggatggcgtcagcaatgccgcagtggtgagtgccaagctgaagctctttgttttcggaggaaccagcatccaccgggacatggtgtccaaggtccagtgctatgacccctcggagaacaggtggacgatcaaggccgagtgcccccagccttggcggtacacagccgctgccgtcctgggcagccagatcttcatcatgggaggtgacacggaattcacagccgcctcggcctaccgctttgactgtgagaccaaccagtggacgcggattggggacatgactgccaagcgcatgtcctgccatgccctggcttccggcaacaagctctatgtggtcgggggctactttgggacccagaggtgtaagactctggactgctatgaccccacttcagatacatggaactgcatcaccacagtgccctactcacttatccccacggcctttgtcagcacctggaagcacctgcccgcgtgaggagcacctgctgagcccagccagaccgcggccttcagtgtcacagcgtggccttgcttgtctgccacagcgggagctaagccggccctgggccagcactccgagaggtggaaggggccctgccagctctggggagcagcagccttgggctgttctgagctttaggcaagagaagagaagcatctcttgcatccgtgcccctgggggcctcttcagctttgcagtggtttgtgggaagacatacctcccagaggggcatggactgccaccaggactgaccctggcgtcggggagaaggacacttgcagagccttgagatcacctgtttggcaggtcctggactggggccgggcaggcaggggcagggaggcgccccgggtgggctttggggctgcggcactgccacacatcctttccctcctggcctgccctgctggggctctactgccatctatagatggtgtcctgggcctgggaaactaggttcccaggggttgagaccagaaaggtgaccaagacagattttttaaggtgcagaaactgcaggggggcctcagtgacatccatgaggccttattagcaaaggacacccagacctccaaggtttgtgggccccttccacaaagctgtaagtcccagcccacctactcagggccttgctcagtgctgtggcccggtggggacacagttgctcgtggccactcagtggagctgggcctgcagcagactcaaggctccgagtgccctgggggtcacccctcccctcccctcctcagagcccaccctgagaggcagcagtgacccccatggcacacacctgccaacagcactgggggcttctccccaggagaccacgctgccctccaagaccaggagcagctgtgagctggagacagcagagggaccccagggtgtcccctgcagatcccaccagggccgcatccatctcagtgtggaggacagtgacgggaccctcaccatcctcttgcgttttggcccccatttgctccctgagctccaagataagaatggccccgagagaactgctgaacatttgttcattgctgtcacctcctgagtcactggggtccctcaccagcacctccctgacacctgggctatggagaggttggcgcctgtcagtgaccatcctaatgcctctcgctcactcccaagccaccatttgagagggaggggtgttggtgccctgacagggactgggcagggtgtccaaacttggggcttcccaggcacctgcagtgtgaacactgcttggctggctcaagattagggccgcggagggggctgtgcacataccagttacttaagcagccacgagtgtcccccatgccttggtgcgggtcctggaggcctcttgggggtgggacctttgggcagggtttgcccactgacacgcccgccatggggcactggctgcatggggctccttggaccctgtagacccagcagaccccgcctgtgtcaggccagctgcccgaaggcacttggctgtggtcccaggggacggctctgctggcacactcaggagcctggccgcggggactgcagggagggtgcctggacccgtggggttgcttcattgagataaagcacacttatcacatagcacaaaggacgtgccatggtgctttccccaaaagttgtgttgcttttatcagttttctaacttaataaaaagagttgagaaaattcaaaaaat

SEQ ID NO: 64681 - DNA, 2321 bp, Homo sapiens
aggatccttaattaaattaatccccctcccttcccccttcccggcctcgccttctgtctccctgaaacaagtggagaaatacgaccctggggccaacaagtggatgatggtggcccccttgcgggatggcgtcagcaatgccgcagtggtgagtgccaagctgaagctctttgttttcggaggaaccagcatccaccgggacatggtgtccaaggtccagtgctatgacccctcggagaacaggtggacgatcaaggccgagtgcccccagccttggcggtacacagccgctgccgtcctgggcagccagatcttcatcatgggaggtgacacggaattcacagccgcctcggcctaccgctttgactgtgagaccaaccagtggacgcggattggggacatgactgccaagcgcatgtcctgccatgccctggcttccggcaacaagctctatgtggtcgggggctactttgggacccagaggtgtaagactctggactgctatgaccccacttcagatacatggaactgcatcaccacagtgccctactcacttatccccacggcctttgtcagcacctggaagcacctgcccgcgtgaggagcacctgctgagcccagccagaccgcggccttcagtgtcacagcgtggccttgcttgtctgccacagcgggagctaagccggccctgggccagcactccgagaggtggaaggggccctgccagctctggggagcagcagccttgggctgttctgagctttaggcaagagaagagaagcatctcttgcatccgtgcccctgggggcctcttcagctttgcagtggtttgtgggaagacatacctcccagaggggcatggactgccaccaggactgaccctggcgtcggggagaaggacacttgcagagccttgagatcacctgtttggcaggtcctggactggggccgggcaggcaggggcagggaggcgccccgggtgggctttggggctgcggcactgccacacatcctttccctcctggcctgccctgctggggctctactgccatctatagatggtgtcctgggcctgggaaactaggttcccaggggttgagaccagaaaggtgaccaagacagattttttaaggtgcagaaactgcaggggggcctcagtgacatccatgaggccttattagcaaaggacacccagacctccaaggtttgtgggccccttccacaaagctgtaagtcccagcccacctactcagggccttgctcagtgctgtggcccggtggggacacagttgctcgtggccactcagtggagctgggcctgcagcagactcaaggctccgagtgccctgggggtcacccctcccctcccctcctcagagcccaccctgagaggcagcagtgacccccatggcacacacctgccaacagcactgggggcttctccccaggagaccacgctgccctccaagaccaggagcagctgtgagctggagacagcagagggaccccagggtgtcccctgcagatcccaccagggccgcatccatctcagtgtggaggacagtgacgggaccctcaccatcctcttgcgttttggcccccatttgctccctgagctccaagataagaatggccccgagagaactgctgaacatttgttcattgctgtcacctcctgagtcactggggtccctcaccagcacctccctgacacctgggctatggagaggttggcgcctgtcagtgaccatcctaatgcctctcgctcactcccaagccaccatttgagagggaggggtgttggtgccctgacagggactgggcagggtgtccaaacttggggcttcccaggcacctgcagtgtgaacactgcttggctggctcaagattagggccgcggagggggctgtgcacataccagttacttaagcagccacgagtgtcccccatgccttggtgcgggtcctggaggcctcttgggggtgggacctttgggcagggtttgcccactgacacgcccgccatggggcactggctgcatggggctccttggaccctgtagacccagcagaccccgcctgtgtcaggccagctgcccgaaggcacttggctgtggtcccaggggacggctctgctggcacactcaggagcctggccgcggggactgcagggagggtgcctggacccgtggggttgcttcattgagataaagcacacttatcacatagcacaaaggacgtgccatggtgctttccccaaaagttgtgttgcttttatcagttttctaacttaataaaaagagttgagaaaattcaaaaaat

SEQ ID NO: 64682 - DNA, 3571 bp, Homo sapiens
ttggcggcgcctaggctgtatcgcagcgagagcgtttttgcctgtggagagccggccgacgggagccgcggcggagcctgttgagctcgcgcgggctgccgggagtggtctctgaggcggcggcggcggcggggatcgtctccggcactggcgcaccatgtcggtcagtgtccatgagacccgcaagtcgcggagcagcacggggtccatgaacgtcaccctcttccacaaggcctcccacccggactgtgtgctggcccacctcaacacgcttcgcaagcactgcatgttcaccgacgtcacactctgggcgggcgaccgtgccttcccctgtcaccgtgccgtgctggccgcctctagccgctattttgaggccatgttcagccatggccttcgggagagccgggatgacactgtcaacttccaggacaacctgcacccggaggtgctggagctgctgctggactttgcctactcctcacgcatcgccatcaacgaggagaacgctgagtcactgctggaggcaggcgacatgctgcagttccacgatgtgcgggatgctgccgccgagttcctggagaagaaccttttcccctccaactgcctgggcatgatgctgctctcggacgcccaccagtgccgccggctgtatgagttctcctggcgcatgtgcctggtgcactttgagacggtgaggcagagcgaggacttcaacagcctgtccaaggacacactgctggacctcatctcgagtgatgagctggagaccgaggacgagcgggtggtcttcgagaccatcctccagtgggtgaagcacgacctggagccacggaaggtccacttgcccgagctcctccgcagcgtgcgtctggccttgctgccgtccgactgcctgcaggaggccatctccagcgaggccctcctcatggcagacgagcgcaccaagcttatcatggatgaggccctgcgctgcaagaccaggatcctgcagaatgatggcgtggtcaccagcccctgtgcccggccacgcaaggcgggccacacgctactcatcctggggggccagaccttcatgtgtgacaagatctaccaggtggaccacaaggccaaggagatcatccccaaggccgacctgcccagcccccggaaggagttcagcgcctcagcgatcggctgcaaggtctatgtgacggggggcaggggctccgagaacggggtctccaaggatgtctgggtgtacgacaccgtacatgaggaatggtccaaggcggcgcccatgctgattgcccgctttggccatggctcagctgagctggagaactgcctctatgtggtggggggacacacatccctggcaggggtcttcccggcctcgccttctgtctccctgaaacaagtggagaaatacgaccctggggccaacaagtggatgatggtggcccccttgcgggatggcgtcagcaatgccgcagtggtgagtgccaagctgaagctctttgttttcggaggaaccagcatccaccgggacatggtgtccaaggtccagtgctatgacccctcggagaacaggtggacgatcaaggccgagtgcccccagccttggcggtacacagccgctgccgtcctgggcagccagatcttcatcatgggaggtgacacggaattcacagccgcctcggcctaccgctttgactgtgagaccaaccagtggacgcggattggggacatgactgccaagcgcatgtcctgccatgccctggcttccggcaacaagctctatgtggtcgggggctactttgggacccagaggtgtaagactctggactgctatgaccccacttcagatacatggaactgcatcaccacagtgccctactcacttatccccacggcctttgtcagcacctggaagcacctgcccgcgtgaggagcacctgctgagcccagccagaccgcggccttcagtgtcacagcgtggccttgcttgtctgccacagcgggagctaagccggccctgggccagcactccgagaggtggaaggggccctgccagctctggggagcagcagccttgggctgttctgagctttaggcaagagaagagaagcatctcttgcatccgtgcccctgggggcctcttcagctttgcagtggtttgtgggaagacatacctcccagaggggcatggactgccaccaggactgaccctggcgtcggggagaaggacacttgcagagccttgagatcacctgtttggcaggtcctggactggggccgggcaggcaggggcagggaggcgccccgggtgggctttggggctgcggcactgccacacatcctttccctcctggcctgccctgctggggctctactgccatctatagatggtgtcctgggcctgggaaactaggttcccaggggttgagaccagaaaggtgaccaagacagattttttaaggtgcagaaactgcaggggggcctcagtgacatccatgaggccttattagcaaaggacacccagacctccaaggtttgtgggccccttccacaaagctgtaagtcccagcccacctactcagggccttgctcagtgctgtggcccggtggggacacagttgctcgtggccactcagtggagctgggcctgcagcagactcaaggctccgagtgccctgggggtcacccctcccctcccctcctcagagcccaccctgagaggcagcagtgacccccatggcacacacctgccaacagcactgggggcttctccccaggagaccacgctgccctccaagaccaggagcagctgtgagctggagacagcagagggaccccagggtgtcccctgcagatcccaccagggccgcatccatctcagtgtggaggacagtgacgggaccctcaccatcctcttgcgttttggcccccatttgctccctgagctccaagataagaatggccccgagagaactgctgaacatttgttcattgctgtcacctcctgagtcactggggtccctcaccagcacctccctgacacctgggctatggagaggttggcgcctgtcagtgaccatcctaatgcctctcgctcactcccaagccaccatttgagagggaggggtgttggtgccctgacagggactgggcagggtgtccaaacttggggcttcccaggcacctgcagtgtgaacactgcttggctggctcaagattagggccgcggagggggctgtgcacataccagttacttaagcagccacgagtgtcccccatgccttggtgcgggtcctggaggcctcttgggggtgggacctttgggcagggtttgcccactgacacgcccgccatggggcactggctgcatggggctccttggaccctgtagacccagcaggagcctggccgcggggactgcagggagggtgcctggacccgtggggttgcttcattgagataaagcacacttatcacatagcacaaaggacgtgccatggtgctttccccaaaagttgtgttgcttttatcagttttctaacttaataaaaagagttgagaaaattcaaaaaat

SEQ ID NO: 64683 - DNA, 3572 bp, Homo sapiens
ttggcggcgcctaggctgtatcgcagcgagagcgtttttgcctgtggagagccggccgacgggagccgcggcggagcctgttgagctcgcgcgggctgccgggagtggtctctgaggcggcggcggcggcggggatcgtctccggcactggcgcaccatgtcggtcagtgtccatgagacccgcaagtcgcggagcagcacggggtccatgaacgtcaccctcttccacaaggcctcccacccggactgtgtgctggcccacctcaacacgcttcgcaagcactgcatgttcaccgacgtcacactctgggcgggcgaccgtgccttcccctgtcaccgtgccgtgctggccgcctctagccgctattttgaggccatgttcagccatggccttcgggagagccgggatgacactgtcaacttccaggacaacctgcacccggaggtgctggagctgctgctggactttgcctactcctcacgcatcgccatcaacgaggagaacgctgagtcactgctggaggcaggcgacatgctgcagttccacgatgtgcgggatgctgccgccgagttcctggagaagaaccttttcccctccaactgcctgggcatgatgctgctctcggacgcccaccagtgccgccggctgtatgagttctcctggcgcatgtgcctggtgcactttgagacggtgaggcagagcgaggacttcaacagcctgtccaaggacacactgctggacctcatctcgagtgatgagctggagaccgaggacgagcgggtggtcttcgagaccatcctccagtgggtgaagcacgacctggagccacggaaggtccacttgcccgagctcctccgcagcgtgcgtctggccttgctgccgtccgactgcctgcaggaggccatctccagcgaggccctcctcatggcagacgagcgcaccaagcttatcatggatgaggccctgcgctgcaagaccaggatcctgcagaatgatggcgtggtcaccagcccctgtgcccggccacgcaaggcgggccacacgctactcatcctggggggccagaccttcatgtgtgacaagatctaccaggtggaccacaaggccaaggagatcatccccaaggccgacctgcccagcccccggaaggagttcagcgcctcagcgatcggctgcaaggtctatgtgacggggggcaggggctccgagaacggggtctccaaggatgtctgggtgtacgacaccgtacatgaggaatggtccaaggcggcgcccatgctgattgcccgctttggccatggctcagctgagctggagaactgcctctatgtggtggggggacacacatccctggcaggggtcttcccggcctcgccttctgtctccctgaaacaagtggagaaatacgaccctggggccaacaagtggatgatggtggcccccttgcgggatggcgtcagcaatgccgcagtggtgagtgccaagctgaagctctttgttttcggaggaaccagcatccaccgggacatggtgtccaaggtccagtgctatgacccctcggagaacaggtggacgatcaaggccgagtgcccccagccttggcggtacacagccgctgccgtcctgggcagccagatcttcatcatgggaggtgacacggaattcacagccgcctcggcctaccgctttgactgtgagaccaaccagtggacgcggattggggacatgactgccaagcgcatgtcctgccatgccctggcttccggcaacaagctctatgtggtcgggggctactttgggacccagaggtgtaagactctggactgctatgaccccacttcagatacatggaactgcatcaccacagtgccctactcacttatccccacggcctttgtcagcacctggaagcacctgcccgcgtgaggagcacctgctgagcccagccagaccgcggccttcagtgtcacagcgtggccttgcttgtctgccacagcgggagctaagccggccctgggccagcactccgagaggtggaaggggccctgccagctctggggagcagcagccttgggctgttctgagctttaggcaagagaagagaagcatctcttgcatccgtgcccctgggggcctcttcagctttgcagtggtttgtgggaagacatacctcccagaggggcatggactgccaccaggactgaccctggcgtcggggagaaggacacttgcagagccttgagatcacctgtttggcaggtcctggactggggccgggcaggcaggggcagggaggcgccccgggtgggctttggggctgcggcactgccacacatcctttccctcctggcctgccctgctggggctctactgccatctatagatggtgtcctgggcctgggaaactaggttcccaggggttgagaccagaaaggtgaccaagacagattttttaaggtgcagaaactgcaggggggcctcagtgacatccatgaggccttattagcaaaggacacccagacctccaaggtttgtgggccccttccacaaagctgtaagtcccagcccacctactcagggccttgctcagtgctgtggcccggtggggacacagttgctcgtggccactcagtggagctgggcctgcagcagaccccatggcacacacctgccaacagcactgggggcttctccccaggagaccacgctgccctccaagaccaggagcagctgtgagctggagacagcagagggaccccagggtgtcccctgcagatcccaccagggccgcatccatctcagtgtggaggacagtgacgggaccctcaccatcctcttgcgttttggcccccatttgctccctgagctccaagataagaatggccccgagagaactgctgaacatttgttcattgctgtcacctcctgagtcactggggtccctcaccagcacctccctgacacctgggctatggagaggttggcgcctgtcagtgaccatcctaatgcctctcgctcactcccaagccaccatttgagagggaggggtgttggtgccctgacagggactgggcagggtgtccaaacttggggcttcccaggcacctgcagtgtgaacactgcttggctggctcaagattagggccgcggagggggctgtgcacataccagttacttaagcagccacgagtgtcccccatgccttggtgcgggtcctggaggcctcttgggggtgggacctttgggcagggtttgcccactgacacgcccgccatggggcactggctgcatggggctccttggaccctgtagacccagcagaccccgcctgtgtcaggccagctgcccgaaggcacttggctgtggtcccaggggacggctctgctggcacactcaggagcctggccgcggggactgcagggagggtgcctggacccgtggggttgcttcattgagataaagcacacttatcacatagcacaaaggacgtgccatggtgctttccccaaaagttgtgttgcttttatcagttttctaacttaataaaaagagttgagaaaattcaaaaaat

SEQ ID NO: 64684 - DNA, 1319 bp, Homo sapiens
gtctgtgcatcggaggctcgttagcagcatccttggcctctacctgctgggtgccggtcgcatctcttccccatttgtggcaacccaaaatgtcatctggggaacaacatcgctctgttgagaaccaccgccctagaagagccccctgtgtggaggggaccataggtttaccccaaaaactcctcggtgaacctttgtcatctggcattttactgtccctgtgggcagggactgtgcttcgttcgtcctttgatgtgtatgtcctgccacctctggtacacctgaaaactggttttttaaaatggaagccagattatgacagtgccgcttctgaatatggaaaagcagctgttgcttttaaaaatgccaaacagtttgagcaagcaaaagatgcctgcctgagggaagctgttgcccatgaaaataatagggctctttttcatgctgccaaagcttatgagcaagctggaatgatgttgaaggagatgcagaaactaccagaggccgttcagctaattgagaaggccagcatgatgtatctagaaaacggcaccccagacacagcagccatggctttggagcgagctggaaagcttatagaaaatgttgatccagagaaggctgtacagttatatcaacagacagctaatgtgtttgaaaatgaagaacgcttacgacaggcagttgaattactaggaaaagcctccagactactagtacgaggacgtaggtttgatgaggcggcactctctattcagaaagaaaaaaatatttataaggaaaattgagaattatccaacttgttataagaaaaacaattgctcaagtcttagttcatctacacagaaatgactatgtagctgcagaaagatgtgtccgggagagctatagcatccctgggttcaatggcagtgaagactgtgctgccctggaacagcttcttgaaggttatgaccagcaagaccaagatcaggtgtcagatgtctgcaactcaccgcttttcaagtacatggacaatgattatgctaagctgggcctgagtttggtggttccaggagggggaatcaagaagaaatcacctgcaacaccacaggccaagcctgatggtgtcactgccacggctgctgatgaagaggaagatgaatactcaggaggactatgctagtattttgcttgctgaaaagaaaagggaaacaaaggtaaaatcctgacatgccatttcaaggacttgggaatagattagggatatccgtacttcattacagtcatgattttggatcctaataaagactagtttttagttaccatcttcccaaatc

SEQ ID NO: 64685 - DNA, 1193 bp, Homo sapiens
  misc_feature (20)..(20): n is a, c, g, or t
  misc_feature (22)..(22): n is a, c, g, or t
  misc_feature (24)..(24): n is a, c, g, or t
  misc_feature (26)..(26): n is a, c, g, or t
ataggcagtacgaggccttngngnanttaggcggattcttggcgccggaggaagaggcagggtcaccctctctccacgtcagagacctgactgtggagatggcggctcagaagataaacgaggggctggaacacctcgccaaagcagagaaatacctgaaaactggttttttaaaatggaagccagattatgacagtgccgcttctgaatatggaaaagcagctgttgcttttaaaaatgccaaacagtttgagcaagcaaaagatgcctgcctgagggaagctgttgcccatgaaaataatagggctctttttcatgctgccaaagcttatgagcaagctggaatgatgttgaaggagatgcagaaactaccagaggccgttcagctaattgagaaggccagcatgatgtatctagaaaacggcaccccagacacagcagccatggctttggagcgagctggaaagcttatagaaaatgttgatccagagaaggctgtacagttatatcaacagacagctaatgtgtttgaaaatgaagaacgcttacgacaggcagttgaattactaggaaaagcctccagactactagtacgaggacgtaggtttgatgaggcggcactctctattcagaaagaaaaaaatatttataaggaaaattgagaattatccaacttgttataagaaaaacaattgctcaagtcttagttcatctacacagaaatgactatgtagctgcagaaagatgtgtccgggagagctatagcatccctgggttcaatggcagtgaagactgtgctgccctggaacagcttcttgaaggttatgaccagcaagaccaagatcaggtgtcagatgtctgcaactcaccgcttttcaagtacatggacaatgattatgctaagctgggcctgagtttggtggttccaggagggggaatcaagaagaaatcacctgcaacaccacaggccaagcctgatggtgtcactgccacggctgctgatgaagaggaagatgaatactcaggaggactatgctagtattttgcttgctgaaaagaaaagggaaacaaaggtaaaatcctgacatgccatttcaaggacttgggaatagattagggatatccgtacttcattacagtcatgattttggatcctaataaagactagtttttagttaccatcttcccaaatc

SEQ ID NO: 64686 - DNA, 315 bp, Homo sapiens
gtaggcaagaaggctaactagagatgcctggcatttgtccccccagactaaaaaggaccaaggctacaaataaacaactaagatttgatttgagtgttgaagatagagtgctgcagtgtggcaagggagtgaagatgcatctgtaatgacaggagggcagcatggaagcacatagcctctataaccccatctccccgacctggatcagatctgcctggcgtcggagggaactttccatcatgggaaaaaggtaagcagaatatcaccaccaacccccattgccaccacaaatgcctacagtccttcaaacagaag

SEQ ID NO: 64687 - DNA, 823 bp, Homo sapiens
actctagttgttctttttaatttatttttacaaaagtgttgtgtacaaatgtaatttagttacatgcatagactgcatagtggcgaagtcagggcttttagggtatccatcattcaaataatttacattataacccttaagtaatttctcattatccagcacccaccctaccttctcacccttttacttcaggtttgctgggcctcaatgacaaataaaacaaagataaattaattgttttctgggagttagaattaaaaatcaacctaagagaaaagatgactcctaagccaaaatttgtgatatatatatatatatatatgtgtgtgtatatatacacacacacacagaaacatgtttctgtgtgtgtgtgtgtgtgtgtatatatttgtttatactcaagaaacttatccagtctttccctctgcacaaatccaaaattaaagccaaatggttctatgtgataaacatcatggtaataacttcaaaaaacaaaaaaaaaagcttcctccagtgaatgtaaatttaaaaaaatgaaacaactgtttctccagatgtgcagaaatcaatataaagacacataaagacagagaaaacacagaaaagcaaggtttatgacactttcaaaggaacacaataattctccagtattccaagaaaaaaaaaataattgaaaggactttaaaagacttttagaaggcttcaaaatatagattttaaagaagctcaaagagatgcaaaagaaatctaaaaaccaatacaaaaataaataaataaatttagagtatgaatgggaaatgtgccaaggagataaatatctttt

SEQ ID NO: 64688 - DNA, 537 bp, Homo sapiens
ctgtaatgattcaaatccttcaccaaagaggtaattacagcttccttggtaagagcagagctcaggcagacagacaggtggtttctagtttctcttataacagatggcacaaatggaccagcttctgaagctttttgaggaaatttgctcataaacagttttaaatatttttcttttatatcttccaacacatgcttcttaaagtaaaaatgcttcagtagattgcaggcaagggcacatattatgaatagtgctgcacggggcagggtgcttgcagtttgcctgagtagcagatgcagcatgtcaggaacataagagggaggctctgtgcgccatggtggctagatatacattgaattttcgaagtgcttaaggaaaaaacaaagctgtccaccaagaattttatgatcagcaaaactattcttctcaaatgaaagtgaaataaagatattcccagacaatttctagaagaaagcataggagaaaatgtgtaggttaggcaaatacttagatttaacatcaaaagcacaatttaaa

SEQ ID NO: 64689 - DNA, 717 bp, Homo sapiens
  misc_feature (23)..(23): n is a, c, g, or t
cggcctggtacggccagcgtatntgatatcgtcgaccacgccgtcggcagcagcagcgcgtctccttcagctccagggagctcccagggaagtggtcgacccctccggtggccgggccactctgctagagtccatccgccaagctgggggcatcggcaaggccaagctgcgcagcatgaaggagcgaaagctggagaagaagaagcagaaggagcaggagcaagtgagagccacgagccaaggtgggcacttgatgtcggatctcttcaacaagctggtcatgaggcgcaagggcatctctgggaaaggacctggggctggtgaggggcccggaggagcctttgcccgcgtgtcagactccatccctcctctgccgccaccgcagcagccacaggcagaggaggacgaggacgactgggaatcctagggggctccatgacaccttcccccccagacccagacttgggccgttgctctgacatggacacagccaggacaagctgctcagacctgcttccctgggagggggtgacggaaccagcactgtgtggagaccagcttcaaggagcggaaggctggcttgaggccacacagctggggcggggacttgtctgcctgtacttcatggggggacggctccacccagcctgcgccactgtgttcttaagaggcttccagagaaaacggcacaccaatcaataaagaactgagcagaaa

SEQ ID NO: 64690 - DNA, 1331 bp, Homo sapiens
gttccatcctacctgcctgacctgcccggcattgccaacgacctcatgtacattgccgacctgggccccggcattgccccctctgcccctggcaccattccagaactgcccaccttccacactgaggtagccgagcctctcaagacctacaagatggggtactaacaccacccccaccgcccccaccaccacccccagctcctgaggtgctggccagtgcacccccactcccaccctcaaccgcggcccctgtaggccaaggcgccaggcaggacgacagcagcagcagcgcgtctccttcagtccagggagctcccagggaagtggtcgacccctccggtggccgggccactctgctagagtccatccgccaagctgggggcatcggcaaggccaagctgcgcagcatgaaggagcgaaagctggagaagaagaagcagaaggagcaggagcaagtgagagccacgagccaaggtgggcacttgatgtcggatctcttcaacaagctggtcatgaggcgcaagggcatctctgggaaaggacctggggctggtgaggggcccggaggagcctttgcccgcgtgtcagactccatccctcctctgccgccaccgcagcagccacaggcagaggaggacgaggacgactgggaatcctagggggctccatgacaccttcccccccagacccagacttgggccgttgctctgacatggacacagccaggacaagctgctcagacctgcttccctgggagggggtgacggaaccagcactgtgtggagaccagcttcaaggagcggaaggctggcttgaggccacacagctggggcggggacttgtctgcctgtacttcatggggggacggctccacccagcctgcgccactgtgttcttaagaggcttccagagaaaacggcacaccaatcaataaagaactgagcagaaaccaacagtgtgcttttaataaaggacctctagctgtgcaggatgcaaacgtctcggggtcagtgactgcctcctgcccctgttggtccctaggcagtgggggcagaagctcccagctgacctgtttctctgggatgagagggaggagagaagggcagttagcaggggcagctgttgcagatgggaggaatagtctcccacaaaaaaggtttcagtgacagacacggggtctctaaaaatagtcatgctgagagcctaatggcccttggcacaattgctggtgttggggtagaagatgtcttggagtttgctcaagtggttgagagggagggaggtgccatcgacttggaggaactggcaccaagccagggagatagacatcc

SEQ ID NO: 64691 - DNA, 945 bp, Homo sapiens
gttccatcctacctgcctgacctgcccggcattgccaacgacctcatgtacattgccgacctgggccccggcattgccccctctgcccctggcaccattccagaactgcccaccttccacactgaggtagccgagcctctcaagacctacaagatggggtactaacaccacccccaccgcccccaccaccacccccagctcctgaggtgctggccagtgcacccccactcccaccctcaaccgcggcccctgtaggccaaggcgccaggcaggacgacagcagcagcagcgcgtctccttcagtccagggagctcccagggaagtggtcgacccctccggtggccgggccactctgctagagtccatccgccaagctgggggcatcggcaaggccaagctgcgcagcatgaaggagcgaaagctggagaagaagaagcagaaggagcaggagcaagtgagagccacgagccaaggtgggcacttgatgtcggatctcttcaacaagctggtcatgaggcgcaagggcatctctgggaaaggacctggggctggtgaggggcccggaggagcctttgcccgcgtgtcagactccatccctcctctgccgccaccgcagcagccacaggcagaggaggacgaggacgactgggaatcctagggggctccatgacaccttcccccccagacccagacttgggccgttgctctgacatggacacagccaggacaagctgctcagacctgcttccctgggagggggtgacggaaccagcactgtgtggagaccagcttcaaggagcggaaggctggcttgaggccacacagctggggcggggacttgtctgcctgtacttcatggggggacggctccacccagcctgcgccactgtgttcttaagaggcttccagagaaaagggggaaactgaacagtcctggtgaagat

SEQ ID NO: 64692 - DNA, 949 bp, Homo sapiens
gttccatcctacctgcctgacctgcccggcattgccaacgacctcatgtacattgccgacctgggccccggcattgccccctctgcccctggcaccattccagaactgcccaccttccacactgaggtagccgagcctctcaagacctacaagatggggtactaacaccacccccaccgcccccaccaccacccccagctcctgaggtgctggccagtgcacccccactcccaccctcaaccgcggcccctgtaggccaaggcgccaggcaggacgacagcagcagcagcgcgtctccttcagtccagggagctcccagggaagtggtcgacccctccggtggccgggccactctgctagagtccatccgccaagctgggggcatcggcaaggccaagctgcgcagcatgaaggagcgaaagctggagaagaagaagcagaaggagcaggagcaagtgagagccacgagccaaggtgggcacttgatgtcggatctcttcaacaagctggtcatgaggcgcaagggcatctctgggaaaggacctggggctggtgaggggcccggaggagcctttgcccgcgtgtcagactccatccctcctctgccgccaccgcagcagccacaggcagaggaggacgaggacgactgggaatcctagggggctccatgacaccttcccccccagacccagacttgggccgttgctctgacatggacacagccaggacaagctgctcagacctgcttccctgggagggggtgacggaaccagcactgtgtggagaccagcttcaaggagcggaaggctggcttgaggccacacagctggggcggggacttgtctgcctgtacttcatggggggacggctccacccagcctgcgccactgtgttcttaagaggcttccagagaaaacggcacaccaatcaataaagaactgagcagaaa

SEQ ID NO: 64693 - DNA, 977 bp, Homo sapiens
gttccatcctacctgcctgacctgcccggcattgccaacgacctcatgtacattgccgacctgggccccggcattgccccctctgcccctggcaccattccagaactgcccaccttccacactgaggtagccgagcctctcaagacctacaagatggggtactaacaccacccccaccgcccccaccaccacccccagctcctgaggtgctggccagtgcacccccactcccaccctcaaccgcggcccctgtaggccaaggcgccaggcaggacgacagcagcagcagcgcgtctccttcagtccagggagctcccagggaagtggtcgacccctccggtggccgggccactctgctagagtccatccgccaagctgggggcatcggcaaggccaagctgcgcagcatgaaggagcgaaagctggagaagaagaagcagaaggagcaggagcaagtgagagccacgagccaaggtgggcacttgatgtcggatctcttcaacaagctggtcatgaggcgcaagggcatctctgggaaaggacctggggctggtgaggggcccggaggagcctttgcccgcgtgtcagactccatccctcctctgccgccaccgcagcagccacaggcagaggaggacgaggacgactgggaatcctagggggctccatgacaccttcccccccagacccagacttgggccgttgctctgacatggacacagccaggacaagctgctcagacctgcttccctgggagggggtgacggaaccagcactgtgtggagaccagcttcaaggagcggaaggctggcttgaggccacacagctggggcggggacttgtctgcctgtacttcatggggggacggctccacccagcctgcgccactgtgttcttaagaggcttccagagaaaacggcacaccaatcaataaagaactgagcagaaaaaattcactggccgtcgttttcccgtcg

SEQ ID NO: 64694 - DNA, 387 bp, Homo sapiens
ctgtctcaaaaaaagttttctcttaactactctctttttctttccaaatcatccttcttattgatgctactcttagtccaaacaaacatctgtttcttttctgatttccgattttcaggctggctggagtttgtgggaccaggaatgctgcctgatgaaaggttccttggaattttcccatagaggacaatcttttgcctgccacccatgaatgtttctgtctttcctttttttctttctttccttcattccacagatatttattaagttcttctcaagctctcaaatatcctaaacttaatttgtgtaaatattgctacagcccaggtcacagtgaaatcttagactgagacaccaccttctatttacacaggcagcatgaactgt

SEQ ID NO: 64695 - DNA, 372 bp, Homo sapiens
cctcgctgcggagcacagcctgccagaaagctctccccagttagaagccttcagaccctgtgttttgttttgggggagggggtcgtttttgttttcttggtaacagctttattgagatataattcacgtaccgtaagattcaccccctttaacatgtacaattcagtggttttgaccatactcacagagttgtgcagccatcaccactttcttcagaacattttcatcaccccaaaaataaatcccatccccattagcattcactccccattctcctctcccccggcccctgacaatctacttgcatcttcatggatttgcttgttgtggacatttcctataaattgaatcataaaacatgcagtcctttat

SEQ ID NO: 64696 - DNA, 442 bp, Homo sapiens
tataccctctatatttccatttttcagtgtttatcctacatctgaatgtgtaaccttaactaagtctattgttaatcaatatttttgcctcctgctgaagcacacaaggagggaccttagaacattttagaccacctccttccaacttaagtgttattgtgtgaaaccatttcatttctgttatgtttttaccccacaaattagacatagttattgttctaattattatttcatatagccttatttgtttagatttatccatatatttatagatatgtatttcttttattctttcttgcattttagcataattgcaataataattttatttgtgctcgaacaaaatcatttagatattttactttagtgagggtctactggttgtaagtaataaattttctcacttttgttttgatttgtttaacagtgtttttgttttact

SEQ ID NO: 64697 - DNA, 351 bp, Homo sapiens
gtaatcccagctactcaggaggctgaggcacaagaattgcttgaacacgggaggcagaggttgcagtgagccgagatcaagccattacactctagactggatgacagaccacgactccgtctcaaaaaaaaaaagtattagaaacatgaactatgccagtacagatttttgcaaattgtgagatataagtgatccaattacaaacttaaaaacagaatcaagaaagtaagaagggaaagaagaaaagttggaagggagaaaatacaagggcaacaccatctcttcagaaatcctgtcagttcataaacaactaaattgagcaaatgccttcgaatttggcaactattttta

SEQ ID NO: 64698 - DNA, 247 bp, Homo sapiens
attcttttaataatttagttttagcagtcctatgaaccaattatctatttggttaacaatctgggaaaattatatacaaatatattttaaatgaataaatgttggaaaaattctcgaagcaggtattatgagtcttttttttttagcaatttttattatatatgagagtctgattttttggtaaaacatgatactagagaaagaaaatattttacatgcaaatacttggattatacacaaccattta

SEQ ID NO: 64699 - DNA, 399 bp, Homo sapiens
cattttattcttcaaattagatggatggatggatggatggatggatggatggatggatggatggggcattagatttaagtccacccagcaatttaaaatttctcactcggtcagacacagtagctcaagcctgtaaccccagcactttggaggcccaagcgggaggactgcctgaggccaggagttcaggactagcttgggcaacatagtgagattctgtctctacaaaaactttaaaaattagccaggcatggtggcagacacctatagtcccagctacttgggaggctgaggcagaaggattccttgagcccaggagttcaaggctgcagtgagctatgatggcaccactgcactccagcctgggcaagagagaaaccttgtctctatttaaaacaa

SEQ ID NO: 64700 - DNA, 112 bp, Homo sapiens
aaataacaattttattctttttaataaataagacctcagtaggcggacctgataacagtgacaatgaaaggaaaatagtggcaaaatgtgagtttccagcatgatgtttctc

SEQ ID NO: 64701 - DNA, 310 bp, Homo sapiens
  misc_feature (58)..(58): n is a, c, g, or t
  misc_feature (85)..(85): n is a, c, g, or t
gaaatgcttgagttaaggctattccttcatataaaaataatctcacaaaacattccantgctttctcaatagaataataaatctnctaatgaatacagtctgaattgatacaatatggagctaaaataacagtagagcttgaactggctgcttaagtgacagttgaaatggcgtgtttgtcagcgtagaaatgaaaaacaatatcatgcagggaggtaatctagtcccagaggcactatggactataaatgttaaattacaatagacccagaatataaccttgcataattcttgaataaaggatataagg

SEQ ID NO: 64702 - DNA, 494 bp, Homo sapiens
attgtattactgactagctcctatccatgctttaagacacaatttaaattttagaaacttttaattatggatattgtccaaacatacacagaagtagagagaataatataataaaccccatgcatccatcacccaactttagagtatcattttgcaaatttttcaaccatgatttttttttccaactcagtcttcactggagtcctccatgacctctctaagcaaagtgagccactcttttcctgtgttctctttagcaccttgaccatcctgctattagaatgcctgcaaatataattcctcatttacctgtctctccctctacaatgtgaatcctttagggtaggtaccaagctcttttcacctgttctctatgcctagcatagatgccaacacatcataggtgttaaatatatgtgaatgaaagtaataacctcttatcttcttcatccccacttgctgtcaccctttctttccttcacagaaatagcaaa

SEQ ID NO: 64703 - DNA, 343 bp, Homo sapiens
catatgtcaccctctccactacactgtcatcatgagggaagagctctgtgtcttcttagtggctgtatcttggattctgtcttgtgccagctccctctctcacacccttctcctgacccggctgtctttctgtgctgcgaacaccatcccccatgtcttctgtgaccttgctgccctgctcaagctgtcctgctcagatatcttcctcaatgagctggtcatgttcacagtaggggtggtggtcattaccctgccattcatgtgtatcctggtatcatatggctacattggggccaccatcctgagggtcccttcaaccaaagggatccacaaagcattgtcc

SEQ ID NO: 64704 - DNA, 383 bp, Homo sapiens
cctagaaacacctattcatgccttcttccttcctggaagccctaggagtttcctggggttccttgagctatggcaaccccatatgtatgattccaaatttagacagaggagtgtaacctgtgtcctagtgtgcaagcccaggaaagagaattagcaccaatatgtgatactaaacacttgacaatctttccctcatttaattcctacgacaaaactaggtaatactgtcattatcaacaatttgcagatagggcttagagactctgaaatctgaagtccatgcctttggctactccaccataatttctcctaggatttagtagtttttattccttgaaacattggcaacgaatggcctactatattattatgctgaattccct

SEQ ID NO: 64705 - DNA, 376 bp, Homo sapiens
ggtggttttgacatgtagaaaataagatggaaggctgaactagggcagtggtgttggcaaataatcagatttcaggaatatcacaaagtgaggagcccaggattcatgaccattttgatgtaggaataagggaggagcctaggatgactcccccaagtttctggcccgagtaactgggatatcaacaagtcatttagcaaaatagagaaaataggagaagcagcaatttgagatagagatagaggcaatataaagaattatatattgaacatggtaaatcacctaaattcagaaagttgtagaaaacttgggtctggagctcaggaaagacactggatatgtagatttggaagttatcaatctcaaagtgatgctt

SEQ ID NO: 64706 - DNA, 368 bp, Homo sapiens
caaattaattttgtctttacccctctttgtccgaaaaactaaggctaaaagcagtagcatttctaccatccctccctcactcagtccattctcaggaaacacagagcccaaaggaagtatccaaaggaaaatgatacgaaattctaatgcttaggtactacttcaggtaccagtgctatagaaaaagaccaaagagaaataattggtggacaggcgcagtgactcatgcctgtcatcccagcactttgggaggccgaggcaggtggatcacttgaggccaggagttcgagcccagccaggccaacatggtgaaaccctgtcttcactaaaaatacaaaaactagccaggcatgatggcaggtgcctgt

SEQ ID NO: 64707 - DNA, 870 bp, Homo sapiens
ttgtctgatttgctctgcacagcattaaatgttttaagagttcctactctggagccaccaggttcacatcttggctctccagtttaccaagctgcatggttatgagcaaattacctaaagtctgtgtgccttagtgtcctcatctgcaaaatgggttgatacccacttcatagagctcagaggattaaataagttactttatgtaattcccttagaatagagctttgcttttgtttttgtttgtttgttttgagacagggtcttgccctgttgcccaggctggagtgcagtggcgcaatcacagctcactgcagccttgacctctaaagcccaagtagtctacttgggaggctgaggcaggagaatcgcttgaacctgggaggcggaagttgcagttagcagagatcatgccattgcactctagcctgggcgacggagtgagaccccatctcaaaaataaaaaaaaaaaagaaagaaaaagtttgcagatgaaaacttcccattgacttctctttttgcccagagttaagccaacagtactattacttgtaattatcttcctatatagctagttgaaagattatggtgtgtatatatagagagagaagttgaatttttataccaaaacactttctcctaatatgatgtgcaggaacaaaacattttttacatcaactattcccttttcctaaggcaggtgaataatcttgttttttatctgtacaattgaaatattagaatataccaaagacacattagataaaataggtgagactagatattcatgaagtcattactttattcccagagctttactgaggtataattgacatttagtgcatatccatatttaaatgtggatgtttaggt

SEQ ID NO: 64708 - DNA, 580 bp, Homo sapiens
ttgtctgatttgctctgcacagcattaaatgttttaagagttcctactctggagccaccaggttcacatcttggctctccagtttaccaagctgcatggttatgagcaaattacctaaagtctgtgtgccttagtgtcctcatctgcaaaatgggttgatacccacttcatagagctcagaggattaaataagttactttatgtaattcccttagaatagagctttgcttttgtttttgtttgtttgttttgagacagggtcttgccctgttgcccaggctggagtgcagtggcgcaatcacagctcactgcagccttgacctctaaagcccaagtagtcctaccacctcagcctcccaagtagctgggaatacaggcgcataccaccacacctggctaatgtttgtattttttttagagacagggttcctgttgcccaggctggaagcttggtgtagtctgacaatgataaagatgatagttaattatttagcacatgattttatagatggaaaaactaagaccaaaggtatgaaaagtaattggagtgggagaaaaccataaaactagaaaaaatcaa

SEQ ID NO: 64709 - DNA, 387 bp, Homo sapiens
tcagtaggctgaggtgggaggattgcttgaacccaggaattcaagaccagcctgggcaacatagcaaagacccatttcttccaccccatgaatgaatgaatgagttattaatttaagtttaagggcaaaagctaataactaataggggcacagtatataaggatgtggttttgtgacatcagtaaccaaaaggggtagagacagagctgtaaaggagcagattctttgaatagtagtgaagtcaaactggtattaattaaaaatagaatttaacttcaggatattagatgtaatccctatgataaccataaagacaagatctatagtatatatacagaaggaaatgagaaaggaatttacacatttcaccaaataaatgtatctaag

SEQ ID NO: 64710 - DNA, 399 bp, Homo sapiens
atggaaaccatgactaaggacaagtcggtaataatcttccaacttacatttatacaacatgtttggtgcctttgtaagaatcaaccaaggaaacatcttttttatgttttggacagactataaagggatagtctgaaaaagcacagatcataaaataacaacctataaattttctatataaaggatacagctgtattgcagcaaataaatctcttcaaacacaaatatctaatttgacttgttttgtttacgttaatgaggcaacaatttacaaactgccaaaacatgtactgttttggtttgtacaagtaaaaaaaattatttaaatctcatttttcccagagagaaatgacagatttgagctttctcagggtgagctcctaagaacgaataaggcta

SEQ ID NO: 64711 - DNA, 1728 bp, Homo sapiens
atgctgcaacaacagatgtgactaggaacggccggtgacatggggagggcctatcaccctattcttgggggctgcttcttcacagtgatcatgaagcctagcagcaaatcccacctccccacacgcacacggccagcctggagcccacagaagggtcctcctgcagccagtggagcttggtccagcctccagtccacccctaacaggcttaaggatagaaacgacacataacaccgggaaaagccatgctgtcaagcatctcagaatctcaaccccagaggcagtctttagggactggggtgggctcaggaagctgtattatttcaaaggacgcagtgtttccacagctcagcccagagctgctggagttcacacggcccaccagaacctgctgacttcaaaatcatcaccaccaaggggccaggaggtggcgctgtggggcaacagaaaacagaaaacagctgctccttgaacttggattcccagcagctcccccaagcgcccacaggggctgcattcctccctgctggacacctgtaactacaacattaaaacagggcgcaagcaaggaacacaaacactgggaaagctgtgcctttaaaaaaaaaaaaaggagggtaaaaaagcttaaggttaatgttttgaaacctgacccagccagggcctaatgcagaccttgtccagctagtaagtgggcctctgggggtcttcattgagtgaaccttcagagtgctggtgtttcaccaaggccttccatagaggacgcggcaggctctgcaggaagcagcttcgatggccgatggccaagaaaggaagggaaaacccctggactggtcgctgggcacccagtccccctacccccgtgccttcccttccagtgcctttccctctttccctcggtggtagctttgcctgacagtgcagacctcgcctgacgtcaacactaggttctttatgctcatgtggttttatttttgttttctcctatcaagagtggtcagaaaatctctgttccatgtcaggaacaaggaaaatcttttggaatttttttggtttttttcttttttttagcatgacttgatcagataggtaggataatgttgcccccttggcccaagtgcagagtgacaaaagggaccaacactaaaaggatccctgagatcctgggatacttcctcttcatgttcattgtgggggccggggacatcaccctgacaggtgggtccccaggccccagaaagctcatttccgcatccctgggtgcagggggagttcacggggtctctgcctgttggtttgggatgcgtctcctcaaggcactcactgtccagagagaacaaaaataaaaccaggtctgctctctggctctgtcatctgggcacgttcggagccaaaagccttgaccttctgaaagttcactgaaaaatcatctcgtaaaaggcagattcattggacaaaagatttagaaatgtgtttaccgtgtatacatgggagccttcagaatacagacccacagatgcagggaaattgtccatttttatgcttaggttcaagaaagggtggactgcgtgtggaaagaagattatataacaaggccggacctgctgctaataggctgagtggggaacctagcaaggtctgtctgcctggattcttcttggcctttcctcctccgagaatggggcgggatgctctctggagtgagggtcttatgacctaaagtcaaac

SEQ ID NO: 64712 - DNA, 1593 bp, Homo sapiens
acacaccccctcagtaccccccaccccctttttaagcaatgctttgttgtgctaaaactagttggacgagttagggtgttactgttgctcccgaggccctggccaatagaaccagatccaccccgctgtgcgtaagcgcgcaattaaggatttaaccaaggctgtgctgcgcctcagccagcagtcagccggccggagacagagacttcacgactcccagtctcctcctcgccgcggccgccgcctcctccttctctcctcctcctcttcctcctcctccctcgctcccacagccatgtctgcttagaccagagcagccccacagccaactagggcagctgccgccgccacaacagcaaggacagccgctgccgccgcccgtgagcgatgacaggagtgtttgacagaagggtccccagcatccgatccggcgacttccaagctccgttccagacgtccgcagctatgcaccatccgtctcaggaatcgccaactttgcccgagtcttcagctaccgattctgactactacagccctacggggggagccccgcacggctactgctctcctacctcggcttcctatggcaaagctctcaacccctaccagtatcagtatcacggcgtgaacggctccgccgggagctacccagccaaagcttatgccgactatagctacgctagctcctaccaccagtacggcggcgcctacaaccgcgtcccaagcgccaccaaccagccagagaaagaagtgaccgagcccgaggtgagaatggtgaatggcaaaccaaagaaagttcgtaaacccaggactatttattccagctttcagctggccgcattacagagaaggtttcagaagactcagtacctcgccttgccggaacgcgccgagctggccgcctcgctgggattgacacaaacacaggtgaaaatctggtttcagaacaaaagatccaagatcaagaagatcatgaaaaacggggagatgcccccggagcacagtcccagctccagcgacccaatggcgtgtaactcgccgcagtctccagcggtgtgggagccccagggctcgtcccgctcgctcagccaccaccctcatgcccaccctccgacctccaaccagtccccagcgtccagctacctggagaactctgcatcctggtacacaagtgcagccagctcaatcaattcccacctgccgccgccgggctccttacagcacccgctggcgctggcctccgggacactctattagatgggctgctctctcttactctcttttttgggactactgtgttttgctgttctagaaaatcataaagaaaggaattcatatggggaagttcggaaaactgaaaaagattcatgtgtaaagcttttttttgcatgtaagttattgcatttcaaaagaccccccctttttttacagaggactttttttgcgcaactgtggacactttcaatggtgccttgaaatctatgacctcaacttttcaaaagacttttttcaatgttattttagccatgtaaataagtgtagatagaggaattaaactgtatattctggataaataaaattatttcgaccatg

SEQ ID NO: 64713 - DNA, 1636 bp, Homo sapiens
acacaccccctcagtaccccccaccccctttttaagcaatgctttgttgtgctaaaactagttggacgagttagggtgttactgttgctcccgaggccctggccaatagaaccagatccaccccgctgtgcgtaagcgcgcaattaaggatttaaccaaggctgtgctgcgcctcagccagcagtcagccggccggagacagagacttcacgactcccagtctcctcctcgccgcggccgccgcctcctccttctctcctcctcctcttcctcctcctccctcgctcccacagccatgtctgcttagaccagagcagccccacagccaactagggcagctgccgccgccacaacagcaaggacagccgctgccgccgcccgtgagcgatgacaggagtgtttgacagaagggtccccagcatccgatccggcgacttccaagctccgttccagacgtccgcagctatgcaccatccgtctcaggaatcgccaactttgcccgagtcttcagctaccgattctgactactacagccctacggggggagccccgcacggctactgctctcctacctcggcttcctatggcaaagctctcaacccctaccagtatcagtatcacggcgtgaacggctccgccgggagctacccagccaaagcttatgccgactatagctacgctagctcctaccaccagtacggcggcgcctacaaccgcgtcccaagcgccaccaaccagccagagaaagaagtgaccgagcccgaggtgagaatggtgaatggcaaaccaaagaaagttcgtaaacccaggactatttattccagctttcagctggccgcattacagagaaggtttcagaagactcagtacctcgccttgccggaacgcgccgagctggccgcctcgctgggattgacacaaacacaggtgaaaatctggtttcagaacaaaagatccaagatcaagaagatcatgaaaaacggggagatgcccccggagcacagtcccagctccagcgacccaatggcgtgtaactcgccgcagtctccagcggtgtgggagccccagggctcgtcccgctcgctcagccaccaccctcatgcccaccctccgacctccaaccagtccccagcgtccagctacctggagaactctgcatcctggtacacaagtgcagccagctcaatcaattcccacctgccgccgccgggctccttacagcacccgctggcgctggcctccgggacactctattagatgggctgctctctcttactctcttttttgggactactgtgttttgctgttctagaaaatcataaagaaaggaattcatatggggaagttcggaaaactgaaaaagattcatgtgtaaagcttttttttgcatgtaagttattgcatttcaaaagaccccccctttttttacagaggactttttttgcgcaactgtggacactttcaatggtgccttgaaatctatgacctcaacttttcaaaagacttttttcaatgttattttagccatgtaaataagtgtagatagaggaattaaactgtatattctggataaataaaattatttcgaccatgaaaagcggaatgtttctgaaaaatacttcattctgcccctctg

SEQ ID NO: 64714 - DNA, 946 bp, Homo sapiens
cgagctcggtaccctgccaaagcgtagtacccaagcgccaccaaccagccagagaaagaagtgaccgagcccgaggtgagaatggtgaatggcaaaccaaagaaagttcgtaaacccaggactatttattccagctttcagctggccgcattacagagaaggtttcagaagactcagtacctcgccttgccggaacgcgccgagctggccgcctcgctgggattgacacaaacacaggtgaaaatctggtttcagaacaaaagatccaagatcaagaagatcatgaaaaacggggagatgcccccggagcacagtcccagctccagcgacccaatggcgtgtaactcgccgcagtctccagcggtgtgggagccccagggctcgtcccgctcgctcagccaccaccctcatgcccaccctccgacctccaaccagtccccagcgtccagctacctggagaactctgcatcctggtacacaagtgcagccagctcaatcaattcccacctgccgccgccgggctccttacagcacccgctggcgctggcctccgggacactctattagatgggctgctctctcttactctcttttttgggactactgtgttttgctgttctagaaaatcataaagaaaggaattcatatggggaagttcggaaaactgaaaaagattcatgtgtaaagcttttttttgcatgtaagttattgcatttcaaaagaccccccctttttttacagaggactttttttgcgcaactgtggacactttcaatggtgccttgaaatctatgacctcaacttttcaaaagacttttttcaatgttattttagccatgtaaataagtgtagatagaggaattaaactgtatattctggataaataaaattatttcgaccatgaaaagcggaatgtttctgaaaaatacttcattctgcccctctg

SEQ ID NO: 64715 - DNA, 910 bp, Homo sapiens
aagcaacgaccgcaagagctgaatcccagatgccaaggagaaagcagtgttgtaggaagcgctttgcacaaactatctgaatgaacagagtaggaattaatcagaggctatcccgcttttccatatttggggtaggtgcatatttatcgcggtcctgaaaagcaaaggtggtggtgatatgggcaaagaatgaagactgagtggtaagaaactctaggactctatttgaggcccttccgcaaaaggggcattgtctggtgacaagctttaactgagtctgttttgattatttagagaaagaagtgaccgagcccgaggtgagaatggtgaatggcaaaccaaagaaagttcgtaaacccaggactatttattccagctttcagctggccgcattacagagaaggtttcagaagactcagtacctcgccttgccggaacgcgccgagctggccgcctcgctgggattgacacaaacacaggtaaatacggcgctgccatgcactagacctgcctgagctgcacgtctggttgggtcgcgcggttcagtctcgatgggactggagctgtttcgacagtacccgtgagaaactaacagacccaaagacatcagcccctatgctttaactcggtgagtcaggccttgagacggtggggatggtattcatcagcggtctggagatacctcccactaaccgcgccccccgcccccaccccgtagcgggcctccggagctgtggggccaatttcgcgggttgaaagcaagcggagggttatttctagggcggcctaggcagcccagagcagctatctggttttcttaacaatgtagagcctcctcgggggtgagcaaggcctggtgttctcgcggtggtctcaggctaagaaaaggctgagaacgtcgcctggagcg

SEQ ID NO: 64716 - DNA, 1136 bp, Homo sapiens
acacaccccctcagtaccccccaccccctttttaagcaatgctttgttgtgctaaaactagttggacgagttagggtgttactgttgctcccgaggccctggccaatagaaccagatccaccccgctgtgcgtaagcgcgcaattaaggatttaaccaaggctgtgctgcgcctcagccagcagtcagccggccggagacagagacttcacgactcccagtctcctcctcgccgcggccgccgcctcctccttctctcctcctcctcttcctcctcctccctcgctcccacagccatgtctgcttagaccagagcagccccacagccaactagggcagctgccgccgccacaacagcaaggacagccgctgccgccgcccgtgagcgatgacaggagtgtttgacagaagggtccccagcatccgatccggcgacttccaagctccgttccagacgtccgcagctatgcaccatccgtctcaggaatcgccaactttgcccgagtcttcagctaccgattctgactactacagccctacggggggagccccgcacggctactgctctcctacctcggcttcctatggcaaagctctcaacccctaccagtatcagtatcacggcgtgaacggctccgccgggagctacccagccaaagcttatgccgactatagctacgctagctcctaccaccagtacggcggcgcctacaaccgcgtcccaagcgccaccaaccagccagagaaagaagtgaccgagcccgaggtgagaatggtgaatggcaaaccaaagaaagttcgtaaacccaggactatttattccagctttcagctggccgcattacagagaaggtttcagaagactcagtacctcgccttgccggaacgcgccgagctggccgcctcgctgggattgacacaaacacaggtaaatacggcgctgccatgcactagacctgcctgagctgcacgtctggttgggtcgcgcggttcagtctcgatgggactggagctgtttcgacagtacccgtgagaaactaacagacccaaagacatcagcccctatgctttaactcggtgagtcaggccttgagacggtggggatggtattcatcagcggtctggagatacctccca

SEQ ID NO: 64717 - DNA, 1440 bp, Homo sapiens
cggtgctcgctcctctgcgcggtccgcgggcggctgcttctctcctcctgcgcttctgctccgcggtcgctggcccaggcgtgtgtgcgtgagaccccgaaggagcctgtaccacgatgaactagggttatgtctgggcggtcgtggaggaacaagctaatgcatcagcccgctgccgccgcccgtgagcgatgacaggagtgtttgacagaagggtccccagcatccgatccggcgacttccaagctccgttccagacgtccgcagctatgcaccatccgtctcaggaatcgccaactttgcccgagtcttcagctaccgattctgactactacagccctacggggggagccccgcacggctactgctctcctacctcggcttcctatggcaaagctctcaacccctaccagtatcagtatcacggcgtgaacggctccgccgggagctacccagccaaagcttatgccgactatagctacgctagctcctaccaccagtacggcggcgcctacaaccgcgtcccaagcgccaccaaccagccagagaaagaagtgaccgagcccgaggtgagaatggtgaatggcaaaccaaagaaagttcgtaaacccaggactatttattccagctttcagctggccgcattacagagaaggtttcagaagactcagtacctcgccttgccggaacgcgccgagctggccgcctcgctgggattgacacaaacacaggtgaaaatctggtttcagaacaaaagatccaagatcaagaagatcatgaaaaacggggagatgcccccggagcacagtcccagctccagcgacccaatggcgtgtaactcgccgcagtctccagcggtgtgggagccccagggctcgtcccgctcgctcagccaccaccctcatgcccaccctccgacctccaaccagtccccagcgtccagctacctggagaactctgcatcctggtacacaagtgcagccagctcaatcaattcccacctgccgccgccgggctccttacagcacccgctggcgctggcctccgggacactctattagatgggctgctctctcttactctcttttttgggactactgtgttttgctgttctagaaaatcataaagaaaggaattcatatggggaagttcggaaaactgaaaaagattcatgtgtaaagcttttttttgcatgtaagttattgcatttcaaaagaccccccctttttttacagaggactttttttgcgcaactgtggacactttcaatggtgccttgaaatctatgacctcaacttttcaaaagacttttttcaatgttattttagccatgtaaataagtgtagatagaggaattaaactgtatattctggataaataaaattatttcgaccatgaaaagcggaatgtttctgaaaaatacttcattctgcccctctg

SEQ ID NO: 64718 - DNA, 893 bp, Homo sapiens
ggaaaaccccatgtggcaacacgccttctgtgtacattcccaatatttgctataaatagggccatcccaggctgctgtcagaatataacagcactcccaaagaactgggtactcaacactgagcagatctgttctttgagctaaaaaccatgtgctgtaccaagagtttgctcctggctgctttgatgtcagtgctgctactccacctctgcggcgaatcagaagcagcaagcaactttgactgctgtcttggatacacagaccgtattcttcatcctaaatttattgtgggcttcacacggcagctggccaatgaaggctgtgacatcaatgctatcatctttcacacaaagaaaaagttgtctgtgtgcgcaaatccaaaacagacttgggtgaaatatattgtgcgtctcctcagtaaaaaagtcaagaacatgtaaaaactgtggcttttctggaatggaattggacatagcccaagaacagaaagaaccttgctggggttggaggtttcacttgcacatcatggagggtttagtgcttatctaatttgtgcctcactggacttgtccaattaatgaagttgattcatattgcatcatagtttgctttgtttaagcatcacattaaagttaaactgtattttatgttatttatagctgtaggttttctgtgtttagctatttaatactaattttccataagctattttggtttagtgcaaagtataaaattatatttgggggggaataagattatatggactttcttgcaagcaacaagctattttttaaaaaaaactatttaacattcttttgtttatattgttttgtctcctaaattgttgtaattgcattataaaataagaaaaatattaataagacaaatattga

SEQ ID NO: 64719 - DNA, 789 bp, Homo sapiens
ggaaaaccccatgtggcaacacgccttctgtgtacattcccaatatttgctataaatagggccatcccaggctgctgtcagaatataacagcactcccaaagaactgggtactcaacactgagcagatctgttctttgagctaaaaaccatgtgctgtaccaagagtttgctcctggctgctttgatgtcagtgctgctactccacctctgcggcgaatcagaagcagcaagcaactttgactgctgtcttggatacacagaccgtattcttcatcctaaatttattgtgggcttcacacggcagctggccaatgaaggctgtgacatcaatgctatcatctttcacacaaagaaaaagttgtctgtgtgcgcaaatccaaaacagacttgggtgaaatatattgtgcgtctcctcagtaaaaaagtcaagaacatgtaaaaactgtggcttttctggaatggaattggacatagcccaagaacagaaagaaccttgctggggttggaggtttcacttgcacatcatggagggtttagtgcttatctaatttgtgcctcactggacttgtccaattaatgaagttgattcatattgcatcatagtttgctttgtttaagcatcacattaaagttaaactgtattttatgttatttatagctgtaggttttctgtgtttagctatttaatactaattttccataagctattttggtttagtgcaaagttaaatttagggttgatgcataataaatttagggttgatggggtactctggacagctagcagc

SEQ ID NO: 64720 - DNA, 448 bp, Homo sapiens
ggaaaaccccatgtggcaacacgccttctgtgtacattcccaatatttgctataaatagggccatcccaggctgctgtcagaatataacagcactcccaaagaactgggtactcaacactgagcagatctgttctttgagctaaaaaccatgtgctgtaccaagagtttgctcctggctgctttgatgtcagtgctgctactccacctctgcggcgaatcagaagcagcaagcaactttgactgctgtcttggatacacagaccgtattcttcatcctaaatttattgtgggcttcacacggcagctggccaatgaaggctgtgacatcaatgctatcatgtaagttattaattgattttaattcagttgtatcaggaatacctagaaacttcagttttaaaaatgtttgcctttttagagtttcattcagaaattactgatgttttg

SEQ ID NO: 64721 - DNA, 508 bp, Homo sapiens
tacatacatattctatgtaaccaccaatagcaaaattatatgacaattctgggactttatcttcctgccattgtactattatttgttacattgcagagaaagagagaatcactttgattttgcattaatcttcatcagaagcattttttgtgcattttattttacctcatcaactgaaatgtttagtgtgtaatcaactggaatataaaatttccattgtatgttctatgaaaaacccattgaaaagctcattaaacacaaatcaaattttctgatttttcagctttcacacaaagaaaaagttgtctgtgtgcgcaaatccaaaacagacttgggtgaaatatattgtgcgtctcctcaggtatgttacactgacatttagcctttgcaaatgtttgaggaaagaggagtgtgcaaaggggtgggccgtaggttttctgggattctttagtttaactattgtggaatttttaaagggaaaatttgagttggaccacaaaaacaaaga

SEQ ID NO: 64722 - DNA, 867 bp, Homo sapiens
  misc_feature (862)..(863): n is a, c, g, or t
  misc_feature (865)..(867): n is a, c, g, or t
ggaaaaccccatgtggcaacacgccttctgtgtacattcccaatatttgctataaatagggccatcccaggctgctgtcagaatataacagcactcccaaagaactgggtactcaacactgagcagatctgttctttgagctaaaaaccatgtgctgtaccaagagtttgctcctggctgctttgatgtcagtgctgctactccacctctgcggcgaatcagaagcagcaagcaactttgactgctgtcttggatacacagaccgtattcttcatcctaaatttattgtgggcttcacacggcagctggccaatgaaggctgtgacatcaatgctatcatctttcacacaaagaaaaagttgtctgtgtgcgcaaatccaaaacagacttgggtgaaatatattgtgcgtctcctcagaacagaaagaaccttgctggggttggaggtttcacttgcacatcatggagggtttagtgcttatctaatttgtgcctcactggacttgtccaattaatgaagttgattcatattgcatcatagtttgctttgtttaagcatcacattaaagttaaactgtattttatgttatttatagctgtaggttttctgtgtttagctatttaatactaattttccataagctattttggtttagtgcaaagtataaaattatatttgggggggaataagattatatggactttcttgcaagcaacaagctattttttaaaaaaaactatttaacattcttttgtttatattgttttgtctcctaaattgttgtaattgcattataaaataagaaaaatattaataagacaaatattgaaaataaagaaacaaaaagttcttctgttaaannannn

SEQ ID NO: 64723 - DNA, 930 bp, Homo sapiens
  misc_feature (925)..(926): n is a, c, g, or t
  misc_feature (928)..(930): n is a, c, g, or t
ggaaaaccccatgtggcaacacgccttctgtgtacattcccaatatttgctataaatagggccatcccaggctgctgtcagaatataacagcactcccaaagaactgggtactcaacactgagcagatctgttctttgagctaaaaaccatgtgctgtaccaagagtttgctcctggctgctttgatgtcagtgctgctactccacctctgcggcgaatcagaagcagcaagcaactttgactgctgtcttggatacacagaccgtattcttcatcctaaatttattgtgggcttcacacggcagctggccaatgaaggctgtgacatcaatgctatcatctttcacacaaagaaaaagttgtctgtgtgcgcaaatccaaaacagacttgggtgaaatatattgtgcgtctcctcagtaaaaaagtcaagaacatgtaaaaactgtggcttttctggaatggaattggacatagcccaagaacagaaagaaccttgctggggttggaggtttcacttgcacatcatggagggtttagtgcttatctaatttgtgcctcactggacttgtccaattaatgaagttgattcatattgcatcatagtttgctttgtttaagcatcacattaaagttaaactgtattttatgttatttatagctgtaggttttctgtgtttagctatttaatactaattttccataagctattttggtttagtgcaaagtataaaattatatttgggggggaataagattatatggactttcttgcaagcaacaagctattttttaaaaaaaactatttaacattcttttgtttatattgttttgtctcctaaattgttgtaattgcattataaaataagaaaaatattaataagacaaatattgaaaataaagaaacaaaaagttcttctgttaaannannn

SEQ ID NO: 64724 - DNA, 11216 bp, Homo sapiens
gcggccgcggcggcggcggcggaggaggcgaccgagaagatacccgccctgcgccccgctctgctgtgggcgctgctggcgctctggctgtgctgcgcgacccccgcgcatgcattgcagtgtcgagatggctatgaaccctgtgtaaatgaaggaatgtgtgttacctaccacaatggcacaggatactgcaaatgtccagaaggcttcttgggggaatattgtcaacatcgagacccctgtgagaagaaccgctgccagaatggtgggacttgtgtggcccaggccatgctggggaaagccacgtgccgatgtgcctcagggtttacaggagaggactgccagtactcgacatctcatccatgctttgtgtctcgaccttgcctgaatggcggcacatgccatatgctcagccgggatacctatgagtgcacctgtcaagtcgggtttacaggtaaggagtgccaatggaccgatgcctgcctgtctcatccctgtgcaaatggaagtacctgtaccactgtggccaaccagttctcctgcaaatgcctcacaggcttcacagggcagaagtgtgagactgatgtcaatgagtgtgacattccaggacactgccagcatggtggcacctgcctcaacctgcctggttcctaccagtgccagtgccttcagggcttcacaggccagtactgtgacagcctgtatgtgccctgtgcaccctcgccttgtgtcaatggaggcacctgtcggcagactggtgacttcacttttgagtgcaactgccttccaggttttgaagggagcacctgtgagaggaatattgatgactgccctaaccacaggtgtcagaatggaggggtttgtgtggatggggtcaacacttacaactgccgctgtcccccacaatggacaggacagttctgcacagaggatgtggatgaatgcctgctgcagcccaatgcctgtcaaaatgggggcacctgtgccaaccgcaatggaggctatggctgtgtatgtgtcaacggctggagtggagatgactgcagtgagaacattgatgattgtgccttcgcctcctgtactccaggctccacctgcatcgaccgtgtggcctccttctcttgcatgtgcccagaggggaaggcaggtctcctgtgtcatctggatgatgcatgcatcagcaatccttgccacaagggggcactgtgtgacaccaaccccctaaatgggcaatatatttgcacctgcccacaaggctacaaaggggctgactgcacagaagatgtggatgaatgtgccatggccaatagcaatccttgtgagcatgcaggaaaatgtgtgaacacggatggcgccttccactgtgagtgtctgaagggttatgcaggacctcgttgtgagatggacatcaatgagtgccattcagacccctgccagaatgatgctacctgtctggataagattggaggcttcacatgtctgtgcatgccaggtttcaaaggtgtgcattgtgaattagaaataaatgaatgtcagagcaacccttgtgtgaacaatgggcagtgtgtggataaagtcaatcgtttccagtgcctgtgtcctcctggtttcactgggccagtttgccagattgatattgatgactgttccagtactccgtgtctgaatggggcaaagtgtatcgatcacccgaatggctatgaatgccagtgtgccacaggtttcactggtgtgttgtgtgaggagaacattgacaactgtgaccccgatccttgccaccatggtcagtgtcaggatggtattgattcctacacctgcatctgcaatcccgggtacatgggcgccatctgcagtgaccagattgatgaatgttacagcagcccttgcctgaacgatggtcgctgcattgacctggtcaatggctaccagtgcaactgccagccaggcacgtcaggggttaattgtgaaattaattttgatgactgtgcaagtaacccttgtatccatggaatctgtatggatggcattaatcgctacagttgtgtctgctcaccaggattcacagggcagagatgtaacattgacattgatgagtgtgcctccaatccctgtcgcaagggtgcaacatgtatcaacggtgtgaatggtttccgctgtatatgccccgagggaccccatcaccccagctgctactcacaggtgaacgaatgcctgagcaatccctgcatccatggaaactgtactggaggtctcagtggatataagtgtctctgtgatgcaggctgggttggcatcaactgtgaagtggacaaaaatgaatgcctttcgaatccatgccagaatggaggaacttgtgacaatctggtgaatggatacaggtgtacttgcaagaagggctttaaaggctataactgccaggtgaatattgatgaatgtgcctcaaatccatgcctgaaccaaggaacctgctttgatgacataagtggctacacttgccactgtgtgctgccatacacaggcaagaattgtcagacagtattggctccctgttccccaaacccttgtgagaatgctgctgtttgcaaagagtcaccaaattttgagagttatacttgcttgtgtgctcctggctggcaaggtcagcggtgtaccattgacattgacgagtgtatctccaagccctgcatgaaccatggtctctgccataacacccagggcagctacatgtgtgaatgtccaccaggcttcagtggtatggactgtgaggaggacattgatgactgccttgccaatccttgccagaatggaggttcctgtatggatggagtgaatactttctcctgcctctgccttccgggtttcactggggataagtgccagacagacatgaatgagtgtctgagtgaaccctgtaagaatggagggacctgctctgactacgtcaacagttacacttgcaagtgccaggcaggatttgatggagtccattgtgagaacaacatcaatgagtgcactgagagctcctgtttcaatggtggcacatgtgttgatgggattaactccttctcttgcttgtgccctgtgggtttcactggatccttctgcctccatgagatcaatgaatgcagctctcatccatgcctgaatgagggaacgtgtgttgatggcctgggtacctaccgctgcagctgccccctgggctacactgggaaaaactgtcagaccctggtgaatctctgcagtcggtctccatgtaaaaacaaaggtacttgcgttcagaaaaaagcagagtcccagtgcctatgtccatctggatgggctggtgcctattgtgacgtgcccaatgtctcttgtgacatagcagcctccaggagaggtgtgcttgttgaacacttgtgccagcactcaggtgtctgcatcaatgctggcaacacgcattactgtcagtgccccctgggctatactgggagctactgtgaggagcaactcgatgagtgtgcgtccaacccctgccagcacggggcaacatgcagtgacttcattggtggatacagatgcgagtgtgtcccaggctatcagggtgtcaactgtgagtatgaagtggatgagtgccagaatcagccctgccagaatggaggcacctgtattgaccttgtgaaccatttcaagtgctcttgcccaccaggcactcggggcctactctgtgaagagaacattgatgactgtgcccggggtccccattgccttaatggtggtcagtgcatggataggattggaggctacagttgtcgctgcttgcctggctttgctggggagcgttgtgagggagacatcaacgagtgcctctccaacccctgcagctctgagggcagcctggactgtatacagctcaccaatgactacctgtgtgtttgccgtagtgcctttactggccggcactgtgaaaccttcgtcgatgtgtgtccccagatgccctgcctgaatggagggacttgtgctgtggccagtaacatgcctgatggtttcatttgccgttgtcccccgggattttccggggcaaggtgccagagcagctgtggacaagtgaaatgtaggaagggggagcagtgtgtgcacaccgcctctggaccccgctgcttctgccccagtccccgggactgcgagtcaggctgtgccagtagcccctgccagcacgggggcagctgccaccctcagcgccagcctccttattactcctgccagtgtgccccaccattctcgggtagccgctgtgaactctacacggcaccccccagcacccctcctgccacctgtctgagccagtattgtgccgacaaagctcgggatggcgtctgtgatgaggcctgcaacagccatgcctgccagtgggatgggggtgactgttctctcaccatggagaacccctgggccaactgctcctccccacttccctgctgggattatatcaacaaccagtgtgatgagctgtgcaacacggtcgagtgcctgtttgacaactttgaatgccaggggaacagcaagacatgcaagtatgacaaatactgtgcagaccacttcaaagacaaccactgtgaccaggggtgcaacagtgaggagtgtggttgggatgggctggactgtgctgctgaccaacctgagaacctggcagaaggtaccctggttattgtggtattgatgccacctgaacaactgctccaggatgctcgcagcttcttgcgggcactgggtaccctgctccacaccaacctgcgcattaagcgggactcccagggggaactcatggtgtacccctattatggtgagaagtcagctgctatgaagaaacagaggatgacacgcagatcccttcctggtgaacaagaacaggaggtggctggctctaaagtctttctggaaattgacaaccgccagtgtgttcaagactcagaccactgcttcaagaacacggatgcagcagcagctctcctggcctctcacgccatacaggggaccctgtcataccctcttgtgtctgtcgtcagtgaatccctgactccagaacgcactcagctcctctatctccttgctgttgctgttgtcatcattctgtttattattctgctgggggtaatcatggcaaaacgaaagcgtaagcatggctctctctggctgcctgaaggtttcactcttcgccgagatgcaagcaatcacaagcgtcgtgagccagtgggacaggatgctgtggggctgaaaaatctctcagtgcaagtctcagaagctaacctaattggtactggaacaagtgaacactgggtcgatgatgaagggccccagccaaagaaagtaaaggctgaagatgaggccttactctcagaagaagatgaccccattgatcgacggccatggacacagcagcaccttgaagctgcagacatccgtaggacaccatcgctggctctcacccctcctcaggcagagcaggaggtggatgtgttagatgtgaatgtccgtggcccagatggctgcaccccattgatgttggcttctctccgaggaggcagctcagatttgagtgatgaagatgaagatgcagaggactcttctgctaacatcatcacagacttggtctaccagggtgccagcctccaggcccagacagaccggactggtgagatggccctgcaccttgcagcccgctactcacgggctgatgctgccaagcgtctcctggatgcaggtgcagatgccaatgcccaggacaacatgggccgctgtccactccatgctgcagtggcagctgatgcccaaggtgtcttccagattctgattcgcaaccgagtaactgatctagatgccaggatgaatgatggtactacacccctgatcctggctgcccgcctggctgtggagggaatggtggcagaactgatcaactgccaagcggatgtgaatgcagtggatgaccatggaaaatctgctcttcactgggcagctgctgtcaataatgtggaggcaactcttttgttgttgaaaaatggggccaaccgagacatgcaggacaacaaggaagagacacctctgtttcttgctgcccgggaggggagctatgaagcagccaagatcctgttagaccattttgccaatcgagacatcacagaccatatggatcgtcttccccgggatgtggctcgggatcacatgcaccatgacattgtgcgccttctggatgaatacaatgtgaccccaagccctccaggcaccgtgttgacttctgctctctcacctgtcatctgtgggcccaacagatctttcctcagcctgaagcacaccccaatgggcaagaagtctagacggcccagtgccaagagtaccatgcctactagcctccctaaccttgccaaggaggcaaaggatgccaagggtagtaggaggaagaagtctctgagtgagaaggtccaactgtctgagagttcagtaactttatcccctgttgattccctagaatctcctcacacgtatgtttccgacaccacatcctctccaatgattacatcccctgggatcttacaggcctcacccaaccctatgttggccactgccgcccctcctgccccagtccatgcccagcatgcactatctttttctaaccttcatgaaatgcagcctttggcacatggggccagcactgtgcttccctcagtgagccagttgctatcccaccaccacattgtgtctccaggcagtggcagtgctggaagcttgagtaggctccatccagtcccagtcccagcagattggatgaaccgcatggaggtgaatgagacccagtacaatgagatgtttggtatggtcctggctccagctgagggcacccatcctggcatagctccccagagcaggccacctgaagggaagcacataaccacccctcgggagcccttgccccccattgtgactttccagctcatccctaaaggcagtattgcccaaccagcgggggctccccagcctcagtccacctgccctccagctgttgcgggccccctgcccaccatgtaccagattccagaaatggcccgtttgcccagtgtggctttccccactgccatgatgccccagcaggacgggcaggtagctcagaccattctcccagcctatcatcctttcccagcctctgtgggcaagtaccccacacccccttcacagcacagttatgcttcctcaaatgctgctgagcgaacacccagtcacagtggtcacctccagggtgagcatccctacctgacaccatccccagagtctcctgaccagtggtcaagttcatcaccccactctgcttctgactggtcagatgtgaccaccagccctacccctgggggtgctggaggaggtcagcggggacctgggacacacatgtctgagccaccacacaacaacatgcaggtttatgcgtgagagagtccacctccagtgtagagacataactgacttttgtaaatgctgctgaggaacaaatgaaggtcatccgggagagaaatgaagaaatctctggagccagcttctagaggtaggaaagagaagatgttcttattcagataatgcaagagaagcaattcgtcagtttcactgggtatctgcaaggcttattgattattctaatctaataagacaagtttgtggaaatgcaagatgaatacaagccttgggtccatgtttactctcttctatttggagaataagatggatgcttattgaagcccagacattcttgcagcttggactgcattttaagccctgcaggcttctgccatatccatgagaagattctacactagcgtcctgttgggaattatgccctggaattctgcctgaattgacctacgcatctcctcctccttggacattcttttgtcttcatttggtgcttttggttttgcacctctccgtgattgtagccctaccagcatgttatagggcaagacctttgtgcttttgatcattctggcccatgaaagcaactttggtctcctttcccctcctgtcttcccggtatcccttggagtctcacaaggtttactttggtatggttctcagcacaaacctttcaagtatgttgtttctttggaaaatggacatactgtattgtgttctcctgcatatatcattcctggagagagaaggggagaagaatacttttcttcaacaaattttgggggcaggagatcccttcaagaggctgcaccttaatttttcttgtctgtgtgcaggtcttcatataaactttaccaggaagaagggtgtgagtttgttgtttttctgtgtatgggcctggtcagtgtaaagttttatccttgatagtctagttactatgaccctccccacttttttaaaaccagaaaaaggtttggaatgttggaatgaccaagagacaagttaactcgtgcaagagccagttacccacccacaggtccccctacttcctgccaagcattccattgactgcctgtatggaacacatttgtcccagatctgagcattctaggcctgtttcactcactcacccagcatatgaaactagtcttaactgttgagcctttcctttcatatccacagaagacactgtctcaaatgttgtacccttgccatttaggactgaactttccttagcccaagggacccagtgacagttgtcttccgtttgtcagatgatcagtctctactgattatcttgctgcttaaaggcctgctcaccaatctttctttcacaccgtgtggtccgtgttactggtatacccagtatgttctcactgaagacatggactttatatgttcaagtgcaggaattggaaagttggacttgttttctatgatccaaaacagccctataagaaggttggaaaaggaggaactatatagcagcctttgctattttctgctaccatttcttttcctctgaagcggccatgacattccctttggcaactaacgtagaaactcaacagaacattttcctttcctagagtcaccttttagatgataatggacaactatagacttgctcattgttcagactgattgcccctcacctgaatccactctctgtattcatgctcttggcaatttctttgactttcttttaagggcagaagcattttagttaattgtagataaagaatagttttcttcctcttctccttgggccagttaataattggtccatggctacactgcaacttccgtccagtgctgtgatgcccatgacacctgcaaaataagttctgcctgggcattttgtagatattaacaggtgaattcccgactcttttggtttgaatgacagttctcattccttctatggctgcaagtatgcatcagtgcttcccacttacctgatttgtctgtcggtggccccatatggaaaccctgcgtgtctgttggcataatagtttacaaatggttttttcagtcctatccaaatttattgaaccaacaaaaataattacttctgccctgagataagcagattaagtttgttcattctctgctttattctctccatgtggcaacattctgtcagcctctttcatagtgtgcaaacattttatcattctaaatggtgactctctgcccttggacccatttattattcacagatggggagaacctatctgcatggacctctgtggaccacagcgtacctgcccctttctgccctcctgctccagccccacttctgaaagtatcagctactgatccagccactggatattttatatcctcccttttccttaagcacaatgtcagaccaaattgcttgtttctttttcttggactactttaatttggatcctttgggtttggagaaagggaatgtgaaagctgtcattacagacaacaggtttcagtgatgaggaggacaacactgcctttcaaactttttactgatctcttagattttaagaactcttgaattgtgtggtatctaataaaagggaaggtaagatggataatcactttctcatttgggttctgaattggagactcagtttttatgagacacatcttttatgccatgtatagatcctcccctgctatttttggtttatttttattgttataaatgctttctttctttgactcctcttctgcctgcctttggggataggtttttttgtttgtttatttgcttcctctgttttgttttaagcatcattttcttatgtgaggtggggaagggaaaggtatgagggaaagagagtctgagaattaaaatattttagtataagcaattggctgtgatgctcaaatccattgcatcctcttattgaatttgccaatttgtaatttttgcataataaagaaccaaaggtgtaatgttttgttgagaggtggtttagggattttggccctaaccaatacattgaatgtatgatgactatttgggaggacacatttatgtacccagaggcccccactaataagtggtactatggttacttccttgtgtacatttctcttaaaagtgatattatatctgtttgtatgagaaacccagtaaccaataaaatgaccgcatattcctgactaaacgtagtaaggaaaatgcacactttgtttttacttttccgtttcattctaaaggtagttaagatgaaatttatatgaaagcatttttatcacaaaataaaaaaggtttgccaagctcagtggtgttgtattttttattttccaatactgcatccatggcctggcagtgttacctcatgatgtcataatttgctgagagagcaaattttcttttctttctgaatcccacaaagcctagcaccaaacttctttttttcttcctttaattagatcataaataaatgatcctggggaaaaagcatctgtcaaataggaaacatcacaaaactgagcactcttctgtgcactagccatagctggtgacaaacagatggttgctcagggacaaggtgccttccaatggaaatgcgaagtagttgctatagcaagaattgggaactgggatataagtcataatattaattatgctgttatgtaaatgattggtttgtaacattccttaagtgaaatttgtgtagaacttaatatacaggattataaaataatattttgtgtataaatttgttataagttcacattcatacatttatttataaagtcagtgagatatttgaacatgaaaaaaaaaa

SEQ ID NO: 64725 - DNA, 474 bp, Homo sapiens
cactttgttacgtatgatttctctcttttcttacaatctgtctctctataattacttgtaaccctgtgtaaatgaaggaatgtgtgttacctaccacaatggcacaggatactgcaaatgtccagaaggcttcttgggggaatattgtcaacatcgagacccctgtgagaagaaccgctgccagaatggtgggacttgtgtggcccaggccatgctggggaaagccacgtgccgatgtgcctcagggtttacaggagaggactgccagtactcgacatctcatccatgctttgtgtctcgaccttgcctgaatggcggcacatgccatatgctcagccgggatacctatgagtgcacctgtcaagtcgggtttacaggtaactaatgagaccaaagccagtgctttcctaccttcagcagatacctttatttagcatcttttagatcatggtgtctggctcttaaatgtccccc

SEQ ID NO: 64726 - DNA, 1850 bp, Homo sapiens
gcggccgcggcggcggcggcggaggaggcgaccgagaagatacccgccctgcgccccgctctgctgtgggcgctgctggcgctctggctgtgctgcgcgacccccgcgcatgcattgcagtgtcgagatggctatgaaccctgtgtaaatgaaggaatgtgtgttacctaccacaatggcacaggatactgcaaatgtccagaaggcttcttgggggaatattgtcaacatcgagacccctgtgagaagaaccgctgccagaatggtgggacttgtgtggcccaggccatgctggggaaagccacgtgccgatgtgcctcagggtttacaggagaggactgccagtactcgacatctcatccatgctttgtgtctcgaccttgcctgaatggcggcacatgccatatgctcagccgggatacctatgagtgcacctgtcaagtcgggtttacaggtaaggagtgccaatggaccgatgcctgcctgtctcatccctgtgcaaatggaagtacctgtaccactgtggccaaccagttctcctgcaaatgcctcacaggcttcacagggcagaagtgtgagactgatgtcaatgagtgtgacattccaggacactgccagcatggtggcacctgcctcaacctgcctggttcctaccagtgccagtgccttcagggcttcacaggccagtactgtgacagcctgtatgtgccctgtgcaccctcgccttgtgtcaatggaggcacctgtcggcagactggtgacttcacttttgagtgcaactgccttccagaaacagtgagaagaggaacagagctctgggaaagagacagggaagtctggaatggaaaagaacacgatgagaattagacactggaaaatatgtatgtgtggttaataaagtgctttaaactgaattgacattaacagtgggtgatcaactttactatgtgcttgtgcttttgcttttgatggagtaattcattgttttcttatccacctaaatgcacccagctgcccttgattttctctgggctactggccttcacaaccctctcccatgtaccctctctgactttggggtaaccctcccctaacttaaagctagagaattctgaaactgaggaggggatcctctgttaatcagtgagcactttttgatgagctgatagatgatatatgagagactatgcgtggcacaatactttgttacactcttcactgatacaagtgttctagagtgtacacacaacccaaagatagaaataaaaagaggagcagtgtcggggagcttggggcctggtgttccatggagagggagaaaggaacaagcttgaccaattcattcaactccttataaaaatgatgaggaggctgaaaaccaagaattttgattgggaacagaatacaagcagctgaatcagatgaattactaagccacaaagatcctgtttttatacaaatatccttagtacaaaaacaaaagaaggaaaactgtaggggggagtaatgtgctaagtaagcagaattgcctcaaaaagaagttgttctagttactctttcagagtgggaatcttagattctggtattgtggatatggttcacatataatgggattgtgtgttttattttggagggattaaaggtcatagtttggtcctcagtataaaatcaactggtaatttattcatttcatttggtaaaaatgtattgactgcctgctatgttctaggcaccatgctatgtatttggaatacagctatacaaagcattgtcacataattgaaatgaaaattttatattatttaagtcacaagaacaagctatttaattatattacttttagtttctct

SEQ ID NO: 64727 - DNA, 1167 bp, Homo sapiens
gcggccgcggcggcggcggcggaggaggcgaccgagaagatacccgccctgcgccccgctctgctgtgggcgctgctggcgctctggctgtgctgcgcgacccccgcgcatgcattgcagtgtcgagatggctatgaaccctgtgtaaatgaaggaatgtgtgttacctaccacaatggcacaggatactgcaaatgtccagaaggcttcttgggggaatattgtcaacatcgagacccctgtgagaagaaccgctgccagaatggtgggacttgtgtggcccaggccatgctggggaaagccacgtgccgatgtgcctcagggtttacaggagaggactgccagtactcgacatctcatccatgctttgtgtctcgaccttgcctgaatggcggcacatgccatatgctcagccgggatacctatgagtgcacctgtcaagtcgggtttacaggtaaggagtgccaatggaccgatgcctgcctgtctcatccctgtgcaaatggaagtacctgtaccactgtggccaaccagttctcctgcaaatgcctcacaggcttcacagggcagaagtgtgagactgatgtcaatgagtgtgacattccaggacactgccagcatggtggcacctgcctcaacctgcctggttcctaccagtgccagtgccttcagggcttcacaggccagtactgtgacagcctgtatgtgccctgtgcaccctcgccttgtgtcaatggaggcacctgtcggcagactggtgacttcacttttgagtgcaactgccttccaggtaaggagctccctagtgtcccaggattaggggacaaacccctagcacaggaggtagtgggtgtggctcaattgctttttttaggaagcgcaaggaaaaagggaagtgagaattttgtgtggggtgggttgctagtgagggaggagttttatgggcccactgtggtccataaactgagcaggggataatttagcatgtcagggtttatgatgatgagtggctagaaaattgtttattgtcccttttgtagaaacagtgagaagaggaacagagctctgggaaagagacagggaagtctggaatggaaaagaacacgatgagaattagacactggaaaatatgtatgtgtggttaataaagtgctttaaactgaattg

SEQ ID NO: 64728 - DNA, 577 bp, Homo sapiens
  misc_feature (16)..(16): n is a, c, g, or t
  misc_feature (37)..(37): n is a, c, g, or t
cagaggatcccatgcnaataacctccaagacactacnacagctgaaaacaaggatgagcccagcgggaaacgctgaaagcatccactatgcgttgaactgctgtggtttggctgggggcgtggaacagaatacaagcagctgaatcagatgaattactaagccacaaagatcctgtttttatacaaatatccttagtacaaaaacaaaagaaggaaaactgtaggggggagtaatgtgctaagtaagcagaattgcctcaaaaagaagttgttctagttactctttcagagtgggaatcttagattctggtattgtggatatggttcacatataatgggattgtgtgttttattttggagggattaaaggtcatagtttggtcctcagtataaaatcaactggtaatttattcatttcatttggtaaaaatgtattgactgcctgctatgttctaggcaccatgctatgtatttggaatacagctatacaaagcattgtcacataattgaaatgaaaattttatattatttaagtcacaagaacaagctatttaattatattacttttagtttctct

SEQ ID NO: 64729 - DNA, 917 bp, Homo sapiens
gcggccgcggcggcggcggcggaggaggcgaccgagaagatacccgccctgcgccccgctctgctgtgggcgctgctggcgctctggctgtgctgcgcgacccccgcgcatgcattgcagtgtcgagatggctatgaaccctgtgtaaatgaaggaatgtgtgttacctaccacaatggcacaggatactgcaaatgtccagaaggcttcttgggggaatattgtcaacatcgagacccctgtgagaagaaccgctgccagaatggtgggacttgtgtggcccaggccatgctggggaaagccacgtgccgatgtgcctcagggtttacaggagaggactgccagtactcgacatctcatccatgctttgtgtctcgaccttgcctgaatggcggcacatgccatatgctcagccgggatacctatgagtgcacctgtcaagtcgggtttacaggtaaggagtgccaatggaccgatgcctgcctgtctcatccctgtgcaaatggaagtacctgtaccactgtggccaaccagttctcctgcaaatgcctcacaggcttcacagggcagaagtgtgagactgatgtcaatgagtgtgacattccaggacactgccagcatggtggcacctgcctcaacctgcctggttcctaccagtgccagtgccttcagggcttcacaggccagtactgtgacagcctgtatgtgccctgtgcaccctcgccttgtgtcaatggaggcacctgtcggcagactggtgacttcacttttgagtgcaactgccttccagaaacagtgagaagaggaacagagctctgggaaagagacagggaagtctggaatggaaaagaacacgatgagaattagacactggaaaatatgtatgtgtggttaataaagtgctttaaactgaattg

SEQ ID NO: 64730 - DNA, 2100 bp, Homo sapiens
gcggccgcggcggcggcggcggaggaggcgaccgagaagatacccgccctgcgccccgctctgctgtgggcgctgctggcgctctggctgtgctgcgcgacccccgcgcatgcattgcagtgtcgagatggctatgaaccctgtgtaaatgaaggaatgtgtgttacctaccacaatggcacaggatactgcaaatgtccagaaggcttcttgggggaatattgtcaacatcgagacccctgtgagaagaaccgctgccagaatggtgggacttgtgtggcccaggccatgctggggaaagccacgtgccgatgtgcctcagggtttacaggagaggactgccagtactcgacatctcatccatgctttgtgtctcgaccttgcctgaatggcggcacatgccatatgctcagccgggatacctatgagtgcacctgtcaagtcgggtttacaggtaaggagtgccaatggaccgatgcctgcctgtctcatccctgtgcaaatggaagtacctgtaccactgtggccaaccagttctcctgcaaatgcctcacaggcttcacagggcagaagtgtgagactgatgtcaatgagtgtgacattccaggacactgccagcatggtggcacctgcctcaacctgcctggttcctaccagtgccagtgccttcagggcttcacaggccagtactgtgacagcctgtatgtgccctgtgcaccctcgccttgtgtcaatggaggcacctgtcggcagactggtgacttcacttttgagtgcaactgccttccaggtaaggagctccctagtgtcccaggattaggggacaaacccctagcacaggaggtagtgggtgtggctcaattgctttttttaggaagcgcaaggaaaaagggaagtgagaattttgtgtggggtgggttgctagtgagggaggagttttatgggcccactgtggtccataaactgagcaggggataatttagcatgtcagggtttatgatgatgagtggctagaaaattgtttattgtcccttttgtagaaacagtgagaagaggaacagagctctgggaaagagacagggaagtctggaatggaaaagaacacgatgagaattagacactggaaaatatgtatgtgtggttaataaagtgctttaaactgaattgacattaacagtgggtgatcaactttactatgtgcttgtgcttttgcttttgatggagtaattcattgttttcttatccacctaaatgcacccagctgcccttgattttctctgggctactggccttcacaaccctctcccatgtaccctctctgactttggggtaaccctcccctaacttaaagctagagaattctgaaactgaggaggggatcctctgttaatcagtgagcactttttgatgagctgatagatgatatatgagagactatgcgtggcacaatactttgttacactcttcactgatacaagtgttctagagtgtacacacaacccaaagatagaaataaaaagaggagcagtgtcggggagcttggggcctggtgttccatggagagggagaaaggaacaagcttgaccaattcattcaactccttataaaaatgatgaggaggctgaaaaccaagaattttgattgggaacagaatacaagcagctgaatcagatgaattactaagccacaaagatcctgtttttatacaaatatccttagtacaaaaacaaaagaaggaaaactgtaggggggagtaatgtgctaagtaagcagaattgcctcaaaaagaagttgttctagttactctttcagagtgggaatcttagattctggtattgtggatatggttcacatataatgggattgtgtgttttattttggagggattaaaggtcatagtttggtcctcagtataaaatcaactggtaatttattcatttcatttggtaaaaatgtattgactgcctgctatgttctaggcaccatgctatgtatttggaatacagctatacaaagcattgtcacataattgaaatgaaaattttatattatttaagtcacaagaacaagctatttaattatattacttttagtttctct

SEQ ID NO: 64731 - DNA, 595 bp, Homo sapiens
cccagctcattgctccaggagagagaagagttcaaaaaataaagtaatcataaacttgaactctctccattctcttgttcccatttacaggtgaatctcttcctttaagccatttttgtctcctgtgaatacagccttatctccacctgtttcttagatcccatctcccctggcttattttttccattcattaccctctttgttccctttacttctcaacctgtgctatatacatgctgttctctctgttgagattgccttatttccatctaacattctctctcctgctattctgatttgtcattcacaactgatttcaagagtcaccttcaccaggaagtcttccttgaccaccatcattcctgcctgattagagggcttcctcatggtaatatgtgttctcaagttttcagtgtcaaggaatgccatcccagaagctcattctcagatgcacaacagccagaacagtctcaagcagcattctagagcttggaatttaagaactacgcattgcctataaagtgaaacataggctaatatagattaaattgaatattgaataaaaaatatatttatttatccacatctttgtatc

SEQ ID NO: 64732 - DNA, 559 bp, Homo sapiens
aacaggtggtgtttgtatatgagtaagttctttagtggtgatttgtgagattttggtgcactcatcacctgagcaatgtgcactgcatcctatttgttgtcttttactcctcactcccttcccacactttcccctggcttattttttccattcattaccctctttgttccctttacttctcaacctgtgctatatacatgctgttctctctgttgagattgccttatttccatctaacattctctctcctgctattctgatttgtcattcacaactgatttcaagagtcaccttcaccaggaagtcttccttgaccaccatcattcctgcctgattagagggcttcctcatggtaatatgtgttctcaagttttcagtgtcaaggaatgccatcccagaagctcattctcagatgcacaacagccagaacagtctcaagcagcattctagagcttggaatttaagaactacgcattgcctataaagtgaaacataggctaatatagattaaattgaatattgaataaaaaatatatttatttatccacatctttgtatc

SEQ ID NO: 64733 - DNA, 354 bp, Homo sapiens
gcaagttttttcaaattgtcacaaatctgctgggcatgttgctgtgcacctgtaatcctagccacttggtaggccaaggcaggaggattgcttgaacccaggcatttgaggctgtactgtgctatgttcacacctgggaatagtcactgcacctctagcctggacgatatatccttatatagcaagaccctatctcttaaaaaaaaaatcatttggccggctactgtggctcatggctgtaatcctagcactttgggaggttgaggtgggtggatcacttgagcccgagagttcgagatcagcctgggcaacatagtaagacccctgtatctacaagaaatagaagaaaaatta

SEQ ID NO: 64734 - DNA, 529 bp, Homo sapiens
atcatggcgctcctccatgcattttcaaaaaatatcaaaaaatatctaactgtataattagcataagaaaattccttataaacctctgacatttctcacgaggctacctcgaggcattttcagaaatatcaaatatcaggttcgttcctccacacagtgtcactgtcgttgttgtttttggtgcctgcttcctctgcatcctgggcatctggccctgggcttgcctcccgggcccaggaggggaggggagtggaggctttggagaaggcagaggctcagaggctggacgcctgggttctgtggagctcacgcctgtccacccttcctctccaggcccccgaagcttaccctgtctttgagccagtgccacctgtccctgaggcagcccagggtgacacagaggactcggagggtgcccccccactcaagcgcatctgcccaaatgcccctgacccctgagaagccggcctgcctgtcctgttgccccaggggcccctttggctttttacaaataaagacccttttgtaa

SEQ ID NO: 64735 - DNA, 859 bp, Homo sapiens
acgagagagggcgcggccaactccaggtgggacggcaggccgagagcgcggcgcccgggcctggcgcggagcctgagcccgccggacgggaggcggccccgccgcgggctcggccccggccccagccccgccagcatggccggccggactgtacgggccgagacccggagccgggccaaggatgacatcaagaaggtgatggcgaccatcgagaaggtccggagatgggagaagcgatgggtgactgtgggcgacacttcccttcgtatcttcaagtgggtgccagtggtggatccccaggaggaggagcgaaggcgggcaggtggcggggcagagagatcccgtggccgggaacgtcggggcaggggcgccagtccccgagggggtggccctctcatcctgctggatcttaatgatgagaacagcaaccagagtttccattcggaaggttccctgcaaaagggcacagagcccagtcctgggggcaccccccagcccagccgccctgtgtcacctgccggacccccagaaggggtccctgaggaggctcagcccccacggctgggccaagagagagatcccgggggcataactgctggcagcaccgacgaacccccaatgctgaccaaggaggagcctgttccagaactgctggaagctgaggcccccgaagcttaccctgtctttgagccagtgccacctgtccctgaggcagcccagggtgacacagaggactcggagggtgcccccccactcaagcgcatctgcccaaatgcccctgacccctgagaagccggcctgcctgtcctgttgccccaggggcccctttggctttttacaaataaagacccttttgtaa

SEQ ID NO: 64736 - DNA, 442 bp, Homo sapiens
aggctagtacgaggctggtggtgcaatgccgttggcgggaatgtcggggcagggcgccagtccccgagggggtggccctctcatcctgctggatcttaatgatgagaacagcaaccagagtttccattcggccccggccccagccccgccagcatggccggccggactgtacgggccgagacccggagccgggccaaggatgacatcaagaaggtgatggcgaccatcgagaaggtccggagatgggagaagcgatgggtgactgtgggcgacacttcccttcgtatcttcaagtgggtgccagtggtggatccccaggaggaggagcgaaggcgggcaggtggcggggcagagagatcccgtgacccctgagaagccggcctgcctgtcctgttgccccaggggcccctttggctttttacaaataaagacccttttgtaa

SEQ ID NO: 64737 - DNA, 537 bp, Homo sapiens
tcattttatttaagtaatgtacattttatttaagtcatgtgatggattttcacagaatacatatgcccagggaaccagcaccagattacacaacagaactggatcagctcccagaaggaggtgagagaggccagaaggctggactcctgggtcttggagggaatgggggatctgggcagtcgaaggcttggagcctgcgtcctgagggcctggaggagaggcagacctgggacagagctgaaggcttaggggctgggttcttgggatttctgtcctcttgcatttgcctgtggatttgcagttggtaatggcgttcttgcccggccctcctttgttcctccaggcagccaggcagctgtggcgtagtgaaagggcaggatgcgggataggaatggagttattcctgattcagactgatttgctctaactgtgatttggggcaagtcccttcccctgtctagaccttagctggctgccgcatctaaaaaatggagccaataatcttttcctcgtctttggggtcatccatctttcaac

SEQ ID NO: 64738 - DNA, 444 bp, Homo sapiens
  misc_feature (33)..(33): n is a, c, g, or t
  misc_feature (143)..(143): n is a, c, g, or t
aaactcctgacctcaggtgaatctgcccgtctnagtgccccaaagtgttgagattacaggtgtgagccactgcgcccagccatttattttaaattttttgaggaaccactatactgttttccatggtggctacaccatttttnactcccaccaacagtatctaagggtaccagtttctgtcctcttgcatttgcctgtggatttgcagttggtaatggcgttcttgcccggccctcctttgttcctccaggcagccaggcagctgtggcgtagtgaaagggcaggatgcgggataggaatggagttattcctgattcagactgatttgctctaactgtgatttggggcaagtcccttcccctgtctagaccttagctggctgccgcatctaaaaaatggagccaataatcttttcctcgtctttggggtcatccatctttcaac

SEQ ID NO: 64739 - DNA, 672 bp, Homo sapiens
  misc_feature (11)..(11): n is a, c, g, or t
  misc_feature (15)..(15): n is a, c, g, or t
aatctgaagtnggancggccgccgagaaggtccggagatgggagaagcgatgggtgactgtgggcgacacttcccttcgtatcttcaagtgggtgccagtggtggatccccaggaggaggagcgaaggcgggcaggtggcggggcagagagatcccgtggccgggaacgtcggggcaggggcgccagtccccgagggggtggccctctcatcctgctggatcttaatgatgagaacagcaaccagagtttccattcggaaggttccctgcaaaagggcacagagcccagtcctgggggcaccccccagcccagccgccctgtgtcacctgccggacccccagaaggggtccctgaggaggctcagcccccacggctgggccaagagagagatcccgggggcataactgctggcagcaccgacgaacccccaatgctgaccaaggaggagcctgttccagaactgctggaagctgaggcccccgaagcttaccctgtctttgagccagtgccacctgtccctgaggcagcccagggtgacacagaggactcggagggtgcccccccactcaagcgcatctgcccaaatgcccctgacccctgagaagccggcctgcctgtcctgttgccccaggggcccctttggctttttacaaataaagacccttttgtaa

SEQ ID NO: 64740 - DNA, 1182 bp, Homo sapiens
tcattttatttaagtaatgtacattttatttaagtcatgtgatggattttcacagaatacatatgcccagggaaccagcaccagattacacaacagaactggatcagctcccagaagctctcccctcgtcccctcccaaccctaagggcgatcactatcttgactttggtgcactataaattagttttgtctggttctgaacgtaatacacctggaaccatctagtatgtactgttgcatttggcttctgtcactcaagatttcatcatgcgacttgtctatgttgctgtgtgtagccgggcatgtcaatcccgttgctgtgtctatgtgcatggtagtgagtagggcatcattcattttccattctgttgatgggttatttccagtttggggctgttatgaaagggctctgaacattcccatgcaccctcttgatgctcacacctacacatttctgctgggtgttgacagcctaggagtggaactgctggatcacagaggtggcatatgttcggcttcattagaaaactgccagttttccaaaatgtctctaccaatttacactcccccagaaatacaagagaggtccagtcgctctactttctcgcctccacacggtgcggtctttttcactttagccattctggtggtggagacccactcgtattcgcagcgcatcccgggggcataactgctggcagcaccgacgaacccccaatgctgaccaaggaggagcctgttccagaactgctggaagctgaggaggtgagagaggccagaaggctggactcctgggtcttggagggaatgggggatctgggcagtcgaaggcttggagcctgcgtcctgagggcctggaggagaggcagacctgggacagagctgaaggcttaggggctgggttcttgggatttctgtcctcttgcatttgcctgtggatttgcagttggtaatggcgttcttgcccggccctcctttgttcctccaggcagccaggcagctgtggcgtagtgaaagggcaggatgcgggataggaatggagttattcctgattcagactgatttgctctaactgtgatttggggcaagtcccttcccctgtctagaccttagctggctgccgcatctaaaaaatggagccaataatcttttcctcgtctttggggtcatccatctttcaac

SEQ ID NO: 64741 - DNA, 881 bp, Homo sapiens
aggctagtacgaggctggtggtgcaatgccgttggcgggaatgtcggggcagggcgccagtccccgagggggtggccctctcatcctgctggatcttaatgatgagaacagcaaccagagtttccattcggccccggccccagccccgccagcatggccggccggactgtacgggccgagacccggagccgggccaaggatgacatcaagaaggtgatggcgaccatcgagaaggtccggagatgggagaagcgatgggtgactgtgggcgacacttcccttcgtatcttcaagtgggtgccagtggtggatccccaggaggaggagcgaaggcgggcaggtggcggggcagagagatcccgtggccgggaacgtcggggcaggggcgccagtccccgagggggtggccctctcatcctgctggatcttaatgatgagaacagcaaccagagtttccattcggaaggttccctgcaaaagggcacagagcccagtcctgggggcaccccccagcccagccgccctgtgtcacctgccggacccccagaaggggtccctgaggaggctcagcccccacggctgggccaagagagaggtaggaccaggtacctcccaggagctctctcctctaagtcctgtcttctccagagtctaacctaccagctcatccctatacctgctccccgtcttgtgcaccctcctcaaggcgccttccgactcctgcagaatctccctgtagctacagtctcattcctctggtctcttagaatctatacagacatatcactgtctgagattttcatgtaaattaattttttactagtttatctttctcctcactctcatgtcagtttcctgaatgttgggcccatattgatcct

SEQ ID NO: 64742 - DNA, 283 bp, Homo sapiens
ggatcccccagtggtggggccctccgagtctctgtgtccccaatgctgaccaaggaggagcctgttccagaactgctggaagctgaggcccccgaagcttaccctgtctttgagccagtgccacctgtccctgaggcagcccagggtgacacagaggactcggagggtgcccccccactcaagcgcatctgcccaaatgcccctgacccctgagaagccggcctgcctgtcctgttgccccaggggcccctttggctttttacaaataaagacccttttgtaa

SEQ ID NO: 64743 - DNA, 1727 bp, Homo sapiens
acgagagagggcgcggccaactccaggtgggacggcaggccgagagcgcggcgcccgggcctggcgcggagcctgagcccgccggacgggaggcggccccgccgcgggctcggccccggccccagccccgccagcatggccggccggactgtacgggccgagacccggagccgggccaaggatgacatcaagaaggtgatggcgaccatcgagaaggtccggagatgggagaagcgatgggtgactgtgggcgacacttcccttcgtatcttcaagtgggtgccagtggtggatccccaggaggaggagcgaaggcgggcaggtggcggggcagagagatcccgtggccgggaacgtcggggcaggggcgccagtccccgagggggtggccctctcatcctgctggatcttaatgatgagaacagcaaccagagtttccattcggaaggttccctgcaaaagggcacagagcccagtcctgggggcaccccccagcccagccgccctgtgtcacctgccggacccccagaaggggtccctgaggaggctcagcccccacggctgggccaagagagagatcccgggggcataactgctggcagcaccgacgaacccccaatgctgaccaaggaggagcctgttccagaactgctggaagctgagactatggaaatgatgttagacaaaaagcaaattcaagcgattttcttattcgagttaaaaatgggtcataaagcagtggagacacttcgcaacatcaacaacacacttggcccaggaactgctaatgaacatatagtacagtggtggttcaagaagttttgcaaagaagacaagagccttgaagatgagaagcatagtgtctggccatcggaagttgacaatgaccaactgaaagctctcattgaagctgatcctgttaaaactacacaagaagttgcccaagaactcaaccatcgaccattctatggccgtctggcatttgaagcaaattggaaaggtgaaaaagctcaataagtgggtgcctcatgaccttaccaaaaattaaaaaaatcgtcattttgaagtgtcatcttctcttattctatgcaacaacaacgaaccatttcttgatcagattgtgatgtgtgacaaaaagtcgattttatatgacaaccggcaacaaccagctctgtggctgtactgagaagcagctctaaagtacttcccaaagccaaccttgcaccaaaaaaaggtcacggtcactgtttggtggtctgctgctggtctgatccactgcaactttctgaatcccagtgaaaccattacatctgagaagtatgctcagcaaatcgatgagatgcaccaaaaactgcaaggcctgctgtggcactgctcaacagaaagggcccagttattctccatgacaacaaccacacatcgcataaccagcgcttcaaatattgaggccgggtgcggtggctcacgcctgtaatcccaacattttgggaggccaaggtggacggatcacttgaggtcaggagttcgagaacagcctggccaacatggtgaaacctgtctctactaaaaatacaaaaattagctgggtatggtagctggcgcctgtaatcccagctactcgagaggctgaggcaagagaactgcttgaacccggaaggtggaggttgcgatgagccaagattgtgccactgcactccagcctgggcgacagagtgagacttcatttc

SEQ ID NO: 64744 - DNA, 474 bp, Homo sapiens
aaaaagaaaacagcaaaataaagaaacacaacacagagtagacatatacaggaagagaccctcgacaaaaaagggcacagagcccagtcctgggggcaccccccagcccagccgccctgtgtcacctgccggacccccagaaggggtccctgaggaggctcagcccccacggctgggccaagagagaggtaggaccaggtacctcccaggagctctctcctctaagtcctgtcttctccagagtctaacctaccagctcatccctatacctgctccccgtcttgtgcaccctcctcaaggcgccttccgactcctgcagaatctccctgtagctacagtctcattcctctggtctcttagaatctatacagacatatcactgtctgagattttcatgtaaattaattttttactagtttatctttctcctcactctcatgtcagtttcctgaatgttgggcccatattgatcct

SEQ ID NO: 64745 - DNA, 947 bp, Homo sapiens
tcattttatttaagtaatgtacattttatttaagtcatgtgatggattttcacagaatacatatgcccagggaaccagcaccagattacacaacagaactggatcagctcccagaagctctcccctcgtcccctcccaaccctaagggcgatcactatcttgactttggtgcactataaattagttttgtctggttctgaacgtaatacacctggaaccatctagtatgtactgttgcatttggcttctgtcactcaagatttcatcatgcgacttgtctatgttgctgtgtgtagccgggcatgtcaatcccgttgctgtgtctatgtgcatggtagtgagtagggcatcattcattttccattctgttgatgggttatttccagtttggggctgttatgaaagggctctgaacattcccatgcaccctcttgatgctcacacctacacatttctgctgggtgttgacagcctaggagtggaactgctggatcacagaggtggcatatgttcggcttcattagaaaactgccagttttccaaaatgtctctaccaatttacactcccccagaaatacaagagaggtccagtcgctctactttctcgcctccacacggtgcggtctttttcactttagccattctggtggtggagacccactcgtattcgcagcgctttctgtcctcttgcatttgcctgtggatttgcagttggtaatggcgttcttgcccggccctcctttgttcctccaggcagccaggcagctgtggcgtagtgaaagggcaggatgcgggataggaatggagttattcctgattcagactgatttgctctaactgtgatttggggcaagtcccttcccctgtctagaccttagctggctgccgcatctaaaaaatggagccaataatcttttcctcgtctttggggtcatccatctttcaac

SEQ ID NO: 64746 - DNA, 776 bp, Homo sapiens
aggctagtacgaggctggtggtgcaatgccgttggcgggaatgtcggggcagggcgccagtccccgagggggtggccctctcatcctgctggatcttaatgatgagaacagcaaccagagtttccattcggccccggccccagccccgccagcatggccggccggactgtacgggccgagacccggagccgggccaaggatgacatcaagaaggtgatggcgaccatcgagaaggtccggagatgggagaagcgatgggtgactgtgggcgacacttcccttcgtatcttcaagtgggtgccagtggtggatccccaggaggaggagcgaaggcgggcaggtggcggggcagagagatcccgtggccgggaacgtcggggcaggggcgccagtccccgagggggtggccctctcatcctgctggatcttaatgatgagaacagcaaccagagtttccattcggaaggttccctgcaaaagggcacagagcccagtcctgggggcaccccccagcccagccgccctgtgtcacctgccggacccccagaaggggtccctgaggaggctcagcccccacggctgggccaagagagagatcccgccctcatacctgctgtcagctactgagtacccccaatgttgcccaacgaggacccttgttcagaactgctgcacgctgcggccctggagcttaccctgcctttgtgcacggccctgttcctgtgtcgcccacgtcgctacagttcacttcattctgcccccccctccatgcgccc

SEQ ID NO: 64747 - DNA, 616 bp, Homo sapiens
atggaaagtcagatgtttccattaattttcactctgggattatagaaagaaaaaaaactcgtctgcttgtttattagcgcacttagctccaggctaaacatgtgcatgtttacaaatctgcacagaaagctcatttattgtaatctgggagactctcactcaagcaggccacgctcttgtcctttctcctgggaacctggttcctacagagatgtctgtctcttctgccttccttcagggataaatgcacgaacgcaaatatgcaggctctagctgaatacacaaggctctgaatacaaggtgtgtattcacacacctattcaggccccctttcaaagagccaccacctgtatcatgtgtgtgtgttagatttttttctgtctctcctcaccaaggtctcttagaatggggacttgtcatcagcacctcggagccgagcctggcccagagaggccccttataatgaacactgaatggatgaatgaagctccatttgtaatcagcatgaagccaaataagtcatcagaatggcgcatgcttcattaagactgtgatcatatggcattttcataaggaagttacaagtcttaaaaggaccacaagtgacaaaaaaaaa

SEQ ID NO: 64748 - DNA, 552 bp, Homo sapiens
ggactttgcactctaaatatagaccccagcttgggacaaaagttgcagtagaaaaatagacataggagaacacttaaataagtgatgcatgtagacacagaaggggtatttaaaagacagaaataatagaagtacagaagaacagaaaaaaaactcagcagatggagattaccattcccaatgcctgaacttcctcctgctattaagattgctagagaattgtgtcttaaacagttcatgaacccagaagaatgcaatttcaatgtatttagtacacacacagtatgtatataaacacaactcacagaatatattttccatacattgggtaggtatgcactttgtgtatatataataatgtattttccatgcagttttaaaatgtagatatattaatatctggatgcattttctgtgcactggttttatatgccttatggagtatatactcacatgtagctaaatagactcaggactgcacattccttgtgtaggttgtgtgtgtgtggtggttttatgcataaataaagttttacatgtggtgaatatacg

SEQ ID NO: 64749 - DNA, 570 bp, Homo sapiens
tttttattcgcagttgccaaaatctggagacgagcaaaatgtccttcaatgtgtgaatggttacacagatcacggtacatcagtgccatggaacactattcagcactaagaaggaaaaactcttgatgcacaagcagctcagaggaatctccagggaatatggctgagtgacggaagtcagtcctaagggttacatagtatatgattccatttatacaatatccttgaaataacaaaattttagagatagaggaagattggtgatttcctggctttaagaatcatgcgagttgcaggtggatgtgcctgtaaagatcttcatggtgacagaaccattctgtgtcttgtttacggtggagatcactcaagtctgcatgtgatacagtgacatagacctacacaaacattgcaagagtgtcagtttcctggtgtggatattgtaccatagttcataagctgcagccattgggggaagctaggtgaaaggttcaggagaccttcttgtactatttttgtaacttcttatagatctataattatttcaaaataaaaagttttaaaaaggaccta

SEQ ID NO: 64750 - DNA, 2020 bp, Homo sapiens
agcgctggcagcaggcagcaggcagcaggcgggcgcgctgtggctccgcgccgcgcggtccgggctctgttcattcatgattggtactcggccctccgagacccagcccgagcgcagggaggggagccgagtgtgcggcaggaggggcgggcggacggcggctcccgcaccgcacgcggcgctggctcggcagcctcggccgggcggccgctctggccccgtgtccagtgccaggcaggcttcagggcaccgtcctcggccctgggcgagggaaccgccgggccgggtcctcgcgcggggaagcggttccgaaggctcgcggggagcggctagccctgagtccctgcatgtgcggggctgaagaaggaagccagaagcctcctagcctcgcctccacgcttgctgaataccaagctgcaggcgagctgccgggcgcttttctctcctccaattcagagtagacaaaccacggggatttctttccagggtaggggaggggccgggcccggggtcccaactcgcactcaagtcttcgctgccatgggggccgtcatgggcaccttctcatctctgcaaaccaaacaaaggcgaccctcgaaagataagattgaagatgagctggagatgaccatggtttgccatcggcccgagggactggagcagctcgaggcccagaccaacttcaccaagagggagctgcaggtcctttatcgaggcttcaaaaatgagtgccccagtggtgtggtcaacgaagacacattcaagcagatctatgctcagtttttccctcatggagatgccagcacgtatgcccattacctcttcaatgccttcgacaccactcagacaggctccgtgaagttcgaggactttgtaaccgctctgtcgattttattgagaggaactgtccacgagaaactaaggtggacatttaatttgtatgacatcaacaaggacggatacataaacaaagaggagatgatggacattgtcaaagccatctatgacatgatggggaaatacacatatcctgtgctcaaagaggacactccaaggcagcatgtggacgtcttcttccagaaaatggacaaaaataaagatggcatcgtaactttagatgaatttcttgaatcatgtcaggaggacgacaacatcatgaggtctctccagctgtttcaaaatgtcatgtaactggtgacactcagccattcagctctcagagacattgtactaaacaaccaccttaacaccctgatctgcccttgttctgattttacacaccaactcttgggacagaaacaccttttacactttggaagaattctctgctgaagactttctatggaacccagcatcatgtggctcagtctctgattgccaactcttcctctttcttcttcttgagagagacaagatgaaatttgagtttgttttggaagcatgctcatctcctcacactgctgccctatggaaggtccctctgcttaagcttaaacagtagtgcacaaaatatgctgcttacgtgcccccagcccactgcctccaagtcaggcagaccttggtgaatctggaagcaagaggacctgagccagatgcacaccatctctgatggcctcccaaaccaatgtgcctgtttctcttcctttggtgggaagaatgagagttatccagaacaattaggatctgtcatgaccagattgggagagccagcacctaacatatgtgggataggactgaattattaagcatgacattgtctgatgacccaaactgcccatgtcatttgtttccagaaacgaggaccaataattctctcacactggcatttgtgctggtagtacaagtcctttaatatgtccaggaagggagccattgcccagtggtccatatctccaccacatcccctgcttgagcccagcgctgcatgtccctcccaagaagtccagaatgcctgcaaattgctgtaattttataccatgttctaaccaataaacagaactatttcttacactctcaatca

SEQ ID NO: 64751 - DNA, 1633 bp, Homo sapiens
ggcttcaggggtgcatccgtcactcagggttcattcacccaggcaggctccaagttcctggggtgcacaaggtgggcactgtcccttctgggtgctgacagcagagcctggctcccctccgccaccatgagcggctgctccaaaagatgcaagcttgggttcgtgaaatttgcccagaccatctttaagctcatcactgggaccctcagcaaagataagattgaagatgagctggagatgaccatggtttgccatcggcccgagggactggagcagctcgaggcccagaccaacttcaccaagagggagctgcaggtcctttatcgaggcttcaaaaatgagtgccccagtggtgtggtcaacgaagacacattcaagcagatctatgctcagtttttccctcatggagatgccagcacgtatgcccattacctcttcaatgccttcgacaccactcagacaggctccgtgaagttcgaggactttgtaaccgctctgtcgattttattgagaggaactgtccacgagaaactaaggtggacatttaatttgtatgacatcaacaaggacggatacataaacaaagaggagatgatggacattgtcaaagccatctatgacatgatggggaaatacacatatcctgtgctcaaagaggacactccaaggcagcatgtggacgtcttcttccagaaaatggacaaaaataaagatggcatcgtaactttagatgaatttcttgaatcatgtcaggaggacgacaacatcatgaggtctctccagctgtttcaaaatgtcatgtaactggtgacactcagccattcagctctcagagacattgtactaaacaaccaccttaacaccctgatctgcccttgttctgattttacacaccaactcttgggacagaaacaccttttacactttggaagaattctctgctgaagactttctatggaacccagcatcatgtggctcagtctctgattgccaactcttcctctttcttcttcttgagagagacaagatgaaatttgagtttgttttggaagcatgctcatctcctcacactgctgccctatggaaggtccctctgcttaagcttaaacagtagtgcacaaaatatgctgcttacgtgcccccagcccactgcctccaagtcaggcagaccttggtgaatctggaagcaagaggacctgagccagatgcacaccatctctgatggcctcccaaaccaatgtgcctgtttctcttcctttggtgggaagaatgagagttatccagaacaattaggatctgtcatgaccagattgggagagccagcacctaacatatgtgggataggactgaattattaagcatgacattgtctgatgacccaaactgcccatgtcatttgtttccagaaacgaggaccaataattctctcacactggcatttgtgctggtagtacaagtcctttaatatgtccaggaagggagccattgcccagtggtccatatctccaccacatcccctgcttgagcccagcgctgcatgtccctcccaagaagtccagaatgcctgcaaattgctgtaattttataccatgttctaaccaataaacagaactatttcttacactctcaatca

SEQ ID NO: 64752 - DNA, 822 bp, Homo sapiens
gcatgagtctccggcagggctgtgaaggtttccgggaagccagccaatcattcccaacggaaactcagtagcggcattttcaactggataaactggccttagtcccgccttctcgttccagagttttgtgcgaaggaaaccgatggggatcggaaccgtagcggttgagctgctgctgctacggatatctgacagaagccttcggtggttgtcggcctaatgagcggacggcaaagaacgctttttcagacgtggggctcaagtatctcccgatcatctgggactccgggttgcagctccggaactgagcgacctcagagccctggcagctccaaggcgcctttgccagcagcagcggaggctcagctggagtcggacgatgatgtgttgcttgtcgcggcgtacgaggctgagcggcagttgtgtctagagaatggcgggttctgcacctccgcgggcgccctgtggatttaccctaccaattgcccagtgcgggactaccagctgcacatttcccgggctgctctgttttgcaatacgctggtgtgtctgcctaccggactgggaaagacctttattgccgccgtggtcatgtacaatttctaccgctggttcccttcaggaaaggtggtcttcatggccccaacgaaacccttggtgacacagcagatcgaggcttgctaccaggtgatgggtatcccgcaatcccacatggccgaaatgacagggtctacacaagcttccaccaggaaggaaatatggtgcagtaagagagtgctttttcttacacctcaggtcatggtaaatgacctttctagagga

SEQ ID NO: 64753 - DNA, 388 bp, Homo sapiens
aaggcgggattagcgtttgctctcaaaataggtacatcgacaaaagtgtccattctcattcttctaaagttgtatcaaacattgaaagtataaagagaatacctgaaactcatcatgacattctaactagtatttaacaggttaaggcagaatactttcttattaatttaccaataatagacaatttggtgtcaaaatgaaatgcccacaaataacataaggtatttagtaagtaataaaatctacttaactgtgggagctatgcaattcatgaagagctacatggtactagcaggtgagtaagttggcttccacacctcaaacattcattttgaactaataaagagcatattaacttgatttttagcattaaaaatactgaatgtta

SEQ ID NO: 64754 - DNA, 506 bp, Homo sapiens
ctgtaatcccagcactttgaaaggctgaggcaggcagatggcttgagccaagagtttgagaccaacctgggcaacatggtgaaaccctgtctctactaaaaatacaaaaattatctgggcggggtggtgtgcacctatagtcccagctacttgggagactgagggtggggaagatcacttgagccccaggatatcgagggctgcagtgagctttgatcatgcccccacccactacagtctaaatgacaagagggagatcctgcctacaaaagaaaaaggggaaaaaaaaagaaatatgttcttcttcatatatgtgctgcattttcccaagaaattagtattgacagtgtagacataatattccagaaatagtttataagccactgtagaaaatttttcagatttttctccagttactcttctttttgaccaaatatagcatgatccattgagccacatatttttatcatcagatttcctgcaaatcccttttgcctatttcttta

SEQ ID NO: 64755 - DNA, 338 bp, Homo sapiens
ctgctatagaatgtttcctggagaaaggtacggtttttagtaataagataaatttactttagtcctgcaaataaggtgaaatcttatgtccagtatctcacaaaggagaactgacagtgccacttttatatttaatgtcaatctcattagacaaaaatgaaatatagttcctagggtttccaatttaaaaagtgaaataataaatatattcactcaaacattttctcagtgccatatgcaagttaccatgtcccagaagctgatacagtttgaagaaggaaatatataagtactgtaagcctgtgataactaaaagcaacatactaaaaagtgaaggt

SEQ ID NO: 64756 - DNA, 1194 bp, Homo sapiens
  misc_feature (176)..(176): n is a, c, g, or t
  misc_feature (1187)..(1194): n is a, c, g, or t
agacaatttcctcaatcgtcctggctcaaaatgagccaagaattcaagcagacaatctactcaaaaggaatccatttcctctcttggccacacatcagttgtctgaaaacagttggcctgtggcgatgcctcactccaactgccacactgatccacacatcttgtgtccaaagcanaacacaagtgtccatgggaggttgcacaacacagagccaagagatgcctgtgtcctccactgagcattccacaggggaaggggcctggtaaaaggaaaaggatggaggcagtgtttgttgagcgctgtggtgggtgtgaacccacaagcccgcaggggaaccagaactctcatgggctccttcagggctggggtggggcctcttagaggtcccagggcctgtgcacgggcccccatggcatagggacaggaggcagccctcctctcctcttggcatagttcctccccccgtcaatgttcacatcaccaaacacattctgtctaaggtggggtcatcaggaccacaggcactggttgctctgggaactactgcctcatagcattttattttgctcatgactcaagataatcaggattttaggaaagacccagctaggaaggtcccaggaggtgcaggccgggagtggctgggaccaccatcatctacaccatgactgggctccctgataatgaggagggggttttataatggatttattcagaggtaattcacacactgtaggattcacccatttaagcatacaagtcaatgactttagtatattcatagaattttatatccaaaccacaatcaattttacaacatttttgttaccctaaaaagaaacctcaaactttttagcctttatatgccaatttctccatcccctttcagccctagggaggagccactaacgtgctttctccacagatgtccctcttctgggcattgcacgtaaacggaatcgctgtgtgtgatctcctgtgtctggttcctctcacttagcatgttcccaaggttcctcctgtctgtagcctgtatcactacttcatttatttttattacaaataataacctgttgtatgcatataccatattttatttatccactcattaattaatgagaagtagggttattttggctactgttttggctttttggctgtttttaataaatactgttacgatcannnnnnnn

SEQ ID NO: 64757 - DNA, 413 bp, Homo sapiens
  misc_feature (362)..(362): n is a, c, g, or t
ctgctccttatgtttttatttccaaagtttagaatttctttgcttcatagtattattttattttactaaattacagagtaagaaaagcttttcattttatctgattttattcttagaacaaaaatattacgatcttctatatttttgttcttttgccaaaaagtgtaggcaattttacatcatcttttttcccaatcagtttgtgatccaactataaaaaggagacatagaatactgaataaatgaaacagaaactccaaggccaagaagtgtccatcttgaaagagtgttagtggcaagatatgtgactgcagactagatgtagacaaacctgagaaaaaccaagcatgggggaaaggatncctattttaataaatggtgctggggaaaactggctagccatatgtacttta

SEQ ID NO: 64758 - DNA, 318 bp, Homo sapiens
aatacctccctcttgtcaaccacatgtaatccattagaaagtttcattgggtctgtctctcaaatatgcctagaaactgctcatttctctccagttccatgactactgactctgaatcattccccttcacttgatctattaaaatagccttttaatgggctgtctgctttcactctcactgcccctccaatctgtgcctcacactaccctccgagtgatcactgtatgtatatttcccctagacatatgctttaaccctggcttcagccctgtaggaactggctgctctttacctctccttccaatctcatctgaagg

SEQ ID NO: 64759 - DNA, 445 bp, Homo sapiens
gcttccacaacatttttacttaggctacctcattggatcataacatcaacttggtgagaaaggcaggacagatattttatcctgtgaataagattttagctcaaatgggctacaacaagactaagataggagagtggcaaaatcatagtagtccagtgatgttcttatatcaatcaattatcattcaataaatgcttattattgttgtaggctagtcactgtgctaaatattgtaactgaattaccttattgaactcttacaacaatctcatgatatagtactattattattattgtacccatttatggataaactgaggcacagtgaagttagccacacagctagtaagggccagcactgggattttgggtcaggcagtgtgagttcacagccaaagctctcaatgtggcctaactactgctctatatttttagggtgtccttt

SEQ ID NO: 64760 - DNA, 463 bp, Homo sapiens
tgttaagcaaaaaatgtactggaaagatattcttactttccatcagtctatttattataggaaagggaggttgagatcgatcctttaactgtagtgaaagctatagttcttgaaattaagagtaattttataataaaagtgtaaatgttaataattggctccctgtatttagggatgctttttttaatggcctaaataagaattagtgtattgctacaccagtgccacaacagctgatgtttggttatggtttagtgaggatttttgtggttttgaggagatgtcacatgtaaatttgacatacatattgcaaaattttaaaagctgacttgttgcaatgttttaaaattatatttaaaaattatagaaaaagtttcaggaatttcacagttagacatttctttgctggggtttttgtttagcgagaggctaattttaggtgtttttaaaagatacaaactaa

SEQ ID NO: 64761 - DNA, 214 bp, Homo sapiens
gaaaatattaaatattttatatccagggtgacttcccacctccccttttgtctagaaatgcattcctcttgagggaatcccctaggagcaaagcaaagaaggctgtggcttatgtgtgtaatcccagcactttgggaggccaaggcaggaggatcactggagcccaggagtttaagcaccaatctgggcaacataacaagacctcctctctaca

SEQ ID NO: 64762 - DNA, 572 bp, Homo sapiens
gttttaagaacattttcgcaaagaggaaatgacagctctccagcgtataggatattcaataaaggatgtaagagaactgtttatccatttgaaaattaaagttatatatccatgtcataccacatgcaaaacacagctgccagctaaatatttaatgtttaaagtattttaaaaatcaagaaaatataagcaagtatttatataacctaggggatgaaaacctttctaagcatgacaccaaggaagaaaccaaagataagaagatggatttggcaataaaaagaaaacttagaggtggcaaaaacactaagcagtaaaatgagaaaatacatttgcaacatactttctctttaatttgaagggctaattttctcaatataaagaatttttagaaattagtaagaaattccaacatccaacagaaatataggttaaggaaaaatataatttactaaaggaatgtatcgctaaatacatttaaaaagctcagcagtaataacacaaatgatactgattttttacctattattaaaaatactgcaacttatggtgtcaacattgtcatattaaaa

SEQ ID NO: 64763 - DNA, 344 bp, Homo sapiens
atatgatttttgaaacagttgatttaggtaacactccagtcatgaataaggagtctcgtaagttgaagagggctagataaatatggttagtgcaagagatattcttattccggagaggttatttggggatgaggttcagaattcctctcaggctttcagtggttaaataaaagaagattttggctctcggtggccaaccttccagcacatttgggcttctagaacaacttctccattcctaggaggagcggagtaccctgtggttttaccctctcatgcactcatttacttgtcattgcaatcctgagaaatagacaatattcatattgtacctaagacactaa

SEQ ID NO: 64764 - DNA, 2182 bp, Homo sapiens
  misc_feature (331)..(331): n is a, c, g, or t
  misc_feature (347)..(347): n is a, c, g, or t
  misc_feature (406)..(406): n is a, c, g, or t
  misc_feature (517)..(517): n is a, c, g, or t
  misc_feature (638)..(638): n is a, c, g, or t
  misc_feature (839)..(839): n is a, c, g, or t
  misc_feature (997)..(997): n is a, c, g, or t
  misc_feature (1081)..(1081): n is a, c, g, or t
  misc_feature (1368)..(1368): n is a, c, g, or t
  misc_feature (1703)..(1703): n is a, c, g, or t
tgagaaaaattctcgctctgtcacccaggctggagtgcaatgacacaatctcggctcactgcaacctccgcctcctgggttcaagtgattctcctgcctcagcctcccaagtagctggaattacaggcacccgccaccttgcctggctaatttttttgtacttttagtagagacgaggtttcaccatgttggccaggctggtcttgaactcctcacctcaggtgatctgcccgccttggcctcctcaagtgctaggattacaggtgtgagccaccatgcccagccaaaagtattatttaaaaaagtttttcttacttgtattttaggttcngggatacatgtgtacnttagttatatatttgcctgtcacaggggtttggtgtacagataattttgtcacctgggnaataagcatagtacccaatagataattttctgatcctctccctcctcccgctctccaccctcaagcaggccttggtgtctgctgttcccctcctagtttccatgtgttctngttgttaagctgtcacttctgagtaagaatatgtggtatttgtttttctgttcctgtgttagtttgcttaggatcatggcctccaactttgtccatgttgctgggaaagacatgatcttgntcctttatatggctgcatagtattccattgtgtatatgtaccacattttctttatccagtctaccattgatgggcattaggttgattccatgtctgtgctgttctgaatagtagaacaccattcatcccctcactgttagttgaacatctgcaaaatgctgggtaatgtggggtgctgaaacacaaagatgaaagagacangagcagtacctttgaataatctataacctggttatctctacgatgattttggcaagaacgtgcagatgcatacacatatacacaaaatgctgcacatctttcagcatcatacaaattttgtagaagaatggccaatccctaaattagatcagtgcaanccaaatgccttctcttcccactttaatgtttgaaagatacatcattcagtttttgattctgaagatttaatatgcaccagcttntgtttctggttaagtgattttcattatcctcgaaggctagtcaaataacaaagcaatttagtaatggcaaaagcataaagtgtggaccagaggggtcttcaaaatattagggaagatagagcagaaaaccatttttttcagtttgttgttataaaattatacacacactctgagtcaccaaacacattggaggttgataaggaacataggagtagtcacgggtcctaattctgcagtacgtggctatgcgggtatgaactcttcataaatacaatgtgatgatgacnttgcatttgcatttctcttcctcctttctctcactcccagtcttagatacccgattgttccataaatcttgtcttaagagaaaggcatatcctataaactcattcatgtgaaggtatttgcattagcagtgttggtcttggatcactttgcaaacaacccttccctgaaaatgagaagtccaatcaaggagcttcctgaagtataaaacttttttaactaagtaataacatttaggtgcattcatcctcatgattttttaatgtaaatactggctctgacacagtgccacattcttagatattaggctaattgtgctttgctgtgccagtctctnggtgaatgtaatgtttaattacatttccagaagaaagctgagttctattttatgattaggagttttatttgatgtctgaaatataattggaaatacttgcagataccctatctgtgtttgaagtggcactcaatcatccataagaaataccatatgtccatttcaaatattaggtgttttacatgaaggaatacatgatgataacaatatttcttcaacatatcttcattttacctaagtgcgtaggagagctcttttagtaattacaaagtaaggtgaaaatagtcatccctactgggtagagaccttttattttaaaagggggagtggctaagctcagagataagatggagccacatatgaacaatatgctcatagataaagctatgaatttgatggaaaatatgaacaatatagtgttaagtgaaaatagacaaaatgatatatgtaacttaatgtcaattttatgaaaaaaaaaa

SEQ ID NO: 64765 - DNA, 559 bp, Homo sapiens
gggggaggagtgatcatggctacctcagagctgagctgcgaggtgtcggaggagaactgtgagcgccgggaggccttctgggcagaatggaaggatctgacactgtccacacggcccgaggagggcaaggaggagcgtgaggacacccccatccagcttcaggagctgctggcgctggagacagccctgggtggccagtgtgtggaccgccaggaggtggctgagatcacaaagcagctgccccctgtggtgcctgtcagcaagcccggtgcccttcgtcgctccctgtcccgctccatgtcccaggaagcacagagaggctgagagggactgtgacttgggctccgctgtgcccgccctgggctgggcccttcctggctaggactgtggaggggagctgctggccatggctgctttgtagtttgcccagagttgggggctaggggaggggggagccagaggccaggatgcctgagccccctgagttcccaaagggagggtggcagagacagtggcaccctctgttagtgccgcaataaatgctcaatcatgtgccaga

SEQ ID NO: 64766 - DNA, 793 bp, Homo sapiens
gggggaggagtgatcatggctacctcagagctgagctgcgaggtgtcggaggagaactgtgagcgccgggaggccttctgggcagaatggaaggatctgacactgtccacacggcccgaggagggctgctccctgcatgaggaggacacccagagacatgagacctaccaccagcaggggcagtgccaggtgctggtgcagcgctcgccctggctgatgatgcggatgggcatcctcggccgtgggctgcaggagtaccagctgccctaccagcgggtactgccgctgcccatcttcacccctgccaagatgggcgccaccaaggaggagcgtgaggacacccccatccagcttcaggagctgctggcgctggagacagccctgggtggccagtgtgtggaccgccaggaggtggctgagatcacaaagcagctgccccctgtggtgcctgtcagcaagcccggtgcccttcgtcgctccctgtcccgctccatgtcccaggaagcacagagaggctgagagggactgtgacttgggctccgctgtgcccgccctgggctgggcccttcctgctgaggaccctcagccccaggagaagggacaaaaggtactggtgagggcaagaggtgcctgggaggagtggccctgatccaggaaaatgtgaggggaatctggaacgctctaggcagaagaagctgggagggagggggaggtgaaaagggcagaggcaaggatggtggggcccccagcaccctctgttagtgccgcaataaatgctcaatcatgtgccaga

SEQ ID NO: 64767 - DNA, 964 bp, Homo sapiens
gggggaggagtgatcatggctacctcagagctgagctgcgaggtgtcggaggagaactgtgagcgccgggaggccttctgggcagaatggaaggatctgacactgtccacacggcccgaggagggctgctccctgcatgaggaggacacccagagacatgagacctaccaccagcaggggcagtgccaggtgctggtgcagcgctcgccctggctgatgatgcggatgggcatcctcggccgtgggctgcaggagtaccagctgccctaccagcgggtactgccgctgcccatcttcacccctgccaagatgggcgccaccaaggaggagcgtgaggacacccccatccagcttcaggagctgctggcgctggagacagccctgggtggccagtgtgtggaccgccaggaggtggctgagatcacaaagcagctgccccctgtggtgcctgtcagcaagcccggtgcccttcgtcgctccctgtcccgctccatgtcccaggaagcacagagaggctgagagggactgtgacttgggctccgctgtgcccgccctgggctgggcccttcctggctaggactgtggaggggagctgctggccatggctgctttgtagtttgcccagagttgggggctaggggaggggggagccagaggccaggatgcctgagccccctgagttcccaaagggagggtggcagagacagtgggcactaagggtggagagttgggggccagcacagctgaggaccctcagccccaggagaagggacaaaaggtactggtgagggcaagaggtgcctgggaggagtggccctgatccaggaaaatgtgaggggaatctggaacgctctaggcagaagaagctgggagggagggggaggtgaaaagggcagaggcaaggatggtggggcccccagcaccctctgttagtgccgcaataaatgctcaatcatgtgccaga

SEQ ID NO: 64768 - DNA, 681 bp, Homo sapiens
gggggaggagtgatcatggctacctcagagctgagctgcgaggtgtcggaggagaactgtgagcgccgggaggccttctgggcagaatggaaggatctgacactgtccacacggcccgaggagggctgctccctgcatgaggaggacacccagagacatgagacctaccaccagcaggggcagtgccaggtgctggtgcagcgctcgccctggctgatgatgcggatgggcatcctcggccgtgggctgcaggagtaccagctgccctaccagcgggtactgccgctgcccatcttcacccctgccaagatgggcgccacggagggggaggtgaaaagggcagaggcaaggatggtggggcccccagcaccctctgttagtgccgcaataaatgctcaatcatgtgccagagaaaacaaaatgacgagtccctacgacgaaaaaacactacgttggttggggcacgctaggagcacctcagaaaaagcgtttgttaaaacccagttcggtgggggcagagcgcgccccgtacggcacaggtgaacatggggcataacggccccaagaagaacggggccagaaaaaggcggggctccacccaaaaaaacgccggcgtaaccggcgtgggacaacccaaaggagaggcgaggcaggggtcatcaaggagcaaggacgataatg

SEQ ID NO: 64769 - DNA, 353 bp, Homo sapiens
  misc_feature (330)..(330): n is a, c, g, or t
  misc_feature (340)..(340): n is a, c, g, or t
caatacctccaatcaaaaatcttacccaggttatgctatgaaacaaaaacttgctttagaaatcaatacagaagagtccagaaggcttgtttaatgcttctaagacttttcagtgggttagtctaaatgataagtgtatttttaaaatttttaataaaaatgtataatttttaagtaaacctttctgttaacagtcttgattagaggattttaattatgcttagagataatacatctgtatcttctgtggaatttggtgttgattgcacctatgatttgctgctaccatcttgtgtggaaggaggtgtctttgggccatggatgggaggngagtccgggnaggctgagctact

SEQ ID NO: 64770 - DNA, 493 bp, Homo sapiens
gccagagccacccagctggcctcggggatgcaggcggtatgtgttctgggctctcacgaagctaagaaactctaaatccaaggtgacatcgtggcacaccgccacctgcttcagggggacacaggggacaaggaggagctattggcagagcgctcggttcctgcaagttccaacttctgctaaaattggttaattggttcctttgcatgattcagggcacacaggcttctctgtccacaaaatttgctcgcctgcacacccagagaaatggacttggcttggtttttctgaacttttgcctctgcggaatcagcagtggacgtgtgagctggggcctctgtccctgtcatgtgaggaggtcaggcaggacaagcaggaagcactgggcaatgagtcaggaggcctggtggggagcttgggtgagtctgttttcctctctggacctcagtcttctcctctggttgatgtaataaaatcctacaaactgaaaatt

SEQ ID NO: 64771 - DNA, 153 bp, Homo sapiens
tagacggagtctcactctgttgtccaggctggagtgcagtggcacaatctcagctcgctgcaacactctgagcaaagaataagtaataaggttagaattctttagaagtgttaaggggaaagaaggtaacaacaacaaaaactcctccacatc

SEQ ID NO: 64772 - DNA, 735 bp, Homo sapiens
tggtatttactgtttcccaagtataagacctattaatattccatagaacaacttctgatgtttcagacttgactctgaaaataatctgagtatggactgcactgtgctattcctgtgcaacaattaccacagagtgaaacctttactgctttttctcaaggttcagacctgtggtacattattctaaaggtatagacaagaaacagttccaaggaggataagactaaatctctgaatattagacctgacagaggccttaggagttatcatctctttccattaacatatgaagaagctagagtctacagggattgagaactggctccaagatcataagatcttagaaagtggctgtcctgctgccctctcattaccagacttgacaatggtgcctcagcaggatggcatttcagaggcaacccatcttgcacaacctggaattctctggaggtctagtccagggccaccaggtggaaggctaaggaggaacagctatgagcactgcaggagaccgcctcaggatactcttgttctctcctcttgctttgctgtttttgttctccaaatgaccatcatcgtcagaagacaattttgaccacgaaatgtttgtagtgagaatatcaggcaggtgtctgatattccatggtttacagtttattccaggcaggtttatgtttccttgctaatacacgtacaattttacaactactgtattaacaggcatttacaacaaac

SEQ ID NO: 64773 - DNA, 868 bp, Homo sapiens
gtcatccttccagggtgagggaagcggattttcccgtattttcatttcagctgttcctgggcatcctgaactttgcactccagtctgagggctccaaagaatggctgccatggcaaccgtttccatgtttttgtcaccaagggactcaacactcagtgtgaactctgggtggggggagccctccagcccagagaagtggctgggccgagtgtatttgactgtgcagacagaggtcaccgtggcaactgagtgccccttagctaagcaatgggggagccacccccagcatccctgagagccccgctttcctctccccaggactgagctgaatacgaatgagctcgggatatggctgtttctgccgtgctggacacctcggaccccttgtacagctgtggtgtccccagccagcatgggctggagcagcccaacaaggatgctgcagaaggcaccctgggctggggctccaggagagctcagctttgatcccaggctccgagcatctgttggtgctgtgtgctgaatggtgtcccaacaaattcctctgttgaaaccttacaccttaaccccctggacttcacagggtgactttacttggagatagggtctttaaagtataattaactacccattaaaatttttaaaaatgttaagtataattaagatgaggtcattagggtgggccctatgacctgtgtccttgtaagaggagatgaggacacagacacacagagggaagaccctgtaaggacacgagaaggtggccatctacaagccaggagaggacttggaggaaagcaaccctaccgacaccttgatcttggacttccagactccagagctgtgagaaatacatttctgtggtttc

SEQ ID NO: 64774 - DNA, 240 bp, Homo sapiens
ttttgccaagtatatgtagtgcaaatattttctttcagtctgtagcttgcctttttattttcttaatgggtatctttcaaaaaaatggaagttttaagtttgaatggaattcagtttgtcttttaaagcttgtgctttttgtgttcaactaagggatattagcttaccattttttttggttgaatattatgtgtttatagacaagaaatggtcactaaagcaaaataactgaaaattatc

SEQ ID NO: 64775 - DNA, 556 bp, Homo sapiens
actttataaaaacggagacgtgacggtggggacgtgaccacagcactaatctcaccacacatcacaccatcagaagcgtccagtccagaataatgggacagcctacgaagatacatctgctgggccagctcagaggttctggctcacgggatgatgaagatatgaaaatttgactatggcactgacaagcccagatggcacctccaggagctccccatgccctcctctgaggtgaagtgttcagaggctggacgattttctacttatctttgtatcttcagaatcccaccccaggctcagcatgcagtagttgttggaaaagtctctgtggatatgcaagctcctgggaaggtttgactgctgtaatttctgcagcatattcactgtccacccaagggacacatccatgggcctgctctcagtgactgtgacttcttccacatctaggaacctctcttcaactccttcctgtgcccagattcacattattcacttaagtaaatcaaagctgatttaaatggatgttttcaagaacttggatgttttgtggccactg

SEQ ID NO: 64776 - DNA, 401 bp, Homo sapiens
tataaatacactaacttttatctattatttatctgaagttcaaatttaactgtgtcttttgttatctctcaactccgatgcatgggaaccttggtgttcttctgtccaagcttagctccaactacctccagagacccattggagaaagacaccagtttttgagccaactactacaattcttataatgtggataccattgtgtcttaaagtcagtttttttcttattattcttgtgtccaaaatgacggtaaaacacaaacaatatgactgtgctgatacgtgttggtggcacctattaattatttggttctggcactgaagataaatatgtgtatttatgagattaatcttttagctcgagaataacaaccacttaataaaatatacaattttgcttttat

SEQ ID NO: 64777 - DNA, 356 bp, Homo sapiens
atttatagaagggattttattttacatatatatatatatatatatatatatatatatttgtgtccatatatatatacatgtttatctcatagaatcttatctggtagataagaaaaagttaggtccctttcctacaaatatatttctatcagcattgtttctagttctataacactagaaatagcataaatatctgataattaagagattttaaaaaatgtattcttacattcaatcagatttatttaccttcctagtgcatactaggtactagccaggtacagaggacacaaaaatgaataaaatagaccatatctctatgtgttagcaatttagaacaggggaactagtcatgg

SEQ ID NO: 64778 - DNA, 329 bp, Homo sapiens
cagagtgaaacctcatctaaaaaataaagcaaacatgtttataatagctgtctttataatggtgacagtgtggaaaaacccaggtgacaatatggaaagagtaaattatgacattaacatgttgagatgctacgtaattattaatattagaaaagacctatcaaccgacgggtgcggtggctcacacctgtaatcccagactttgggaggcggaggcaggtggatcacctgaggtcaggagtttgagaccagcctgcccaacatggtaaaaccctctctactaaaaatacaaaatttatctgggcttggtggtgggcacttgtaatccc

SEQ ID NO: 64779 - DNA, 581 bp, Homo sapiens
tccctgaaagaagacattggtgattccccaggtctcctacaactctgaaattttgattccaggcaatccatggggcagactttttatccttatttgacagatagagaagatgtcatggccctgtaagtcaagagaacaggatggccaaaggcaagaagaaaaagacactggaaggggcccctttctccttcagagagcctcgttcttacacaagggccaagaaacaggacatctaaggacttggaagccccaggcacgtgacccccggcctctctgttctccagctaaggaacgctttatggccttcgcatttattcatgtatttcctggacctactttgtactaggccaagggaagtgagctgaataagacccagcggggttgagagacataaaaatggcttattgaaattcaatactccaagggctggaagagatggatgagtagcgagccggaggagcacaaaggcaggagtcccgctgtctgcctagggaatgcttgaggaaataagaatagcccacatttattaagcacacagtacaagcaagcactctattaaatgccttacatgatgtaaaaaa

SEQ ID NO: 64780 - DNA, 409 bp, Homo sapiens
  misc_feature (8)..(8): n is a, c, g, or t
  misc_feature (21)..(21): n is a, c, g, or t
  misc_feature (38)..(38): n is a, c, g, or t
aaccccgntggcggcccgccnctaggaaacctaggggnatcccccccgggcttgccaggaaattcggccacggagcatatcattcactctctttctatctgctttatcaaccaagctgacactttgccttttatcataccaaagaagatacatttcacttgtacatgatttacacattctgcctacaaatgagaggatatgaaaaacaagatcatgcacccctgttcttcacaaaacatatttaaattatatcattggttttgaattgtctcctaattttttagatctttgcattttttatgttcttaggaataaatggctatgggtcaattttaggatttactgctttccagaagtaatccacaaccatttattgcaaataaaggaaagtaaaaaatacaaaaataca

SEQ ID NO: 64781 - DNA, 155 bp, Homo sapiens
ggaaaacactggtagatctgagtgtgtaaagattttaacttctgctcatgaaaatatagcaaaagcaaaatttaaaggcaaacaaactaggaaaatatcagagaggttttatacacttaatatataaaacattcatgtaggctgataagaaaaac

SEQ ID NO: 64782 - DNA, 348 bp, Homo sapiens
cccattcccactcccatctcccctccctacagtccctggcatccattaatccaccttctatcactacagatttgcctgtcctgaacatctcacagaaatggaatcacacatgtggcctcctgcacctggcttccttgatgcagcctcatgttttctagatttttccatgctgtagtctcagggcttcactccttcctgcggctgattaatggagacttgtttatgtcatgcacacaccttcacatgcgtccactcacactcacaagtcatcaaagagctcaagcagcaggcaaggctcaggagaggcactctgagggacaggatgatgggcccggctgtttccaaaac

SEQ ID NO: 64783 - DNA, 303 bp, Homo sapiens
tctaagagagggtaaagtctgaggtgaccttattttaggaatttcaataggtgaagatctgtcttcatcttgaaacaagacagcaaagtcttcatcttcaaacaggcctgaagttaattcgctttgaggtgggataaagcaaccagaatttttataagatgaagaaaatccagctttatggaggaatgggaaagttccactttgagagggatgctgtggaatcatgattggagaatgacctgtgctgtaactttcaggacgaggatgaaggaaatcttttaaatctttacataattggcccct

SEQ ID NO: 64784 - DNA, 1932 bp, Homo sapiens
tggtgttgggttcagaattttattttttgtttacaccattatatccgatcatatataaatacaaacaaaaacttcaccaaatattactttctttttctaatggtgtgtgtgttttggacaggatctctgtccctcagactggagtgcagtggtgatttctgctcactgcagcctcaaactcccagctcaagcgatcctcccacttcagccttccgagtagctggaaccacaggcacccacatgatgcccagctaatttttgtatttttggtagagatggggtcgcattagattgcccaggctggtctcgacctcccttgctcacatgatcctcccgccgcggcctccgagcggctgggatcaggcgttaatcaccgcgcccgggctttatatttcgttttgaaaatgctgagatggacgcaaagggctgagtgctcagtgtcccccagtcaccctcagttgcagcttccgtccaaagaaggaatcgccctctccctgctggggccactaacagcactaacacggtccgaatggcatcggcaaagctcgggaacggcgacagatgggaagacgcgtgggagcctgggggatctcgggagagccgcgcaaactcgcggcggacgcagccagcacccgcagccagcacccgcacactcccacccataccccgcgcagcccgccaagactctctggcccgcacctctatggtaggaaacccagaaaacaggaagtggcctcgagagggggaagggaggggcggggcctccgccaccacctcagctgcggaccgaggcgagatggcggccaccgagggggtcggggaggctgcgcaagggggcgagcccgggcagccggcgcaacccccgccccagccgcacccaccgccgccccagcagcagcacaaggaagagatggcggccgaggctggggaagccgtggcgtcccccatggacgacgggtttgtgagcctggactcgccctcctatgtcctgtacagggacagagcagaatgggctgatatagatccggtgccgcagaatgatggccccaatcccgtggtccagatcatttatagtgacaaatttagagatgtttatgattacttccgagctgtcctgcagcgtgatgaaagaagtgaacgagcttttaagctaacccgggatgctattgagttaaatgcagccaattatacagtgtggcatttccggagagttcttttgaagtcacttcagaaggatctacatgaggaaatgaactacatcactgcaataattgaggagcagcccaaaaactatcaagtttgaaattagccgggtgtggtggcgtgcctgtaatcccagctactcaaggagcgtgcctgtaatcccagctactcaaggagcgtgcctgtaatcccagctactcaggaggctgtcaggataatcacttgaacctgggagggtggaggtccggtgagctgagattgcaccactgcactccagcctgggggaccgagttagactctgtctcaaaaacaactaacaataaaacctacattacaaactaaaaactttaaacacaaaaacaaacacgccgcaggcaccaatgccagagagcgaaaacgacgcacacgaaagtggccaagtgcaataacggttacgaaccaggtttcttgtccccgtggataactggcggacccataaagaccgaaataatccggaaagccggggccgtagccgaccgtggcgcgacggaggagcaacacagcagagcgcacggacaaacgagaaggaagagagacagagagccagcacaacaacggcagacaggcggaagcgaacgacagatacagcagacacaaccgacaggcaaagagaacgaacagctgcagaacagcacgaacaagcgaggcgcacgcagcaccgacggagcagacaagctagcacgcacgacc

SEQ ID NO: 64785 - DNA, 2329 bp, Homo sapiens
tggtgttgggttcagaattttattttttgtttacaccattatatccgatcatatataaatacaaacaaaaacttcaccaaatattactttctttttctaatggtgtgtgtgttttggacaggatctctgtccctcagactggagtgcagtggtgatttctgctcactgcagcctcaaactcccagctcaagcgatcctcccacttcagccttccgagtagctggaaccacaggcacccacatgatgcccagctaatttttgtatttttggtagagatggggtcgcattagattgcccaggctggtctcgacctcccttgctcacatgatcctcccgccgcggcctccgagcggctgggatcaggcgttaatcaccgcgcccgggctttatatttcgttttgaaaatgctgagatggacgcaaagggctgagtgctcagtgtcccccagtcaccctcagttgcagcttccgtccaaagaaggaatcgccctctccctgctggggccactaacagcactaacacggtccgaatggcatcggcaaagctcgggaacggcgacagatgggaagacgcgtgggagcctgggggatctcgggagagccgcgcaaactcgcggcggacgcagccagcacccgcagccagcacccgcacactcccacccataccccgcgcagcccgccaagactctctggcccgcacctctatggtaggaaacccagaaaacaggaagtggcctcgagagggggaagggaggggcggggcctccgccaccacctcagctgcggaccgaggcgagatggcggccaccgagggggtcggggaggctgcgcaagggggcgagcccgggcagccggcgcaacccccgccccagccgcacccaccgccgccccagcagcagcacaaggaagagatggcggccgaggctggggaagccgtggcgtcccccatggacgacgggtttgtgagcctggactcgccctcctatgtcctgtacagcttccgagctgtcctgcagcgtgatgaaagaagtgaacgagcttttaagctaacccgggatgctattgagttaaatgcagccaattatacagtgtggcatttccggagagttcttttgaagtcacttcagaaggatctacatgaggaaatgaactacatcactgcaataattgaggagcagcccaaaaactatcaagtttggcatcataggcgagtattagtggaatggctaagagatccatctcaggagcttgaatttattgctgatattcttaatcaggatgcaaagaattatcatgcctggcagcatcgacaatgggttattcaggaatttaaactttgggataatgagctgcagtatgtggaccaacttctgaaagaggatgtgagaaataactctgtctggaaccaaagatacttcgttatttctaacaccactggctacaatgatcgtgctgtattggagagagaagtccaatacactctggaaatgattaaactagtaccacataatgaaagtgcatggaactatttgaaagggattttgcaggatcgtggtctttccaaatatcctaatctgttaaatcaattacttgatttacaaccaagtcatagttccccctacctaattgcctttcttgtggatatctatgaagacatgctagaaaatcagtgtgacaataaggaagacattcttaataaagcattagagttatgtgaaatcctagctaaagaaaaggacactataagaaaggaatattggagatacattggaagatcccttcaaagcaaacacagcacagaaaatgactcaccaacaaatgtacagcaataacaccatccagaagaacttgatggaatgcttttattttttattaagggaccctgcaggagtttcacacgagagtggtccttccctttgcctgtggtgtaaaagtgcatcacacaggtattgctttttaacaagaactgatgctccttgggtgctgctgctactcagactagctctaagtaatgtgattcttctaaagcaaagtcattggatgggaggaggaagaaaaagtcccataaaggaacttttgtagtcttatcaacatataatctaatcccttagcatcagctcctccctcagtggtacatgcgtcaagatttgtagcagtaataactgcaggtcacttgtatgtaatggatgtgaggtagccgaagtttggttcagtaagcagggaatacagtcgttccatcagagctggtctgcacactcacattatcttgctatcactgtaaccaactaatgccaaaagaacggttttgtaataaaattatagctgtatct

SEQ ID NO: 64786 - DNA, 1601 bp, Homo sapiens
tggtgttgggttcagaattttattttttgtttacaccattatatccgatcatatataaatacaaacaaaaacttcaccaaatattactttctttttctaatggtgtgtgtgttttggacaggatctctgtccctcagactggagtgcagtggtgatttctgctcactgcagcctcaaactcccagctcaagcgatcctcccacttcagccttccgagtagctggaaccacaggcacccacatgatgcccagctaatttttgtatttttggtagagatggggtcgcattagattgcccaggctggtctcgacctcccttgctcacatgatcctcccgccgcggcctccgagcggctgggatcaggcgttaatcaccgcgcccgggctttatatttcgttttgaaaatgctgagatggacgcaaagggctgagtgctcagtgtcccccagtcaccctcagttgcagcttccgtccaaagaaggaatcgccctctccctgctggggccactaacagcactaacacggtccgaatggcatcggcaaagctcgggaacggcgacagatgggaagacgcgtgggagcctgggggatctcgggagagccgcgcaaactcgcggcggacgcagccagcacccgcagccagcacccgcacactcccacccataccccgcgcagcccgccaagactctctggcccgcacctctatggtaggaaacccagaaaacaggaagtggcctcgagagggggaagggaggggcggggcctccgccaccacctcagctgcggaccgaggcgagatggcggccaccgagggggtcggggaggctgcgcaagggggcgagcccgggcagccggcgcaacccccgccccagccgcacccaccgccgccccagcagcagcacaaggaagagatggcggccgaggctggggaagccgtggcgtcccccatggacgacgggtttgtgagcctggactcgccctcctatgtcctgtacagggacagagcagaatgggctgatatagatccggtgccgcagaatgatggccccaatcccgtggtccagatcatttatagtgacaaatttagagatgtttatgattacttccgagctgtcctgcagcgtgatgaaagaagtgaacgagcttttaagctaacccgggatgctattgagttaaatgcagccaattatacagtgtggcatttccggagagttcttttgaagtcacttcagaaggatctacatgaggaaatgaactacatcactgcaataattgaggagcagcccaaaaactatcaagtttggcatcataggcgagtattagtggaatggctaagagatccatctcaggagcttgaatttattgctgatattcttaatcaggatgcaaagaattatcatgcctggcagcatcgacaatgggttattcaggaatttaaactttgggataatgagctgcagtatgtggaccaacttctgaaagaggatgggaaaaaaaaacttttgttgggaacccaaaaaaaccttcggatttttttaaaaccactgggttaaaaaaatccgggcctttttgggaaaagaaaaatcccacgtgggaattctc

SEQ ID NO: 64787 - DNA, 2395 bp, Homo sapiens
tggtgttgggttcagaattttattttttgtttacaccattatatccgatcatatataaatacaaacaaaaacttcaccaaatattactttctttttctaatggtgtgtgtgttttggacaggatctctgtccctcagactggagtgcagtggtgatttctgctcactgcagcctcaaactcccagctcaagcgatcctcccacttcagccttccgagtagctggaaccacaggcacccacatgatgcccagctaatttttgtatttttggtagagatggggtcgcattagattgcccaggctggtctcgacctcccttgctcacatgatcctcccgccgcggcctccgagcggctgggatcaggcgttaatcaccgcgcccgggctttatatttcgttttgaaaatgctgagatggacgcaaagggctgagtgctcagtgtcccccagtcaccctcagttgcagcttccgtccaaagaaggaatcgccctctccctgctggggccactaacagcactaacacggtccgaatggcatcggcaaagctcgggaacggcgacagatgggaagacgcgtgggagcctgggggatctcgggagagccgcgcaaactcgcggcggacgcagccagcacccgcagccagcacccgcacactcccacccataccccgcgcagcccgccaagactctctggcccgcacctctatggtaggaaacccagaaaacaggaagtggcctcgagagggggaagggaggggcggggcctccgccaccacctcagctgcggaccgaggcgagatggcggccaccgagggggtcggggaggctgcgcaagggggcgagcccgggcagccggcgcaacccccgccccagccgcacccaccgccgccccagcagcagcacaaggaagagatggcggccgaggctggggaagccgtggcgtcccccatggacgacggggacagagcagaatgggctgatatagatccggtgccgcagaatgatggccccaatcccgtggtccagatcatttatagtgacaaatttagagatgtttatgattacttccgagctgtcctgcagcgtgatgaaagaagtgaacgagcttttaagctaacccgggatgctattgagttaaatgcagccaattatacagtgtggcatttccggagagttcttttgaagtcacttcagaaggatctacatgaggaaatgaactacatcactgcaataattgaggagcagcccaaaaactatcaagtttggcatcataggcgagtattagtggaatggctaagagatccatctcaggagcttgaatttattgctgatattcttaatcaggatgcaaagaattatcatgcctggcagcatcgacaatgggttattcaggaatttaaactttgggataatgagctgcagtatgtggaccaacttctgaaagaggatgtgagaaataactctgtctggaaccaaagatacttcgttatttctaacaccactggctacaatgatcgtgctgtattggagagagaagtccaatacactctggaaatgattaaactagtaccacataatgaaagtgcatggaactatttgaaagggattttgcaggatcgtggtctttccaaatatcctaatctgttaaatcaattacttgatttacaaccaagtcatagttccccctacctaattgcctttcttgtggatatctatgaagacatgctagaaaatcagtgtgacaataaggaagacattcttaataaagcattagagttatgtgaaatcctagctaaagaaaaggacactataagaaaggaatattggagatacattggaagatcccttcaaagcaaacacagcacagaaaatgactcaccaacaaatgtacagcaataacaccatccagaagaacttgatggaatgcttttattttttattaagggaccctgcaggagtttcacacgagagtggtccttccctttgcctgtggtgtaaaagtgcatcacacaggtattgctttttaacaagaactgatgctccttgggtgctgctgctactcagactagctctaagtaatgtgattcttctaaagcaaagtcattggatgggaggaggaagaaaaagtcccataaaggaacttttgtagtcttatcaacatataatctaatcccttagcatcagctcctccctcagtggtacatgcgtcaagatttgtagcagtaataactgcaggtcacttgtatgtaatggatgtgaggtagccgaagtttggttcagtaagcagggaatacagtcgttccatcagagctggtctgcacactcacattatcttgctatcactgtaaccaactaatgccaaaagaacggttttgtaataaaattatagctgtatct

SEQ ID NO: 64788 - DNA, 2434 bp, Homo sapiens
tggtgttgggttcagaattttattttttgtttacaccattatatccgatcatatataaatacaaacaaaaacttcaccaaatattactttctttttctaatggtgtgtgtgttttggacaggatctctgtccctcagactggagtgcagtggtgatttctgctcactgcagcctcaaactcccagctcaagcgatcctcccacttcagccttccgagtagctggaaccacaggcacccacatgatgcccagctaatttttgtatttttggtagagatggggtcgcattagattgcccaggctggtctcgacctcccttgctcacatgatcctcccgccgcggcctccgagcggctgggatcaggcgttaatcaccgcgcccgggctttatatttcgttttgaaaatgctgagatggacgcaaagggctgagtgctcagtgtcccccagtcaccctcagttgcagcttccgtccaaagaaggaatcgccctctccctgctggggccactaacagcactaacacggtccgaatggcatcggcaaagctcgggaacggcgacagatgggaagacgcgtgggagcctgggggatctcgggagagccgcgcaaactcgcggcggacgcagccagcacccgcagccagcacccgcacactcccacccataccccgcgcagcccgccaagactctctggcccgcacctctatggtaggaaacccagaaaacaggaagtggcctcgagagggggaagggaggggcggggcctccgccaccacctcagctgcggaccgaggcgagatggcggccaccgagggggtcggggaggctgcgcaagggggcgagcccgggcagccggcgcaacccccgccccagccgcacccaccgccgccccagcagcagcacaaggaagagatggcggccgaggctggggaagccgtggcgtcccccatggacgacgggtttgtgagcctggactcgccctcctatgtcctgtacagggacagagcagaatgggctgatatagatccggtgccgcagaatgatggccccaatcccgtggtccagatcatttatagtgacaaatttagagatgtttatgattacttccgagctgtcctgcagcgtgatgaaagaagtgaacgagcttttaagctaacccgggatgctattgagttaaatgcagccaattatacagtgtggcatttccggagagttcttttgaagtcacttcagaaggatctacatgaggaaatgaactacatcactgcaataattgaggagcagcccaaaaactatcaagtttggcatcataggcgagtattagtggaatggctaagagatccatctcaggagcttgaatttattgctgatattcttaatcaggatgcaaagaattatcatgcctggcagcatcgacaatgggttattcaggaatttaaactttgggataatgagctgcagtatgtggaccaacttctgaaagaggatgtgagaaataactctgtctggaaccaaagatacttcgttatttctaacaccactggctacaatgatcgtgctgtattggagagagaagtccaatacactctggaaatgattaaactagtaccacataatgaaagtgcatggaactatttgaaagggattttgcaggatcgtggtctttccaaatatcctaatctgttaaatcaattacttgatttacaaccaagtcatagttccccctacctaattgcctttcttgtggatatctatgaagacatgctagaaaatcagtgtgacaataaggaagacattcttaataaagcattagagttatgtgaaatcctagctaaagaaaaggacactataagaaaggaatattggagatacattggaagatcccttcaaagcaaacacagcacagaaaatgactcaccaacaaatgtacagcaataacaccatccagaagaacttgatggaatgcttttattttttattaagggaccctgcaggagtttcacacgagagtggtccttccctttgcctgtggtgtaaaagtgcatcacacaggtattgctttttaacaagaactgatgctccttgggtgctgctgctactcagactagctctaagtaatgtgattcttctaaagcaaagtcattggatgggaggaggaagaaaaagtcccataaaggaacttttgtagtcttatcaacatataatctaatcccttagcatcagctcctccctcagtggtacatgcgtcaagatttgtagcagtaataactgcaggtcacttgtatgtaatggatgtgaggtagccgaagtttggttcagtaagcagggaatacagtcgttccatcagagctggtctgcacactcacattatcttgctatcactgtaaccaactaatgccaaaagaacggttttgtaataaaattatagctgtatct

SEQ ID NO: 64789 - DNA, 2232 bp, Homo sapiens
tggtgttgggttcagaattttattttttgtttacaccattatatccgatcatatataaatacaaacaaaaacttcaccaaatattactttctttttctaatggtgtgtgtgttttggacaggatctctgtccctcagactggagtgcagtggtgatttctgctcactgcagcctcaaactcccagctcaagcgatcctcccacttcagccttccgagtagctggaaccacaggcacccacatgatgcccagctaatttttgtatttttggtagagatggggtcgcattagattgcccaggctggtctcgacctcccttgctcacatgatcctcccgccgcggcctccgagcggctgggatcaggcgttaatcaccgcgcccgggctttatatttcgttttgaaaatgctgagatggacgcaaagggctgagtgctcagtgtcccccagtcaccctcagttgcagcttccgtccaaagaaggaatcgccctctccctgctggggccactaacagcactaacacggtccgaatggcatcggcaaagctcgggaacggcgacagatgggaagacgcgtgggagcctgggggatctcgggagagccgcgcaaactcgcggcggacgcagccagcacccgcagccagcacccgcacactcccacccataccccgcgcagcccgccaagactctctggcccgcacctctatggtaggaaacccagaaaacaggaagtggcctcgagagggggaagggaggggcggggcctccgccaccacctcagctgcggaccgaggcgagatggcggccaccgagggggtcggggaggctgcgcaagggggcgagcccgggcagccggcgcaacccccgccccagccgcacccaccgccgccccagcagcagcacaaggaagagatggcggccgaggctggggaagccgtggcgtcccccatggacgacgggtttgtgagcctggactcgccctcctatgtcctgtacagcatttccggagagttcttttgaagtcacttcagaaggatctacatgaggaaatgaactacatcactgcaataattgaggagcagcccaaaaactatcaagtttggcatcataggcgagtattagtggaatggctaagagatccatctcaggagcttgaatttattgctgatattcttaatcaggatgcaaagaattatcatgcctggcagcatcgacaatgggttattcaggaatttaaactttgggataatgagctgcagtatgtggaccaacttctgaaagaggatgtgagaaataactctgtctggaaccaaagatacttcgttatttctaacaccactggctacaatgatcgtgctgtattggagagagaagtccaatacactctggaaatgattaaactagtaccacataatgaaagtgcatggaactatttgaaagggattttgcaggatcgtggtctttccaaatatcctaatctgttaaatcaattacttgatttacaaccaagtcatagttccccctacctaattgcctttcttgtggatatctatgaagacatgctagaaaatcagtgtgacaataaggaagacattcttaataaagcattagagttatgtgaaatcctagctaaagaaaaggacactataagaaaggaatattggagatacattggaagatcccttcaaagcaaacacagcacagaaaatgactcaccaacaaatgtacagcaataacaccatccagaagaacttgatggaatgcttttattttttattaagggaccctgcaggagtttcacacgagagtggtccttccctttgcctgtggtgtaaaagtgcatcacacaggtattgctttttaacaagaactgatgctccttgggtgctgctgctactcagactagctctaagtaatgtgattcttctaaagcaaagtcattggatgggaggaggaagaaaaagtcccataaaggaacttttgtagtcttatcaacatataatctaatcccttagcatcagctcctccctcagtggtacatgcgtcaagatttgtagcagtaataactgcaggtcacttgtatgtaatggatgtgaggtagccgaagtttggttcagtaagcagggaatacagtcgttccatcagagctggtctgcacactcacattatcttgctatcactgtaaccaactaatgccaaaagaacggttttgtaataaaattatagctgtatct

SEQ ID NO: 64790 - DNA, 2380 bp, Homo sapiens
tggtgttgggttcagaattttattttttgtttacaccattatatccgatcatatataaatacaaacaaaaacttcaccaaatattactttctttttctaatggtgtgtgtgttttggacaggatctctgtccctcagactggagtgcagtggtgatttctgctcactgcagcctcaaactcccagctcaagcgatcctcccacttcagccttccgagtagctggaaccacaggcacccacatgatgcccagctaatttttgtatttttggtagagatggggtcgcattagattgcccaggctggtctcgacctcccttgctcacatgatcctcccgccgcggcctccgagcggctgggatcaggcgttaatcaccgcgcccgggctttatatttcgttttgaaaatgctgagatggacgcaaagggctgagtgctcagtgtcccccagtcaccctcagttgcagcttccgtccaaagaaggaatcgccctctccctgctggggccactaacagcactaacacggtccgaatggcatcggcaaagctcgggaacggcgacagatgggaagacgcgtgggagcctgggggatctcgggagagccgcgcaaactcgcggcggacgcagccagcacccgcagccagcacccgcacactcccacccataccccgcgcagcccgccaagactctctggcccgcacctctatggtaggaaacccagaaaacaggaagtggcctcgagagggggaagggaggggcggggcctccgccaccacctcagctgcggaccgaggcgagatggcggccaccgagggggtcggggaggctgcgcaagggggcgagcccgggcagccggcgcaacccccgccccagccgcacccaccgccgccccagcagcagcacaaggaagagatggcggccgaggctggggaagccgtggcgtcccccatggacgacgggtttgtgagcctggactcgccctcctatgtcctgtacagggacagagcagaatgggctgatatagatccggtgccgcagaatgatggccccaatcccgtggtccagatcatttatagtgacaaatttagagatgtttatgattacttccgagctgtcctgcagcgtgatgaaagaagtgaacgagcttttaagctaacccgggatgctattgagttaaatgcagccaattatacagtgtggcatttccggagagttcttttgaagtcacttcagaaggatctacatgaggaaatgaactacatcactgcaataattgaggagcagcccacatctcaggagcttgaatttattgctgatattcttaatcaggatgcaaagaattatcatgcctggcagcatcgacaatgggttattcaggaatttaaactttgggataatgagctgcagtatgtggaccaacttctgaaagaggatgtgagaaataactctgtctggaaccaaagatacttcgttatttctaacaccactggctacaatgatcgtgctgtattggagagagaagtccaatacactctggaaatgattaaactagtaccacataatgaaagtgcatggaactatttgaaagggattttgcaggatcgtggtctttccaaatatcctaatctgttaaatcaattacttgatttacaaccaagtcatagttccccctacctaattgcctttcttgtggatatctatgaagacatgctagaaaatcagtgtgacaataaggaagacattcttaataaagcattagagttatgtgaaatcctagctaaagaaaaggacactataagaaaggaatattggagatacattggaagatcccttcaaagcaaacacagcacagaaaatgactcaccaacaaatgtacagcaataacaccatccagaagaacttgatggaatgcttttattttttattaagggaccctgcaggagtttcacacgagagtggtccttccctttgcctgtggtgtaaaagtgcatcacacaggtattgctttttaacaagaactgatgctccttgggtgctgctgctactcagactagctctaagtaatgtgattcttctaaagcaaagtcattggatgggaggaggaagaaaaagtcccataaaggaacttttgtagtcttatcaacatataatctaatcccttagcatcagctcctccctcagtggtacatgcgtcaagatttgtagcagtaataactgcaggtcacttgtatgtaatggatgtgaggtagccgaagtttggttcagtaagcagggaatacagtcgttccatcagagctggtctgcacactcacattatcttgctatcactgtaaccaactaatgccaaaagaacggttttgtaataaaattatagctgtatct

SEQ ID NO: 64791 - DNA, 1087 bp, Homo sapiens
tggtgttgggttcagaattttattttttgtttacaccattatatccgatcatatataaatacaaacaaaaacttcaccaaatattactttctttttctaatggtgtgtgtgttttggacaggatctctgtccctcagactggagtgcagtggtgatttctgctcactgcagcctcaaactcccagctcaagcgatcctcccacttcagccttccgagtagctggaaccacaggcacccacatgatgcccagctaatttttgtatttttggtagagatggggtcgcattagattgcccaggctggtctcgacctcccttgctcacatgatcctcccgccgcggcctccgagcggctgggatcaggcgttaatcaccgcgcccgggctttatatttcgttttgaaaatgctgagatggacgcaaagggctgagtgctcagtgtcccccagtcaccctcagttgcagcttccgtccaaagaaggaatcgccctctccctgctggggccactaacagcactaacacggtccgaatggcatcggcaaagctcgggaacggcgacagatgggaagacgcgtgggagcctgggggatctcgggagagccgcgcaaactcgcggcggacgcagccagcacccgcagccagcacccgcacactcccacccataccccgcgcagcccgccaagactctctggcccgcacctctatggtaggaaacccagaaaacaggaagtggcctcgagagggggaagggaggggcggggcctccgccaccacctcagctgcggaccgaggcgagatggcggccaccgagggggtcggggaggctgcgcaagggggcgagcccgggcagccggcgcaacccccgccccagccgcacccaccgccgccccagcagcagcacaaggaagagatggcggccgaggctggggaagccgtggcgtcccccatggacgacgggtttgtgagcctggactcgccctcctatgtcctgtacagggacagagcagaatgggctgatatagatccggtgccgcagaatgatggccccaatcccgtggtccagatcccaatttttttatttaggggg

SEQ ID NO: 64792 - DNA, 1609 bp, Homo sapiens
cctccatccacacggtttccttaagcagagcttttctcctcctcttctctgctagtgaagcactgcttaccctcctagcctacagcaagccctgccctgccccatctttctacccaatttctcgctcttctgtttcacactcatttctttttactttggactaattgtggctgttgggactttggcttgattgctaaaatactttacttgtacttcctgatgatacaaacaatcctgcccacttcctctgccagatattgcacccactcgtcaggatttgtgcgtccttgactctgccccacccagtgctcccagcaggggcaggtgcaggaagctcactaggtggagatgttggaattggtttttcttgcagacaaagacctgcggaccaagggcttcagcctagagtcgtgccgcagcatggtgaacctcatggatcgtgatggcaatgggaagctgggcctggtggagttcaacatcctgtggaaccgcatccggaattacctggtaggttgtccccactcacctcagtcatgcaggtgcgggccgggcaggtgggaagggccgggtgactcagcctggccctcaccctctgccgccacctcagtccatcttccggaagtttgacctggacaagtcgggcagcatgagtgcctacgagatgcggatggccattgagtcggcaggcttcaagctcaacaagaagctgtacgagctcatcatcacccgctactcggagcccgacctggcggtcgactttgacaatttcgtttgctgcctggtgcggctagagaccatgttccgatttttcaaaactctggacacagatctggatggagttgtgacctttgacttgtttaagtggttgcagctgaccatgtttgcatgaggcagggactcggtcccccttgccgtgctcccctccctcctcgtctgccaagcctcgcctcctaccacaccacaccaggccaccccagctgcaagtgccttccttggagcagagaggcagcctcgtcctcctgtcccctctcctcccagccaccatcgttcatctgctccgggcagaactgtgtggcccctgcctgtgccagccatgggctcgggatggactccctgggccccacccattgccaagccaggaaggcagctttcgcttgttcctgcctcgggacagccccgggtttccccagcatcctgatgtgtcccctctccccacttcagaggccacccactcagcaccaccggcctggccttgcctgcagactataaactataaccactagctcgacacagtctgcagtccaggcgtgtggagccgcctcccggctcggggaggccccggggctgggaacgcctgtgccttcctgcgccgaagccaacgccccctctgtccttccctggccctgctgccgaccaggagctgcccagcctgtgggcggtcggccttccctccttcgctccttttttatattagtgattttaaaggggactcttcagggacttgtgtactggttatgggggtgccagaggcactaggcttggggtggggaggtcccgtgttccatatagaggaaccccaaataataaaaggccccacatctgtctgtga

SEQ ID NO: 64793 - DNA, 648 bp, Homo sapiens
  misc_feature (23)..(23): n is a, c, g, or t
ttcatgtgtctgtccccgggtantgatatgtcgaccagcctcgccacgcgtcggcctcctgtcccctctcctcccagccaccatcgttcatctgctccgggcagaactgtgtggcccctgcctgtgccagccatgggctcgggatggactccctgggccccacccattgccaagccaggaaggcagctttcgcttgttcctgcctcgggacagccccgggtttccccagcatcctgatgtgtcccctctccccacttcagaggccacccactcagcaccaccggcctggccttgcctgcagactataaactataaccactagctcgacacagtctgcagtccaggcgtgtggagccgcctcccggctcggggaggccccggggctgggaacgcctgtgccttcctgcgccgaagccaacgccccctctgtccttccctggccctgctgccgaccaggagctgcccagcctgtgggcggtcggccttccctccttcgctccttttttatattagtgattttaaaggggactcttcagggacttgtgtactggttatgggggtgccagaggcactaggcttggggtggggaggtcccgtgttccatatagaggaaccccaaataataaaaggccccacatctgtctgtga

SEQ ID NO: 64794 - DNA, 486 bp, Homo sapiens
ctgcagtgagtagggttgttacattttacagatgaggaaactgaggcaaaatgtcttgttagggtcacacaggctgtgagtgagccatgccccagctctccagccccttggccaggacaaggagcctggagtctgggtctgggggtggcccctgagggtgggctgagtgggcagctgcagccctgctccctcctccctcccaccagctggtgggccagccggccgtacacttgaagcgtgacttcttcctggccaatgcgtctcgggcgcgctcagagcagttcatcaacctgcgagaggtcagcacccggggcggtcggccttccctccttcgctccttttttatattagtgattttaaaggggactcttcagggacttgtgtactggttatgggggtgccagaggcactaggcttggggtggggaggtcccgtgttccatatagaggaaccccaaataataaaaggccccacatctgtctgtga

SEQ ID NO: 64795 - DNA, 3642 bp, Homo sapiens
  misc_feature (59)..(59): n is a, c, g, or t
  misc_feature (81)..(81): n is a, c, g, or t
cgcagcgagcccggtccccctgtcgttccccggggagcgctgagccggaccggcgtggntggggaaggggagtggcgcggncctgcggggtgaggctgccgtttgctgagtgtccggcaggggtctgctcgctgccagcccggcccctcctcagagcagctgccgcagcccgaggtaatctcggccccgcgccggggctggctgggaacggcgggagcagcttcggtcgcgcggagcgaggggagctggggaccgggcgggcccgggggctgcgggaggcggcgccgccgcacaatcgccccggaatgcccgccagggcgcgcgtggggtgcggccgtcccgccctcaacttcgactgctgcccctgtttaaaaataccccttgcccgcccctccccctcgtttccccgcgtgcccttccgccgcgccccagcccccgcatgtccccccgcgctggcccctccccggggactgctctgccttttactaatttgtcctctcgcggaattggcccccggcctgcggagggaggggcggggagacaccgtgagtaagagatagtcagagaccgtgccggagagataagggagagccgagaggaagcggggtaggagccccaggaggaggaggaggagaaggagagagggagggcggagggcggaggggcggcgggaggagggcggggaggagcgctcttcctggttgggccctgccctgagctgccaccgggaagccagcctcagggactgcagcgacccccaaacacccctcccccaggatgtcggaggagatcatcacgccggtgtactgcactggggtgtcagcccaagtgcagaagcagcgggccagggagctgggcctgggccgccatgagaatgccatcaagtacctgggccaggattatgagcagctgcgggtgcgatgcctgcagagtgggaccctcttccgtgatgaggccttccccccggtaccccagagcctgggttacaaggacctgggtcccaattcctccaagacctatggcatcaagtggaagcgtcccacggaactgctgtcaaacccccagttcattgtggatggagctacccgcacagacatctgccagggagcactgggggactgctggctcttggcggccatcgcctccctcactctcaacgacaccctcctgcaccgagtggttccgcacggccagagcttccagaatggctatgccggcatcttccatttccagctgtggcaatttggggagtgggtggacgtggtcgtggatgacctgctgcccatcaaggacgggaagctagtgttcgtgcactctgccgaaggcaacgagttctggagcgccctgcttgagaaggcctatgccaaggtaaatggcagctacgaggccctgtcagggggcagcacctcagagggctttgaggacttcacaggcggggttaccgagtggtacgagttgcgcaaggctcccagtgacctctaccagatcatcctcaaggcgctggagcggggctccctgctgggctgctccatagacatctccagcgttctagacatggaggccatcactttcaagaagttggtgaagggccatgcctactctgtgaccggggccaagcaggtgaactaccgaggccaggtggtgagcctgatccggatgcggaacccctggggcgaggtggagtggacgggagcctggagcgacagctcctcagagtggaacaacgtggacccatatgaacgggaccagctccgggtcaagatggaggacggggagttctggatgtcattccgagacttcatgcgggagttcacccgcctggagatctgcaacctcacacccgacgccctcaagagccggaccatccgcaaatggaacaccacactctacgaaggcacctggcggcgggggagcaccgcggggggctgccgaaactacccagccaccttctgggtgaaccctcagttcaagatccggctggatgagacggatgacccggacgactacggggaccgcgagtcaggctgcagcttcgtgctcgcccttatgcagaagcaccgtcgccgcgagcgccgcttcggccgcgacatggagactattggcttcgcggtctacgaggtccctccggagctggtgggccagccggccgtacacttgaagcgtgacttcttcctggccaatgcgtctcgggcgcgctcagagcagttcatcaacctgcgagaggtcagcacccgcttccgcctgccacccggggagtatgtggtggtgccctccaccttcgagcccaacaaggagggcgacttcgtgctgcgcttcttctcagagaagagtgctgggactgtggagctggatgaccagatccaggccaatctccccgatgagcaagtgctctcagaagaggagattgacgagaacttcaaggccctcttcaggcagctggcaggggaggacatggagatcagcgtgaaggagttgcggacaatcctcaataggatcatcagcaaacacaaagacctgcggaccaagggcttcagcctagagtcgtgccgcagcatggtgaacctcatggatcgtgatggcaatgggaagctgggcctggtggagttcaacatcctgtggaaccgcatccggaattacctgtccatcttccggaagtttgacctggacaagtcgggcagcatgagtgcctacgagatgcggatggccattgagtcggcaggcttcaagctcaacaagaagctgtacgagctcatcatcacccgctactcggagcccgacctggcggtcgactttgacaatttcgtttgctgcctggtgcggctagagaccatgttccgatttttcaaaactctggacacagatctggatggagttgtgacctttgacttgtttaagtggttgcagctgaccatgtttgcatgaggcagggactcggtcccccttgccgtgctcccctccctcctcgtctgccaagcctcgcctcctaccacaccacaccaggccaccccagctgcaagtgccttccttggagcagagaggcagcctcgtcctcctgtcccctctcctcccagccaccatcgttcatctgctccgggcagaactgtgtggcccctgcctgtgccagccatgggctcgggatggactccctgggccccacccattgccaagccaggaaggcagctttcgcttgttcctgcctcgggacagccccgggtttccccagcatcctgatgtgtcccctctccccacttcagaggccacccactcagcaccaccggcctggccttgcctgcagactataaactataaccactagctcgacacagtctgcagtccaggcgtgtggagccgcctcccggctcggggaggccccggggctgggaacgcctgtgccttcctgcgccgaagccaacgccccctctgtccttccctggccctgctgccgaccaggagctgcccagcctgtgggcggtcggccttccctccttcgctccttttttatattagtgattttaaaggggactcttcagggacttgtgtactggttatgggggtgccagaggcactaggcttggggtggggaggtcccgtgttccatatagaggaaccccaaataataaaaggccccacatctgtctgtga

SEQ ID NO: 64796 - DNA, 2931 bp, Homo sapiens
gcgcaatattagatcgtgaccacgcgtcgagggactgcagcgacccccaaacacccctcccccaggatgtcggaggagatcatcacgccggtgtactgcactggggtgtcagcccaagtgcagaagcagcgggccagggagctgggcctgggccgccatgagaatgccatcaagtacctgggccaggattatgagcagctgcgggtgcgatgcctgcagagtgggaccctcttccgtgatgaggccttccccccggtaccccagagcctgggttacaaggacctgggtcccaattcctccaagacctatggcatcaagtggaagcgtcccacggaactgctgtcaaacccccagttcattgtggatggagctacccgcacagacatctgccagggagcactgggggactgctggctcttggcggccatcgcctccctcactctcaacgacaccctcctgcaccgagtggttccgcacggccagagcttccagaatggctatgccggcatcttccatttccagctgtggcaatttggggagtgggtggacgtggtcgtggatgacctgctgcccatcaaggacgggaagctagtgttcgtgcactctgccgaaggcaacgagttctggagcgccctgcttgagaaggcctatgccaaggtaaatggcagctacgaggccctgtcagggggcagcacctcagagggctttgaggacttcacaggcggggttaccgagtggtacgagttgcgcaaggctcccagtgacctctaccagatcatcctcaaggcgctggagcggggctccctgctgggctgctccatagacatctccagcgttctagacatggaggccatcactttcaagaagttggtgaagggccatgcctactctgtgaccggggccaagcaggtgaactaccgaggccaggtggtgagcctgatccggatgcggaacccctggggcgaggtggagtggacgggagcctggagcgacagctcctcagagtggaacaacgtggacccatatgaacgggaccagctccgggtcaagatggaggacggggagttctggatgtcattccgagacttcatgcgggagttcacccgcctggagatctgcaacctcacacccgacgccctcaagagccggaccatccgcaaatggaacaccacactctacgaaggcacctggcggcgggggagcaccgcggggggctgccgaaactacccagccaccttctgggtgaaccctcagttcaagatccggctggatgagacggatgacccggacgactacggggaccgcgagtcaggctgcagcttcgtgctcgcccttatgcagaagcaccgtcgccgcgagcgccgcttcggccgcgacatggagactattggcttcgcggtctacgaggtccctccggagctggtgggccagccggccgtacacttgaagcgtgacttcttcctggccaatgcgtctcgggcgcgctcagagcagttcatcaacctgcgagaggtcagcacccgcttccgcctgccacccggggagtatgtggtggtgccctccaccttcgagcccaacaaggagggcgacttcgtgctgcgcttcttctcagagaagagtgctgggactgtggagctggatgaccagatccaggccaatctccccgatgagcaagtgctctcagaagaggagattgacgagaacttcaaggccctcttcaggcagctggcaggggaggacatggagatcagcgtgaaggagttgcggacaatcctcaataggatcatcagcaaacacaaagacctgcggaccaagggcttcagcctagagtcgtgccgcagcatggtgaacctcatggatcgtgatggcaatgggaagctgggcctggtggagttcaacatcctgtggaaccgcatccggaattacctgtccatcttccggaagtttgacctggacaagtcgggcagcatgagtgcctacgagatgcggatggccattgagtcggcaggcttcaagctcaacaagaagctgtacgagctcatcatcacccgctactcggagcccgacctggcggtcgactttgacaatttcgtttgctgcctggtgcggctagagaccatgttccgatttttcaaaactctggacacagatctggatggagttgtgacctttgacttgtttaagtggttgcagctgaccatgtttgcatgaggcagggactcggtcccccttgccgtgctcccctccctcctcgtctgccaagcctcgcctcctaccacaccacaccaggccaccccagctgcaagtgccttccttggagcagagaggcagcctcgtcctcctgtcccctctcctcccagccaccatcgttcatctgctccgggcagaactgtgtggcccctgcctgtgccagccatgggctcgggatggactccctgggccccacccattgccaagccaggaaggcagctttcgcttgttcctgcctcgggacagccccgggtttccccagcatcctgatgtgtcccctctccccacttcagaggccacccactcagcaccaccggcctggccttgcctgcagactataaactataaccactagctcgacacagtctgcagtccaggcgtgtggagccgcctcccggctcggggaggccccggggctgggaacgcctgtgccttcctgcgccgaagccaacgccccctctgtccttccctggccctgctgccgaccaggagctgcccagcctgtgggcggtcggccttccctccttcgctccttttttatattagtgattttaaaggggactcttcagggacttgtgtactggttatgggggtgccagaggcactaggcttggggtggggaggtcccgtgttccatatagaggaaccccaaataataaaaggccccacatctgtctgtga

SEQ ID NO: 64797 - DNA, 3411 bp, Homo sapiens
  misc_feature (59)..(59): n is a, c, g, or t
  misc_feature (81)..(81): n is a, c, g, or t
cgcagcgagcccggtccccctgtcgttccccggggagcgctgagccggaccggcgtggntggggaaggggagtggcgcggncctgcggggtgaggctgccgtttgctgagtgtccggcaggggtctgctcgctgccagcccggcccctcctcagagcagctgccgcagcccgaggtaatctcggccccgcgccggggctggctgggaacggcgggagcagcttcggtcgcgcggagcgaggggagctggggaccgggcgggcccgggggctgcgggaggcggcgccgccgcacaatcgccccggaatgcccgccagggcgcgcgtggggtgcggccgtcccgccctcaacttcgactgctgcccctgtttaaaaataccccttgcccgcccctccccctcgtttccccgcgtgcccttccgccgcgccccagcccccgcatgtccccccgcgctggcccctccccggggactgctctgccttttactaatttgtcctctcgcggaattggcccccggcctgcggagggaggggcggggagacaccgatgtcggaggagatcatcacgccggtgtactgcactggggtgtcagcccaagtgcagaagcagcgggccagggagctgggcctgggccgccatgagaatgccatcaagtacctgggccaggattatgagcagctgcgggtgcgatgcctgcagagtgggaccctcttccgtgatgaggccttccccccggtaccccagagcctgggttacaaggacctgggtcccaattcctccaagacctatggcatcaagtggaagcgtcccacggaactgctgtcaaacccccagttcattgtggatggagctacccgcacagacatctgccagggagcactgggggactgctggctcttggcggccatcgcctccctcactctcaacgacaccctcctgcaccgagtggttccgcacggccagagcttccagaatggctatgccggcatcttccatttccagctgtggcaatttggggagtgggtggacgtggtcgtggatgacctgctgcccatcaaggacgggaagctagtgttcgtgcactctgccgaaggcaacgagttctggagcgccctgcttgagaaggcctatgccaaggtaaatggcagctacgaggccctgtcagggggcagcacctcagagggctttgaggacttcacaggcggggttaccgagtggtacgagttgcgcaaggctcccagtgacctctaccagatcatcctcaaggcgctggagcggggctccctgctgggctgctccatagacatctccagcgttctagacatggaggccatcactttcaagaagttggtgaagggccatgcctactctgtgaccggggccaagcaggtgaactaccgaggccaggtggtgagcctgatccggatgcggaacccctggggcgaggtggagtggacgggagcctggagcgacagctcctcagagtggaacaacgtggacccatatgaacgggaccagctccgggtcaagatggaggacggggagttctggatgtcattccgagacttcatgcgggagttcacccgcctggagatctgcaacctcacacccgacgccctcaagagccggaccatccgcaaatggaacaccacactctacgaaggcacctggcggcgggggagcaccgcggggggctgccgaaactacccagccaccttctgggtgaaccctcagttcaagatccggctggatgagacggatgacccggacgactacggggaccgcgagtcaggctgcagcttcgtgctcgcccttatgcagaagcaccgtcgccgcgagcgccgcttcggccgcgacatggagactattggcttcgcggtctacgaggtccctccggagctggtgggccagccggccgtacacttgaagcgtgacttcttcctggccaatgcgtctcgggcgcgctcagagcagttcatcaacctgcgagaggtcagcacccgcttccgcctgccacccggggagtatgtggtggtgccctccaccttcgagcccaacaaggagggcgacttcgtgctgcgcttcttctcagagaagagtgctgggactgtggagctggatgaccagatccaggccaatctccccgatgagcaagtgctctcagaagaggagattgacgagaacttcaaggccctcttcaggcagctggcaggggaggacatggagatcagcgtgaaggagttgcggacaatcctcaataggatcatcagcaaacacaaagacctgcggaccaagggcttcagcctagagtcgtgccgcagcatggtgaacctcatggatcgtgatggcaatgggaagctgggcctggtggagttcaacatcctgtggaaccgcatccggaattacctgtccatcttccggaagtttgacctggacaagtcgggcagcatgagtgcctacgagatgcggatggccattgagtcggcaggcttcaagctcaacaagaagctgtacgagctcatcatcacccgctactcggagcccgacctggcggtcgactttgacaatttcgtttgctgcctggtgcggctagagaccatgttccgatttttcaaaactctggacacagatctggatggagttgtgacctttgacttgtttaagtggttgcagctgaccatgtttgcatgaggcagggactcggtcccccttgccgtgctcccctccctcctcgtctgccaagcctcgcctcctaccacaccacaccaggccaccccagctgcaagtgccttccttggagcagagaggcagcctcgtcctcctgtcccctctcctcccagccaccatcgttcatctgctccgggcagaactgtgtggcccctgcctgtgccagccatgggctcgggatggactccctgggccccacccattgccaagccaggaaggcagctttcgcttgttcctgcctcgggacagccccgggtttccccagcatcctgatgtgtcccctctccccacttcagaggccacccactcagcaccaccggcctggccttgcctgcagactataaactataaccactagctcgacacagtctgcagtccaggcgtgtggagccgcctcccggctcggggaggccccggggctgggaacgcctgtgccttcctgcgccgaagccaacgccccctctgtccttccctggccctgctgccgaccaggagctgcccagcctgtgggcggtcggccttccctccttcgctccttttttatattagtgattttaaaggggactcttcagggacttgtgtactggttatgggggtgccagaggcactaggcttggggtggggaggtcccgtgttccatatagaggaaccccaaataataaaaggccccacatctgtctgtga

SEQ ID NO: 64798 - DNA, 2919 bp, Homo sapiens
tgctaagtacgaggccgcgtgttaaatcggccgaggcaaacaccctcccgcaggatgtcggaggagatcatcacgccggtgtactgcactggggtgtcagcccaagtgcagaagcagcgggccagggagctgggcctgggccgccatgagaatgccatcaagtacctgggccaggattatgagcagctgcgggtgcgatgcctgcagagtgggaccctcttccgtgatgaggccttccccccggtaccccagagcctgggttacaaggacctgggtcccaattcctccaagacctatggcatcaagtggaagcgtcccacggaactgctgtcaaacccccagttcattgtggatggagctacccgcacagacatctgccagggagcactgggggactgctggctcttggcggccatcgcctccctcactctcaacgacaccctcctgcaccgagtggttccgcacggccagagcttccagaatggctatgccggcatcttccatttccagctgtggcaatttggggagtgggtggacgtggtcgtggatgacctgctgcccatcaaggacgggaagctagtgttcgtgcactctgccgaaggcaacgagttctggagcgccctgcttgagaaggcctatgccaaggtaaatggcagctacgaggccctgtcagggggcagcacctcagagggctttgaggacttcacaggcggggttaccgagtggtacgagttgcgcaaggctcccagtgacctctaccagatcatcctcaaggcgctggagcggggctccctgctgggctgctccatagacatctccagcgttctagacatggaggccatcactttcaagaagttggtgaagggccatgcctactctgtgaccggggccaagcaggtgaactaccgaggccaggtggtgagcctgatccggatgcggaacccctggggcgaggtggagtggacgggagcctggagcgacagctcctcagagtggaacaacgtggacccatatgaacgggaccagctccgggtcaagatggaggacggggagttctggatgtcattccgagacttcatgcgggagttcacccgcctggagatctgcaacctcacacccgacgccctcaagagccggaccatccgcaaatggaacaccacactctacgaaggcacctggcggcgggggagcaccgcggggggctgccgaaactacccagccaccttctgggtgaaccctcagttcaagatccggctggatgagacggatgacccggacgactacggggaccgcgagtcaggctgcagcttcgtgctcgcccttatgcagaagcaccgtcgccgcgagcgccgcttcggccgcgacatggagactattggcttcgcggtctacgaggtccctccggagctggtgggccagccggccgtacacttgaagcgtgacttcttcctggccaatgcgtctcgggcgcgctcagagcagttcatcaacctgcgagaggtcagcacccgcttccgcctgccacccggggagtatgtggtggtgccctccaccttcgagcccaacaaggagggcgacttcgtgctgcgcttcttctcagagaagagtgctgggactgtggagctggatgaccagatccaggccaatctccccgatgagcaagtgctctcagaagaggagattgacgagaacttcaaggccctcttcaggcagctggcaggggaggacatggagatcagcgtgaaggagttgcggacaatcctcaataggatcatcagcaaacacaaagacctgcggaccaagggcttcagcctagagtcgtgccgcagcatggtgaacctcatggatcgtgatggcaatgggaagctgggcctggtggagttcaacatcctgtggaaccgcatccggaattacctgtccatcttccggaagtttgacctggacaagtcgggcagcatgagtgcctacgagatgcggatggccattgagtcggcaggcttcaagctcaacaagaagctgtacgagctcatcatcacccgctactcggagcccgacctggcggtcgactttgacaatttcgtttgctgcctggtgcggctagagaccatgttccgatttttcaaaactctggacacagatctggatggagttgtgacctttgacttgtttaagtggttgcagctgaccatgtttgcatgaggcagggactcggtcccccttgccgtgctcccctccctcctcgtctgccaagcctcgcctcctaccacaccacaccaggccaccccagctgcaagtgccttccttggagcagagaggcagcctcgtcctcctgtcccctctcctcccagccaccatcgttcatctgctccgggcagaactgtgtggcccctgcctgtgccagccatgggctcgggatggactccctgggccccacccattgccaagccaggaaggcagctttcgcttgttcctgcctcgggacagccccgggtttccccagcatcctgatgtgtcccctctccccacttcagaggccacccactcagcaccaccggcctggccttgcctgcagactataaactataaccactagctcgacacagtctgcagtccaggcgtgtggagccgcctcccggctcggggaggccccggggctgggaacgcctgtgccttcctgcgccgaagccaacgccccctctgtccttccctggccctgctgccgaccaggagctgcccagcctgtgggcggtcggccttccctccttcgctccttttttatattagtgattttaaaggggactcttcagggacttgtgtactggttatgggggtgccagaggcactaggcttggggtggggaggtcccgtgttccatatagaggaaccccaaataataaaaggccccacatctgtctgtga

SEQ ID NO: 64799 - DNA, 3674 bp, Homo sapiens
  misc_feature (59)..(59): n is a, c, g, or t
  misc_feature (81)..(81): n is a, c, g, or t
cgcagcgagcccggtccccctgtcgttccccggggagcgctgagccggaccggcgtggntggggaaggggagtggcgcggncctgcggggtgaggctgccgtttgctgagtgtccggcaggggtctgctcgctgccagcccggcccctcctcagagcagctgccgcagcccgaggtaatctcggccccgcgccggggctggctgggaacggcgggagcagcttcggtcgcgcggagcgaggggagctggggaccgggcgggcccgggggctgcgggaggcggcgccgccgcacaatcgccccggaatgcccgccagggcgcgcgtggggtgcggccgtcccgccctcaacttcgactgctgcccctgtttaaaaataccccttgcccgcccctccccctcgtttccccgcgtgcccttccgccgcgccccagcccccgcatgtccccccgcgctggcccctccccggggactgctctgccttttactaatttgtcctctcgcggaattggcccccggcctgcggagggaggggcggggagacaccgtgagtaagagatagtcagagaccgtgccggagagataagggagagccgagaggaagcggggtaggagccccaggaggaggaggaggagaaggagagagggagggcggagggcggaggggcggcgggaggagggcggggaggagcgctcttcctggttgggccctgccctgagctgccaccgggaagccagcctcagggactgcagcgacccccaaacacccctcccccaggatgtcggaggagatcatcacgccggtgtactgcactggggtgtcagcccaagtgcagaagcagcgggccagggagctgggcctgggccgccatgagaatgccatcaagtacctgggccaggattatgagcagctgcgggtgcgatgcctgcagagtgggaccctcttccgtgatgaggccttccccccggtaccccagagcctgggttacaaggacctgggtcccaattcctccaagacctatggcatcaagtggaagcgtcccacggaactgctgtcaaacccccagttcattgtggatggagctacccgcacagacatctgccagggagcactgggggactgctggctcttggcggccatcgcctccctcactctcaacgacaccctcctgcaccgagtggttccgcacggccagagcttccagaatggctatgccggcatcttccatttccagctgtggcaatttggggagtgggtggacgtggtcgtggatgacctgctgcccatcaaggacgggaagctagtgttcgtgcactctgccgaaggcaacgagttctggagcgccctgcttgagaaggcctatgccaaggtaaatggcagctacgaggccctgtcagggggcagcacctcagagggctttgaggacttcacaggcggggttaccgagtggtacgagttgcgcaaggctcccagtgacctctaccagatcatcctcaaggcgctggagcggggctccctgctgggctgctccatagacatctccagcgttctagacatggaggccatcactttcaagaagttggtgaagggccatgcctactctgtgaccggggccaagcaggtgaactaccgaggccaggtggtgagcctgatccggatgcggaacccctggggcgaggtggagtggacgggagcctggagcgacagctcctcagagtggaacaacgtggacccatatgaacgggaccagctccgggtcaagatggaggacggggagttctggatgtcattccgagacttcatgcgggagttcacccgcctggagatctgcaacctcacacccgacgccctcaagagccggaccatccgcaaatggaacaccacactctacgaaggcacctggcggcgggggagcaccgcggggggctgccgaaactacccagccaccttctgggtgaaccctcagttcaagatccggctggatgagacggatgacccggacgactacggggaccgcgagtcaggctgcagcttcgtgctcgcccttatgcagaagcaccgtcgccgcgagcgccgcttcggccgcgacatggagactattggcttcgcggtctacgaggtccctccggagctggtgggccagccggccgtacacttgaagcgtgacttcttcctggccaatgcgtctcgggcgcgctcagagcagttcatcaacctgcgagaggtcagcacccgcttccgcctgccacccggggagtatgtggtggtgccctccaccttcgagcccaacaaggagggcgacttcgtgctgcgcttcttctcagagaagagtgctgggactgtggagctggatgaccagatccaggccaatctccccgatgagcaagtgctctcagaagaggagattgacgagaacttcaaggccctcttcaggcagctggcaggggaggacatggagatcagcgtgaaggagttgcggacaatcctcaataggatcatcagcaaacacaaagacctgcggaccaagggcttcagcctagagtcgtgccgcagcatggtgaacctcatggatcgtgatggcaatgggaagctgggcctggtggagttcaacatcctgtggaaccgcatccggaattacctgtccatcttccggaagtttgacctggacaagtcgggcagcatgagtgcctacgagatgcggatggccattgagtcggcaggcttcaagctcaacaagaagctgtacgagctcatcatcacccgctactcggagcccgacctggcggtcgactttgacaatttcgtttgctgcctggtgcggctagagaccatgttccgatttttcaaaactctggacacagatctggatggagttgtgacctttgacttgtttaagtggttgcagctgaccatgtttgcatgaggcagggactcggtcccccttgccgtgctcccctccctcctcgtctgccaagcctcgcctcctaccacaccacaccaggccaccccagctgcaagtgccttccttggagcagagaggcagcctcgtcctcctgtcccctctcctcccagccaccatcgttcatctgctccgggcagaactgtgtggcccctgcctgtgccagccatgggctcgggatggactccctgggccccacccattgccaagccaggaaggcagctttcgcttgttcctgcctcgggacagccccgggtttccccagcatcctgatgtgtcccctctccccacttcagaggccacccactcagcaccaccggcctggccttgcctgcagactataaactataaccactagctcgacacagtctgcagtccaggcgtgtggagccgcctcccggctcggggaggccccggggctgggaacgcctgtgccttcctgcgccgaagccaacgccccctctgtccttccctggccctgctgccgaccaggagctgcccagcctgtgggcggtcggccttccctccttcgctccttttttatattagtgattttaaaggggactcttcagggacttgtgtactggttatgggggtgccagaggcactaggcttggggtggggaggtcccgtgttccatatagaggaaccccaaataataaaaggccccacatctgtctgtgaaaaaaactcgtgccgaattcgatacaagctta

SEQ ID NO: 64800 - DNA, 4141 bp, Homo sapiens
  misc_feature (59)..(59): n is a, c, g, or t
  misc_feature (81)..(81): n is a, c, g, or t
cgcagcgagcccggtccccctgtcgttccccggggagcgctgagccggaccggcgtggntggggaaggggagtggcgcggncctgcggggtgaggctgccgtttgctgagtgtccggcaggggtctgctcgctgccagcccggcccctcctcagagcagctgccgcagcccgaggtaatctcggccccgcgccggggctggctgggaacggcgggagcagcttcggtcgcgcggagcgaggggagctggggaccgggcgggcccgggggctgcgggaggcggcgccgccgcacaatcgccccggaatgcccgccagggcgcgcgtggggtgcggccgtcccgccctcaacttcgactgctgcccctgtttaaaaataccccttgcccgcccctccccctcgtttccccgcgtgcccttccgccgcgccccagcccccgcatgtccccccgcgctggcccctccccggggactgctctgccttttactaatttgtcctctcgcggaattggcccccggcctgcggagggaggggcggggagacaccgtgagtaagagatagtcagagaccgtgccggagagataagggagagccgagaggaagcggggtaggagccccaggaggaggaggaggagaaggagagagggagggcggagggcggaggggcggcgggaggagggcggggaggagcgctcttcctggttgggccctgccctgagctgccaccgggaagccagcctcagggactgcagcgacccccaaacacccctcccccaggatgtcggaggagatcatcacgccggtgtactgcactggggtgtcagcccaagtgcagaagcagcgggccagggagctgggcctgggccgccatgagaatgccatcaagtacctgggccaggattatgagcagctgcgggtgcgatgcctgcagagtgggaccctcttccgtgatgaggccttccccccggtaccccagagcctgggttacaaggacctgggtcccaattcctccaagacctatggcatcaagtggaagcgtcccacggaactgctgtcaaacccccagttcattgtggatggagctacccgcacagacatctgccagggagcactgggggactgctggctcttggcggccatcgcctccctcactctcaacgacaccctcctgcaccgagtggttccgcacggccagagcttccagaatggctatgccggcatcttccatttccagctgtggcaatttggggagtgggtggacgtggtcgtggatgacctgctgcccatcaaggacgggaagctagtgttcgtgcactctgccgaaggcaacgagttctggagcgccctgcttgagaaggcctatgccaaggtaaatggcagctacgaggccctgtcagggggcagcacctcagagggctttgaggacttcacaggcggggttaccgagtggtacgagttgcgcaaggctcccagtgacctctaccagatcatcctcaaggcgctggagcggggctccctgctgggctgctccatagacatctccagcgttctagacatggaggccatcactttcaagaagttggtgaagggccatgcctactctgtgaccggggccaagcaggtgaactaccgaggccaggtggtgagcctgatccggatgcggaacccctggggcgaggtggagtggacgggagcctggagcgacagctcctcagagtggaacaacgtggacccatatgaacgggaccagctccgggtcaagatggaggacggggagttctggatgtcattccgagacttcatgcgggagttcacccgcctggagatctgcaacctcacacccgacgccctcaagagccggaccatccgcaaatggaacaccacactctacgaaggcacctggcggcgggggagcaccgcggggggctgccgaaactacccagccaccttctgggtgaaccctcagttcaagatccggctggatgagacggatgacccggacgactacggggaccgcgagtcaggctgcagcttcgtgctcgcccttatgcagaagcaccgtcgccgcgagcgccgcttcggccgcgacatggagactattggcttcgcggtctacgaggtccctccggagctggtgggccagccggccgtacacttgaagcgtgacttcttcctggccaatgcgtctcgggcgcgctcagagcagttcatcaacctgcgagaggtcagcacccgcttccgcctgccacccggggagtatgtggtggtgccctccaccttcgagcccaacaaggagggcgacttcgtgctgcgcttcttctcagagaagagtgctgggactgtggagctggatgaccagatccaggccaatctccccgatgagcaagtgctctcagaagaggagattgacgagaacttcaaggccctcttcaggcagctggcaggggaggacatggagatcagcgtgaaggagttgcggacaatcctcaataggatcatcagcaaacacaaagacctgcggaccaagggcttcagcctagagtcgtgccgcagcatggtgaacctcatggatcgtgatggcaatgggaagctgggcctggtggagttcaacatcctgtggaaccgcatccggaattacctgtccatcttccggaagtttgacctggacaagtcgggcagcatgagtgcctacgagatgcggatggccattgagtcggcaggcttcaagctcaacaagaagctgtacgagctcatcatcacccgctactcggagcccgacctggcggtcgactttgacaatttcgtttgctgcctggtgcggctagagaccatgttccgatttttcaaaactctggacacagatctggatggagttgtgacctttgacttgtttaagtggttgcagctgaccatgtttgcatgaggcagggactcggtcccccttgccgtgctcccctccctcctcgtctgccaagcctcgcctcctaccacaccacaccaggccaccccagctgcaagtgccttccttggagcagagaggcagcctcgtcctcctgtcccctctcctcccagccaccatcgttcatctgctccgggcagaactgtgtggcccctgcctgtgccagccatgggctcgggatggactccctgggccccacccattgccaagccaggaaggcagctttcgcttgttcctgcctcgggacagccccgggtttccccagcatcctgatgtgtcccctctccccacttcagaggccacccactcagcaccaccggcctggccttgcctgcagactataaactataaccactagctcgacacagtctgcagtccaggcgtgtggagccgcctcccggctcggggaggccccggggctgggaacgcctgtgccttcctgcgccgaagccaacgccccctctgtccttccctggccctgctgccgaccaggagctgcccagcctgtgggcggtcggccttccctccttcgctccttttttatattagtgattttaaaggggactcttcagggacttgtgtactggttatgggggtgccagaggcactaggcttggggtggggaggtcccgtgttccatatagaggaaccccaaataataaaaggccccacatctgtctgtgaaaaaaaaaaaaaaaaaaaaaaaaaaaaaaaaaagaaagaagaaagctccgaggcacgatataattattcgggggttccggacaaagcaggttatttaaacacgggaacatttcgctaataagtggaggttgaggaaccgacatatttgttgataaacggggggaataaacttggggcgtgtacacactatagtagtgaagattaaatatataatcagccaaaccgacgggtaaaaccgcccgcaacacgagaccccgcaacacaacaaaggaagcaaacaaacacgcacacgagaagacagagaaaaagacgacaagaacgaacacaagaagcaagccaagaaaggagagaagaacaacaagaaacgacaaaacacgaacaagaaagaaggaccgcagagagagacagagacgagagcaaaacgagagaaagacagagaacacagaaacgcagacacgacagaaaaccgcacagagcacagaaagcgaaaacaacaaac

SEQ ID NO: 64801 - DNA, 3763 bp, Homo sapiens
  misc_feature (59)..(59): n is a, c, g, or t
  misc_feature (81)..(81): n is a, c, g, or t
cgcagcgagcccggtccccctgtcgttccccggggagcgctgagccggaccggcgtggntggggaaggggagtggcgcggncctgcggggtgaggctgccgtttgctgagtgtccggcaggggtctgctcgctgccagcccggcccctcctcagagcagctgccgcagcccgaggtaatctcggccccgcgccggggctggctgggaacggcgggagcagcttcggtcgcgcggagcgaggggagctggggaccgggcgggcccgggggctgcgggaggcggcgccgccgcacaatcgccccggaatgcccgccagggcgcgcgtggggtgcggccgtcccgccctcaacttcgactgctgcccctgtttaaaaataccccttgcccgcccctccccctcgtttccccgcgtgcccttccgccgcgccccagcccccgcatgtccccccgcgctggcccctccccggggactgctctgccttttactaatttgtcctctcgcggaattggcccccggcctgcggagggaggggcggggagacaccgtgagtaagagatagtcagagaccgtgccggagagataagggagagccgagaggaagcggggtaggagccccaggaggaggaggaggagaaggagagagggagggcggagggcggaggggcggcgggaggagggcggggaggagcgctcttcctggttgggccctgccctgagctgccaccgggaagccagcctcagggactgcagcgacccccaaacacccctcccccaggatgtcggaggagatcatcacgccggtgtactgcactggggtgtcagcccaagtgcagaagcagcgggccagggagctgggcctgggccgccatgagaatgccatcaagtacctgggccaggattatgagcagctgcgggtgcgatgcctgcagagtgggaccctcttccgtgatgaggccttccccccggtaccccagagcctgggttacaaggacctgggtcccaattcctccaagacctatggcatcaagtggaagcgtcccacggaactgctgtcaaacccccagttcattgtggatggagctacccgcacagacatctgccagggagcactgggggactgctggctcttggcggccatcgcctccctcactctcaacgacaccctcctgcaccgagtggttccgcacggccagagcttccagaatggctatgccggcatcttccatttccagctgtggcaatttggggagtgggtggacgtggtcgtggatgacctgctgcccatcaaggacgggaagctagtgttcgtgcactctgccgaaggcaacgagttctggagcgccctgcttgagaaggcctatgccaaaagtgagtagcggctgagggggcaactccagcttccagctccccctaggggtgggggctcatgactgtcttctcagagggtcctgcttgatgccagagtgctgacctggagctgcccacagggtaaatggcagctacgaggccctgtcagggggcagcacctcagagggctttgaggacttcacaggcggggttaccgagtggtacgagttgcgcaaggctcccagtgacctctaccagatcatcctcaaggcgctggagcggggctccctgctgggctgctccatagacatctccagcgttctagacatggaggccatcactttcaagaagttggtgaagggccatgcctactctgtgaccggggccaagcaggtgaactaccgaggccaggtggtgagcctgatccggatgcggaacccctggggcgaggtggagtggacgggagcctggagcgacagctcctcagagtggaacaacgtggacccatatgaacgggaccagctccgggtcaagatggaggacggggagttctggatgtcattccgagacttcatgcgggagttcacccgcctggagatctgcaacctcacacccgacgccctcaagagccggaccatccgcaaatggaacaccacactctacgaaggcacctggcggcgggggagcaccgcggggggctgccgaaactacccagccaccttctgggtgaaccctcagttcaagatccggctggatgagacggatgacccggacgactacggggaccgcgagtcaggctgcagcttcgtgctcgcccttatgcagaagcaccgtcgccgcgagcgccgcttcggccgcgacatggagactattggcttcgcggtctacgaggtccctccggagctggtgggccagccggccgtacacttgaagcgtgacttcttcctggccaatgcgtctcgggcgcgctcagagcagttcatcaacctgcgagaggtcagcacccgcttccgcctgccacccggggagtatgtggtggtgccctccaccttcgagcccaacaaggagggcgacttcgtgctgcgcttcttctcagagaagagtgctgggactgtggagctggatgaccagatccaggccaatctccccgatgagcaagtgctctcagaagaggagattgacgagaacttcaaggccctcttcaggcagctggcaggggaggacatggagatcagcgtgaaggagttgcggacaatcctcaataggatcatcagcaaacacaaagacctgcggaccaagggcttcagcctagagtcgtgccgcagcatggtgaacctcatggatcgtgatggcaatgggaagctgggcctggtggagttcaacatcctgtggaaccgcatccggaattacctgtccatcttccggaagtttgacctggacaagtcgggcagcatgagtgcctacgagatgcggatggccattgagtcggcaggcttcaagctcaacaagaagctgtacgagctcatcatcacccgctactcggagcccgacctggcggtcgactttgacaatttcgtttgctgcctggtgcggctagagaccatgttccgatttttcaaaactctggacacagatctggatggagttgtgacctttgacttgtttaagtggttgcagctgaccatgtttgcatgaggcagggactcggtcccccttgccgtgctcccctccctcctcgtctgccaagcctcgcctcctaccacaccacaccaggccaccccagctgcaagtgccttccttggagcagagaggcagcctcgtcctcctgtcccctctcctcccagccaccatcgttcatctgctccgggcagaactgtgtggcccctgcctgtgccagccatgggctcgggatggactccctgggccccacccattgccaagccaggaaggcagctttcgcttgttcctgcctcgggacagccccgggtttccccagcatcctgatgtgtcccctctccccacttcagaggccacccactcagcaccaccggcctggccttgcctgcagactataaactataaccactagctcgacacagtctgcagtccaggcgtgtggagccgcctcccggctcggggaggccccggggctgggaacgcctgtgccttcctgcgccgaagccaacgccccctctgtccttccctggccctgctgccgaccaggagctgcccagcctgtgggcggtcggccttccctccttcgctccttttttatattagtgattttaaaggggactcttcagggacttgtgtactggttatgggggtgccagaggcactaggcttggggtggggaggtcccgtgttccatatagaggaaccccaaataataaaaggccccacatctgtctgtga

SEQ ID NO: 64802 - DNA, 3161 bp, Homo sapiens
  misc_feature (59)..(59): n is a, c, g, or t
  misc_feature (81)..(81): n is a, c, g, or t
cgcagcgagcccggtccccctgtcgttccccggggagcgctgagccggaccggcgtggntggggaaggggagtggcgcggncctgcggggtgaggctgccgtttgctgagtgtccggcaggggtctgctcgctgccagcccggcccctcctcagagcagctgccgcagcccgaggatgtcggaggagatcatcacgccggtgtactgcactggggtgtcagcccaagtgcagaagcagcgggccagggagctgggcctgggccgccatgagaatgccatcaagtacctgggccaggattatgagcagctgcgggtgcgatgcctgcagagtgggaccctcttccgtgatgaggccttccccccggtaccccagagcctgggttacaaggacctgggtcccaattcctccaagacctatggcatcaagtggaagcgtcccacggaactgctgtcaaacccccagttcattgtggatggagctacccgcacagacatctgccagggagcactgggggactgctggctcttggcggccatcgcctccctcactctcaacgacaccctcctgcaccgagtggttccgcacggccagagcttccagaatggctatgccggcatcttccatttccagctgtggcaatttggggagtgggtggacgtggtcgtggatgacctgctgcccatcaaggacgggaagctagtgttcgtgcactctgccgaaggcaacgagttctggagcgccctgcttgagaaggcctatgccaaaagtgagtagcggctgagggggcaactccagcttccagctccccctaggggtgggggctcatgactgtcttctcagagggtcctgcttgatgccagagtgctgacctggagctgcccacagggtaaatggcagctacgaggccctgtcagggggcagcacctcagagggctttgaggacttcacaggcggggttaccgagtggtacgagttgcgcaaggctcccagtgacctctaccagatcatcctcaaggcgctggagcggggctccctgctgggctgctccatagacatctccagcgttctagacatggaggccatcactttcaagaagttggtgaagggccatgcctactctgtgaccggggccaagcaggtgaactaccgaggccaggtggtgagcctgatccggatgcggaacccctggggcgaggtggagtggacgggagcctggagcgacagctcctcagagtggaacaacgtggacccatatgaacgggaccagctccgggtcaagatggaggacggggagttctggatgtcattccgagacttcatgcgggagttcacccgcctggagatctgcaacctcacacccgacgccctcaagagccggaccatccgcaaatggaacaccacactctacgaaggcacctggcggcgggggagcaccgcggggggctgccgaaactacccagccaccttctgggtgaaccctcagttcaagatccggctggatgagacggatgacccggacgactacggggaccgcgagtcaggctgcagcttcgtgctcgcccttatgcagaagcaccgtcgccgcgagcgccgcttcggccgcgacatggagactattggcttcgcggtctacgaggtccctccggagctggtgggccagccggccgtacacttgaagcgtgacttcttcctggccaatgcgtctcgggcgcgctcagagcagttcatcaacctgcgagaggtcagcacccgcttccgcctgccacccggggagtatgtggtggtgccctccaccttcgagcccaacaaggagggcgacttcgtgctgcgcttcttctcagagaagagtgctgggactgtggagctggatgaccagatccaggccaatctccccgatgagcaagtgctctcagaagaggagattgacgagaacttcaaggccctcttcaggcagctggcaggggaggacatggagatcagcgtgaaggagttgcggacaatcctcaataggatcatcagcaaacacaaagacctgcggaccaagggcttcagcctagagtcgtgccgcagcatggtgaacctcatggatcgtgatggcaatgggaagctgggcctggtggagttcaacatcctgtggaaccgcatccggaattacctgtccatcttccggaagtttgacctggacaagtcgggcagcatgagtgcctacgagatgcggatggccattgagtcggcaggcttcaagctcaacaagaagctgtacgagctcatcatcacccgctactcggagcccgacctggcggtcgactttgacaatttcgtttgctgcctggtgcggctagagaccatgttccgatttttcaaaactctggacacagatctggatggagttgtgacctttgacttgtttaagtggttgcagctgaccatgtttgcatgaggcagggactcggtcccccttgccgtgctcccctccctcctcgtctgccaagcctcgcctcctaccacaccacaccaggccaccccagctgcaagtgccttccttggagcagagaggcagcctcgtcctcctgtcccctctcctcccagccaccatcgttcatctgctccgggcagaactgtgtggcccctgcctgtgccagccatgggctcgggatggactccctgggccccacccattgccaagccaggaaggcagctttcgcttgttcctgcctcgggacagccccgggtttccccagcatcctgatgtgtcccctctccccacttcagaggccacccactcagcaccaccggcctggccttgcctgcagactataaactataaccactagctcgacacagtctgcagtccaggcgtgtggagccgcctcccggctcggggaggccccggggctgggaacgcctgtgccttcctgcgccgaagccaacgccccctctgtccttccctggccctgctgccgaccaggagctgcccagcctgtgggcggtcggccttccctccttcgctccttttttatattagtgattttaaaggggactcttcagggacttgtgtactggttatgggggtgccagaggcactaggcttggggtggggaggtcccgtgttccatatagaggaaccccaaataataaaaggccccacatctgtctgtga

SEQ ID NO: 64803 - DNA, 2411 bp, Homo sapiens
ggtccgttgggaatagaaccctcggcttgaccccaaattccaagggacccggggacaagctaaggtggtttcagatgacaacatctgccgaaggcaacgagttctggagcgccctgcttgagaaggcctatgccaaggtaaatggcagctacgaggccctgtcagggggcagcacctcagagggctttgaggacttcacaggcggggttaccgagtggtacgagttgcgcaaggctcccagtgacctctaccagatcatcctcaaggcgctggagcggggctccctgctgggctgctccatagacatctccagcgttctagacatggaggccatcactttcaagaagttggtgaagggccatgcctactctgtgaccggggccaagcaggtgaactaccgaggccaggtggtgagcctgatccggatgcggaacccctggggcgaggtggagtggacgggagcctggagcgacagctcctcagagtggaacaacgtggacccatatgaacgggaccagctccgggtcaagatggaggacggggagttctggatgtcattccgagacttcatgcgggagttcacccgcctggagatctgcaacctcacacccgacgccctcaagagccggaccatccgcaaatggaacaccacactctacgaaggcacctggcggcgggggagcaccgcggggggctgccgaaactacccagccaccttctgggtgaaccctcagttcaagatccggctggatgagacggatgacccggacgactacggggaccgcgagtcaggctgcagcttcgtgctcgcccttatgcagaagcaccgtcgccgcgagcgccgcttcggccgcgacatggagactattggcttcgcggtctacgaggtccctccggagctggtgggccagccggccgtacacttgaagcgtgacttcttcctggccaatgcgtctcgggcgcgctcagagcagttcatcaacctgcgagaggtcagcacccgcttccgcctgccacccggggagtatgtggtggtgccctccaccttcgagcccaacaaggagggcgacttcgtgctgcgcttcttctcagagaagagtgctgggactgtggagctggatgaccagatccaggccaatctccccgatgagcaagtgctctcagaagaggagattgacgagaacttcaaggccctcttcaggcagctggcaggggaggacatggagatcagcgtgaaggagttgcggacaatcctcaataggatcatcagcaaacacaaagacctgcggaccaagggcttcagcctagagtcgtgccgcagcatggtgaacctcatggatcgtgatggcaatgggaagctgggcctggtggagttcaacatcctgtggaaccgcatccggaattacctgtccatcttccggaagtttgacctggacaagtcgggcagcatgagtgcctacgagatgcggatggccattgagtcggcaggcttcaagctcaacaagaagctgtacgagctcatcatcacccgctactcggagcccgacctggcggtcgactttgacaatttcgtttgctgcctggtgcggctagagaccatgttccgatttttcaaaactctggacacagatctggatggagttgtgacctttgacttgtttaagtggttgcagctgaccatgtttgcatgaggcagggactcggtcccccttgccgtgctcccctccctcctcgtctgccaagcctcgcctcctaccacaccacaccaggccaccccagctgcaagtgccttccttggagcagagaggcagcctcgtcctcctgtcccctctcctcccagccaccatcgttcatctgctccgggcagaactgtgtggcccctgcctgtgccagccatgggctcgggatggactccctgggccccacccattgccaagccaggaaggcagctttcgcttgttcctgcctcgggacagccccgggtttccccagcatcctgatgtgtcccctctccccacttcagaggccacccactcagcaccaccggcctggccttgcctgcagactataaactataaccactagctcgacacagtctgcagtccaggcgtgtggagccgcctcccggctcggggaggccccggggctgggaacgcctgtgccttcctgcgccgaagccaacgccccctctgtccttccctggccctgctgccgaccaggagctgcccagcctgtgggcggtcggccttccctccttcgctccttttttatattagtgattttaaaggggactcttcagggacttgtgtactggttatgggggtgccagaggcactaggcttggggtggggaggtcccgtgttccatatagaggaaccccaaataataaaaggccccacatctgtctgtga

SEQ ID NO: 64804 - DNA, 2663 bp, Homo sapiens
atacatgtatctagaggtacacatgcatctagtatgtatctagtatatgtgatttagtatacatgcatctactatgtatctggtatacctgacctagtatacatctagtatgtatctaatttacatgatttagtctatgtgtatctagtatgtatctgggatgtagaatcctgcatctaggaaggtaggggtaaggatggagctcaggtccgggggattccaaagcaggtactcaccgtgcccctcccccacagctgtggcaatttggggagtgggtggacgtggtcgtggatgacctgctgcccatcaaggacgggaagctagtgttcgtgcactctgccgaaggcaacgagttctggagcgccctgcttgagaaggcctatgccaaggtaaatggcagctacgaggccctgtcagggggcagcacctcagagggctttgaggacttcacaggcggggttaccgagtggtacgagttgcgcaaggctcccagtgacctctaccagatcatcctcaaggcgctggagcggggctccctgctgggctgctccatagacatctccagcgttctagacatggaggccatcactttcaagaagttggtgaagggccatgcctactctgtgaccggggccaagcaggtgaactaccgaggccaggtggtgagcctgatccggatgcggaacccctggggcgaggtggagtggacgggagcctggagcgacagctcctcagagtggaacaacgtggacccatatgaacgggaccagctccgggtcaagatggaggacggggagttctggatgtcattccgagacttcatgcgggagttcacccgcctggagatctgcaacctcacacccgacgccctcaagagccggaccatccgcaaatggaacaccacactctacgaaggcacctggcggcgggggagcaccgcggggggctgccgaaactacccagccaccttctgggtgaaccctcagttcaagatccggctggatgagacggatgacccggacgactacggggaccgcgagtcaggctgcagcttcgtgctcgcccttatgcagaagcaccgtcgccgcgagcgccgcttcggccgcgacatggagactattggcttcgcggtctacgaggtccctccggagctggtgggccagccggccgtacacttgaagcgtgacttcttcctggccaatgcgtctcgggcgcgctcagagcagttcatcaacctgcgagaggtcagcacccgcttccgcctgccacccggggagtatgtggtggtgccctccaccttcgagcccaacaaggagggcgacttcgtgctgcgcttcttctcagagaagagtgctgggactgtggagctggatgaccagatccaggccaatctccccgatgagcaagtgctctcagaagaggagattgacgagaacttcaaggccctcttcaggcagctggcaggggaggacatggagatcagcgtgaaggagttgcggacaatcctcaataggatcatcagcaaacacaaagacctgcggaccaagggcttcagcctagagtcgtgccgcagcatggtgaacctcatggatcgtgatggcaatgggaagctgggcctggtggagttcaacatcctgtggaaccgcatccggaattacctgtccatcttccggaagtttgacctggacaagtcgggcagcatgagtgcctacgagatgcggatggccattgagtcggcaggcttcaagctcaacaagaagctgtacgagctcatcatcacccgctactcggagcccgacctggcggtcgactttgacaatttcgtttgctgcctggtgcggctagagaccatgttccgatttttcaaaactctggacacagatctggatggagttgtgacctttgacttgtttaagtggttgcagctgaccatgtttgcatgaggcagggactcggtcccccttgccgtgctcccctccctcctcgtctgccaagcctcgcctcctaccacaccacaccaggccaccccagctgcaagtgccttccttggagcagagaggcagcctcgtcctcctgtcccctctcctcccagccaccatcgttcatctgctccgggcagaactgtgtggcccctgcctgtgccagccatgggctcgggatggactccctgggccccacccattgccaagccaggaaggcagctttcgcttgttcctgcctcgggacagccccgggtttccccagcatcctgatgtgtcccctctccccacttcagaggccacccactcagcaccaccggcctggccttgcctgcagactataaactataaccactagctcgacacagtctgcagtccaggcgtgtggagccgcctcccggctcggggaggccccggggctgggaacgcctgtgccttcctgcgccgaagccaacgccccctctgtccttccctggccctgctgccgaccaggagctgcccagcctgtgggcggtcggccttccctccttcgctccttttttatattagtgattttaaaggggactcttcagggacttgtgtactggttatgggggtgccagaggcactaggcttggggtggggaggtcccgtgttccatatagaggaaccccaaataataaaaggccccacatctgtctgtga

SEQ ID NO: 64805 - DNA, 2643 bp, Homo sapiens
ctgcagtgagtagggttgttacattttacagatgaggaaactgaggcaaaatgtcttgttagggtcacacaggctgtgagtgagccatgccccagctctccagccccttggccaggacaaggagcctggagtctgggtctgggggtggcccctgagggtgggctgagtgggcagctgcagccctgctccctcctccctcccaccagctggtgggccagccggccgtacacttgaagcgtgacttcttcctggccaatgcgtctcgggcgcgctcagagcagttcatcaacctgcgagaggtcagcacccgcttccgcctgccacccggggagtatgtggtggtgccctccaccttcgagcccaacaaggagggcgacttcgtgctgcgcttcttctcagagaagagtgctgggactgtggagctggatgaccagatccaggccaatctccccgatgagcaagtgctctcagaagaggagattgacgagaacttcaaggccctcttcaggcagctggcaggggaggacatggagatcagcgtgaaggagttgcggacaatcctcaataggatcatcagcaaacacaaagacctgcggaccaagggcttcagcctagagtcgtgccgcagcatggtgaacctcatggatcctgatccggatgcggaacccctggggcgaggtggagtggacgggagcctggagcgacagctcctcagagtggaacaacgtggacccatatgaacgggaccagctccgggtcaagatggaggacggggagttctggatgtcattccgagacttcatgcgggagttcacccgcctggagatctgcaacctcacacccgacgccctcaagagccggaccatccgcaaatggaacaccacactctacgaaggcacctggcggcgggggagcaccgcggggggctgccgaaactacccagccaccttctgggtgaaccctcagttcaagatccggctggatgagacggatgacccggacgactacggggaccgcgagtcaggctgcagcttcgtgctcgcccttatgcagaagcaccgtcgccgcgagcgccgcttcggccgcgacatggagactattggcttcgcggtctacgaggtccctccggagctggtgggccagccggccgtacacttgaagcgtgacttcttcctggccaatgcgtctcgggcgcgctcagagcagttcatcaacctgcgagaggtcagcacccgcttccgcctgccacccggggagtatgtggtggtgccctccaccttcgagcccaacaaggagggcgacttcgtgctgcgcttcttctcagagaagagtgctgggactgtggagctggatgaccagatccaggccaatctccccgatgagcaagtgctctcagaagaggagattgacgagaacttcaaggccctcttcaggcagctggcaggggaggacatggagatcagcgtgaaggagttgcggacaatcctcaataggatcatcagcaaacacaaagacctgcggaccaagggcttcagcctagagtcgtgccgcagcatggtgaacctcatggatcgtgatggcaatgggaagctgggcctggtggagttcaacatcctgtggaaccgcatccggaattacctgtccatcttccggaagtttgacctggacaagtcgggcagcatgagtgcctacgagatgcggatggccattgagtcggcaggcttcaagctcaacaagaagctgtacgagctcatcatcacccgctactcggagcccgacctggcggtcgactttgacaatttcgtttgctgcctggtgcggctagagaccatgttccgatttttcaaaactctggacacagatctggatggagttgtgacctttgacttgtttaagtggttgcagctgaccatgtttgcatgaggcagggactcggtcccccttgccgtgctcccctccctcctcgtctgccaagcctcgcctcctaccacaccacaccaggccaccccagctgcaagtgccttccttggagcagagaggcagcctcgtcctcctgtcccctctcctcccagccaccatcgttcatctgctccgggcagaactgtgtggcccctgcctgtgccagccatgggctcgggatggactccctgggccccacccattgccaagccaggaaggcagctttcgcttgttcctgcctcgggacagccccgggtttccccagcatcctgatgtgtcccctctccccacttcagaggccacccactcagcaccaccggcctggccttgcctgcagactataaactataaccactagctcgacacagtctgcagtccaggcgtgtggagccgcctcccggctcggggaggccccggggctgggaacgcctgtgccttcctgcgccgaagccaacgccccctctgtccttccctggccctgctgccgaccaggagctgcccagcctgtgggcggtcggccttccctccttcgctccttttttatattagtgattttaaaggggactcttcagggacttgtgtactggttatgggggtgccagaggcactaggcttggggtggggaggtcccgtgttccatatagaggaaccccaaataataaaaggccccacatctgtctgtga

SEQ ID NO: 64806 - DNA, 2105 bp, Homo sapiens
cagactggccctgatgagaccaccccctagaagcggaaccttggcgcttgaccttgaggaggccacctgggctgggccgggggaagacaggccagggtagacaggccccagggacagaggccaggcaggtcagtgcccaccagccctggcagagccctgctcctcacagctcctcagagtggaacaacgtggacccatatgaacgggaccagctccgggtcaagatggaggacggggagttctggatgtcattccgagacttcatgcgggagttcacccgcctggagatctgcaacctcacacccgacgccctcaagagccggaccatccgcaaatggaacaccacactctacgaaggcacctggcggcgggggagcaccgcggggggctgccgaaactacccagccaccttctgggtgaaccctcagttcaagatccggctggatgagacggatgacccggacgactacggggaccgcgagtcaggctgcagcttcgtgctcgcccttatgcagaagcaccgtcgccgcgagcgccgcttcggccgcgacatggagactattggcttcgcggtctacgaggtccctccggagctggtgggccagccggccgtacacttgaagcgtgacttcttcctggccaatgcgtctcgggcgcgctcagagcagttcatcaacctgcgagaggtcagcacccgcttccgcctgccacccggggagtatgtggtggtgccctccaccttcgagcccaacaaggagggcgacttcgtgctgcgcttcttctcagagaagagtgctgggactgtggagctggatgaccagatccaggccaatctccccgatgagcaagtgctctcagaagaggagattgacgagaacttcaaggccctcttcaggcagctggcaggggaggacatggagatcagcgtgaaggagttgcggacaatcctcaataggatcatcagcaaacacaaagacctgcggaccaagggcttcagcctagagtcgtgccgcagcatggtgaacctcatggatcgtgatggcaatgggaagctgggcctggtggagttcaacatcctgtggaaccgcatccggaattacctgtccatcttccggaagtttgacctggacaagtcgggcagcatgagtgcctacgagatgcggatggccattgagtcggcaggcttcaagctcaacaagaagctgtacgagctcatcatcacccgctactcggagcccgacctggcggtcgactttgacaatttcgtttgctgcctggtgcggctagagaccatgttccgatttttcaaaactctggacacagatctggatggagttgtgacctttgacttgtttaagtggttgcagctgaccatgtttgcatgaggcagggactcggtcccccttgccgtgctcccctccctcctcgtctgccaagcctcgcctcctaccacaccacaccaggccaccccagctgcaagtgccttccttggagcagagaggcagcctcgtcctcctgtcccctctcctcccagccaccatcgttcatctgctccgggcagaactgtgtggcccctgcctgtgccagccatgggctcgggatggactccctgggccccacccattgccaagccaggaaggcagctttcgcttgttcctgcctcgggacagccccgggtttccccagcatcctgatgtgtcccctctccccacttcagaggccacccactcagcaccaccggcctggccttgcctgcagactataaactataaccactagctcgacacagtctgcagtccaggcgtgtggagccgcctcccggctcggggaggccccggggctgggaacgcctgtgccttcctgcgccgaagccaacgccccctctgtccttccctggccctgctgccgaccaggagctgcccagcctgtgggcggtcggccttccctccttcgctccttttttatattagtgattttaaaggggactcttcagggacttgtgtactggttatgggggtgccagaggcactaggcttggggtggggaggtcccgtgttccatatagaggaaccccaaataataaaaggccccacatctgtctgtga

SEQ ID NO: 64807 - DNA, 3025 bp, Homo sapiens
  misc_feature (59)..(59): n is a, c, g, or t
  misc_feature (81)..(81): n is a, c, g, or t
cgcagcgagcccggtccccctgtcgttccccggggagcgctgagccggaccggcgtggntggggaaggggagtggcgcggncctgcggggtgaggctgccgtttgctgagtgtccggcaggggtctgctcgctgccagcccggcccctcctcagagcagctgccgcagcccgaggtaatctcggccccgcgccggggctggctgggaacggcgggagcagcttcggtcgcgcggagcgaggggagctggggaccgggcgggcccgggggctgcgggaggcggcgccgccgcacaatcgccccggaatgcccgccagggcgcgcgtggggtgcggccgtcccgccctcaacttcgactgctgcccctgtttaaaaataccccttgcccgcccctccccctcgtttccccgcgtgcccttccgccgcgccccagcccccgcatgtccccccgcgctggcccctccccggggactgctctgccttttactaatttgtcctctcgcggaattggcccccggcctgcggagggaggggcggggagacaccgtgagtaagagatagtcagagaccgtgccggagagataagggagagccgagaggaagcggggtaggagccccaggaggaggaggaggagaaggagagagggagggcggagggcggaggggcggcgggaggagggcggggaggagcgctcttcctggttgggccctgccctgagctgccaccgggaagccagcctcagggactgcagcgacccccaaacacccctcccccaggatgtcggaggagatcatcacgccggtgtactgcactggggtgtcagcccaagtgcagaagcagcgggccagggagctgggcctgggccgccatgagaatgccatcaagtacctgggccaggattatgagcagctgcgggtgcgatgcctgcagagtgggaccctcttccgtgatgaggccttccccccggtaccccagagcctgggttacaaggacctgggtcccaattcctccaagacctatggcatcaagtggaagcgtcccacggaactgctgtcaaacccccagttcattgtggatggagctacccgcacagacatctgccagggagcactgggggactgctggctcttggcggccatcgcctccctcactctcaacgacaccctcctgcaccgagtggttccgcacggccagagcttccagaatggctatgccggcatcttccatttccagctgtggcaatttggggagtgggtggacgtggtcgtggatgacctgctgcccatcaaggacgggaagctagtgttcgtgcactctgccgaaggcaacgagttctggagcgccctgcttgagaaggcctatgccaaggtaaatggcagctacgaggccctgtcagggggcagcacctcagagggctttgaggacttcacaggcggggttaccgagtggtacgagttgcgcaaggctcccagtgacctctaccagatcatcctcaaggcgctggagcggggctccctgctgggctgctccatagacatctccagcgttctagacatggaggccatcactttcaagaagttggtgaagggccatgcctactctgtgaccggggccaagcaggtgaactaccgaggccaggtggtgagcctgatccggatgcggaacccctggggcgaggtggagtggacgggagcctggagcgacagctcctcagagtggaacaacgtggacccatatgaacgggaccagctccgggtcaagatggaggacggggagttctggatgtcattccgagacttcatgcgggagttcacccgcctggagatctgcaacctcacacccgacgccctcaagagccggaccatccgcaaatggaacaccacactctacgaaggcacctggcggcgggggagcaccgcggggggctgccgaaactacccagccaccttctgggtgaaccctcagttcaagatccggctggatgagacggatgacccggacgactacggggaccgcgagtcaggctgcagcttcgtgctcgcccttatgcagaagcaccgtcgccgcgagcgccgcttcggccgcgacatggagactattggcttcgcggtctacgaggtccctccggagctggtgggccagccggccgtacacttgaagcgtgacttcttcctggccaatgcgtctcgggcgcgctcagagcagttcatcaacctgcgagaggtcagcacccgcttccgcctgccacccggggagtatgtggtggtgccctccaccttcgagcccaacaaggagggcgacttcgtgctgcgcttcttctcagagaagagtgctgggactgtggagctggatgaccagatccaggccaatctccccgatgagcaagtgctctcagaagaggagattgacgagaacttcaaggccctcttcaggcagctggcaggggaggacatggagatcagcgtgaaggagttgcggacaatcctcaataggatcatcagcaaacacaaagacctgcggaccaagggcttcagcctagagtcgtgccaagccaggaaggcagctttcgcttgttcctgcctcgggacagccccgggtttccccagcatcctgatgtgtcccctctccccacttcagaggccacccactcagcaccaccggcctggccttgcctgcagactataaactataaccactagctcgacacagtctgcagtccaggcgtgtggagccgcctcccggctcggggaggccccggggctgggaacgcctgtgccttcctgcgccgaagccaacgccccctctgtccttccctggccctgctgccgaccaggagctgcccagcctgtgggcggtcggccttccctccttcgctccttttttatattagtgattttaaaggggactcttcagggacttgtgtactggttatgggggtgccagaggcactaggcttggggtggggaggtcccgtgttccatatagaggaaccccaaataataaaaggccccacatctgtctgtga

SEQ ID NO: 64808 - DNA, 1718 bp, Homo sapiens
ctgcagtgagtagggttgttacattttacagatgaggaaactgaggcaaaatgtcttgttagggtcacacaggctgtgagtgagccatgccccagctctccagccccttggccaggacaaggagcctggagtctgggtctgggggtggcccctgagggtgggctgagtgggcagctgcagccctgctccctcctccctcccaccagctggtgggccagccggccgtacacttgaagcgtgacttcttcctggccaatgcgtctcgggcgcgctcagagcagttcatcaacctgcgagaggtcagcacccgcttccgcctgccacccggggagtatgtggtggtgccctccaccttcgagcccaacaaggagggcgacttcgtgctgcgcttcttctcagagaagagtgctgggactgtggagctggatgaccagatccaggccaatctccccgatgagcaagtgctctcagaagaggagattgacgagaacttcaaggccctcttcaggcagctggcaggggaggacatggagatcagcgtgaaggagttgcggacaatcctcaataggatcatcagcaaacacaaagacctgcggaccaagggcttcagcctagagtcgtgccgcagcatggtgaacctcatggatcgtgatggcaatgggaagctgggcctggtggagttcaacatcctgtggaaccgcatccggaattacctgtccatcttccggaagtttgacctggacaagtcgggcagcatgagtgcctacgagatgcggatggccattgagtcggcaggcttcaagctcaacaagaagctgtacgagctcatcatcacccgctactcggagcccgacctggcggtcgactttgacaatttcgtttgctgcctggtgcggctagagaccatgttccgatttttcaaaactctggacacagatctggatggagttgtgacctttgacttgtttaagtggttgcagctgaccatgtttgcatgaggcagggactcggtcccccttgccgtgctcccctccctcctcgtctgccaagcctcgcctcctaccacaccacaccaggccaccccagctgcaagtgccttccttggagcagagaggcagcctcgtcctcctgtcccctctcctcccagccaccatcgttcatctgctccgggcagaactgtgtggcccctgcctgtgccagccatgggctcgggatggactccctgggccccacccattgccaagccaggaaggcagctttcgcttgttcctgcctcgggacagccccgggtttccccagcatcctgatgtgtcccctctccccacttcagaggccacccactcagcaccaccggcctggccttgcctgcagactataaactataaccactagctcgacacagtctgcagtccaggcgtgtggagccgcctcccggctcggggaggccccggggctgggaacgcctgtgccttcctgcgccgaagccaacgccccctctgtccttccctggccctgctgccgaccaggagctgcccagcctgtgggcggtcggccttccctccttcgctccttttttatattagtgattttaaaggggactcttcagggacttgtgtactggttatgggggtgccagaggcactaggcttggggtggggaggtcccgtgttccatatagaggaaccccaaataataaaaggccccacatctgtctgtga

SEQ ID NO: 64809 - DNA, 1166 bp, Homo sapiens
gggcgttctagaggatcccaatcagtttacacaaagacctgcggaccaagggcttcagcctagagtcgtgccgcagcatggtgaacctcatggatcgtgatggcaatgggaagctgggcctggtggagttcaacatcctgtggaaccgcatccggaattacctgtccatcttccggaagtttgacctggacaagtcgggcagcatgagtgcctacgagatgcggatggccattgagtcggcaggcttcaagctcaacaagaagctgtacgagctcatcatcacccgctactcggagcccgacctggcggtcgactttgacaatttcgtttgctgcctggtgcggctagagaccatgttccgatttttcaaaactctggacacagatctggatggagttgtgacctttgacttgtttaagtggttgcagctgaccatgtttgcatgaggcagggactcggtcccccttgccgtgctcccctccctcctcgtctgccaagcctcgcctcctaccacaccacaccaggccaccccagctgcaagtgccttccttggagcagagaggcagcctcgtcctcctgtcccctctcctcccagccaccatcgttcatctgctccgggcagaactgtgtggcccctgcctgtgccagccatgggctcgggatggactccctgggccccacccattgccaagccaggaaggcagctttcgcttgttcctgcctcgggacagccccgggtttccccagcatcctgatgtgtcccctctccccacttcagaggccacccactcagcaccaccggcctggccttgcctgcagactataaactataaccactagctcgacacagtctgcagtccaggcgtgtggagccgcctcccggctcggggaggccccggggctgggaacgcctgtgccttcctgcgccgaagccaacgccccctctgtccttccctggccctgctgccgaccaggagctgcccagcctgtgggcggtcggccttccctccttcgctccttttttatattagtgattttaaaggggactcttcagggacttgtgtactggttatgggggtgccagaggcactaggcttggggtggggaggtcccgtgttccatatagaggaaccccaaataataaaaggccccacatctgtctgtga

SEQ ID NO: 64810 - DNA, 1107 bp, Homo sapiens
ttctagaggatccaattcaacatgaagcacatagatcgtgatggcaatgggaagctgggcctggtggagttcaacatcctgtggaaccgcatccggaattacctgtccatcttccggaagtttgacctggacaagtcgggcagcatgagtgcctacgagatgcggatggccattgagtcggcaggcttcaagctcaacaagaagctgtacgagctcatcatcacccgctactcggagcccgacctggcggtcgactttgacaatttcgtttgctgcctggtgcggctagagaccatgttccgatttttcaaaactctggacacagatctggatggagttgtgacctttgacttgtttaagtggttgcagctgaccatgtttgcatgaggcagggactcggtcccccttgccgtgctcccctccctcctcgtctgccaagcctcgcctcctaccacaccacaccaggccaccccagctgcaagtgccttccttggagcagagaggcagcctcgtcctcctgtcccctctcctcccagccaccatcgttcatctgctccgggcagaactgtgtggcccctgcctgtgccagccatgggctcgggatggactccctgggccccacccattgccaagccaggaaggcagctttcgcttgttcctgcctcgggacagccccgggtttccccagcatcctgatgtgtcccctctccccacttcagaggccacccactcagcaccaccggcctggccttgcctgcagactataaactataaccactagctcgacacagtctgcagtccaggcgtgtggagccgcctcccggctcggggaggccccggggctgggaacgcctgtgccttcctgcgccgaagccaacgccccctctgtccttccctggccctgctgccgaccaggagctgcccagcctgtgggcggtcggccttccctccttcgctccttttttatattagtgattttaaaggggactcttcagggacttgtgtactggttatgggggtgccagaggcactaggcttggggtggggaggtcccgtgttccatatagaggaaccccaaataataaaaggccccacatctgtctgtga

SEQ ID NO: 64811 - DNA, 1075 bp, Homo sapiens
gctcgctgattctagaggatccctaatccggatacggttctacatcctgtggaaccgcatccggaattacctgtccatcttccggaagtttgacctggacaagtcgggcagcatgagtgcctacgagatgcggatggccattgagtcggcaggcttcaagctcaacaagaagctgtacgagctcatcatcacccgctactcggagcccgacctggcggtcgactttgacaatttcgtttgctgcctggtgcggctagagaccatgttccgatttttcaaaactctggacacagatctggatggagttgtgacctttgacttgtttaagtggttgcagctgaccatgtttgcatgaggcagggactcggtcccccttgccgtgctcccctccctcctcgtctgccaagcctcgcctcctaccacaccacaccaggccaccccagctgcaagtgccttccttggagcagagaggcagcctcgtcctcctgtcccctctcctcccagccaccatcgttcatctgctccgggcagaactgtgtggcccctgcctgtgccagccatgggctcgggatggactccctgggccccacccattgccaagccaggaaggcagctttcgcttgttcctgcctcgggacagccccgggtttccccagcatcctgatgtgtcccctctccccacttcagaggccacccactcagcaccaccggcctggccttgcctgcagactataaactataaccactagctcgacacagtctgcagtccaggcgtgtggagccgcctcccggctcggggaggccccggggctgggaacgcctgtgccttcctgcgccgaagccaacgccccctctgtccttccctggccctgctgccgaccaggagctgcccagcctgtgggcggtcggccttccctccttcgctccttttttatattagtgattttaaaggggactcttcagggacttgtgtactggttatgggggtgccagaggcactaggcttggggtggggaggtcccgtgttccatatagaggaaccccaaataataaaaggccccacatctgtctgtga

SEQ ID NO: 64812 - DNA, 972 bp, Homo sapiens
agtcgctctggtgagcgcgacgtaatgcggatggccattgagtcggcaggcttcaagctcaacaagaagctgtacgagctcatcatcacccgctactcggagcccgacctggcggtcgactttgacaatttcgtttgctgcctggtgcggctagagaccatgttccgatttttcaaaactctggacacagatctggatggagttgtgacctttgacttgtttaagtggttgcagctgaccatgtttgcatgaggcagggactcggtcccccttgccgtgctcccctccctcctcgtctgccaagcctcgcctcctaccacaccacaccaggccaccccagctgcaagtgccttccttggagcagagaggcagcctcgtcctcctgtcccctctcctcccagccaccatcgttcatctgctccgggcagaactgtgtggcccctgcctgtgccagccatgggctcgggatggactccctgggccccacccattgccaagccaggaaggcagctttcgcttgttcctgcctcgggacagccccgggtttccccagcatcctgatgtgtcccctctccccacttcagaggccacccactcagcaccaccggcctggccttgcctgcagactataaactataaccactagctcgacacagtctgcagtccaggcgtgtggagccgcctcccggctcggggaggccccggggctgggaacgcctgtgccttcctgcgccgaagccaacgccccctctgtccttccctggccctgctgccgaccaggagctgcccagcctgtgggcggtcggccttccctccttcgctccttttttatattagtgattttaaaggggactcttcagggacttgtgtactggttatgggggtgccagaggcactaggcttggggtggggaggtcccgtgttccatatagaggaaccccaaataataaaaggccccacatctgtctgtga

SEQ ID NO: 64813 - DNA, 1774 bp, Homo sapiens
  misc_feature (59)..(59): n is a, c, g, or t
  misc_feature (81)..(81): n is a, c, g, or t
cgcagcgagcccggtccccctgtcgttccccggggagcgctgagccggaccggcgtggntggggaaggggagtggcgcggncctgcggggtgaggctgccgtttgctgagtgtccggcaggggtctgctcgctgccagcccggcccctcctcagagcagctgccgcagcccgaggtaatctcggccccgcgccggggctggctgggaacggcgggagcagcttcggtcgcgcggagcgaggggagctggggaccgggcgggcccgggggctgcgggaggcggcgccgccgcacaatcgccccggaatgcccgccagggcgcgcgtggggtgcggccgtcccgccctcaacttcgactgctgcccctgtttaaaaataccccttgcccgcccctccccctcgtttccccgcgtgcccttccgccgcgccccagcccccgcatgtccccccgcgctggcccctccccggggactgctctgccttttactaatttgtcctctcgcggaattggcccccggcctgcggagggaggggcggggagacaccgtgagtaagagatagtcagagaccgtgccggagagataagggagagccgagaggaagcggggtaggagccccaggaggaggaggaggagaaggagagagggagggcggagggcggaggggcggcgggaggagggcggggaggagcgctcttcctggttgggccctgccctgagctgccaccgggaagccagcctcagggactgcagcgacccccaaacacccctcccccaggatgtcggaggagatcatcacgccggtgtactgcactggggtgtcagcccaagtgcagaagcagcgggccagggagctgggcctgggccgccatgagaatgccatcaagtacctgggccaggattatgagcagctgcgggtgcgatgcctgcagagtgggaccctcttccgtgatgaggccttccccccggtaccccagagcctgggttacaaggacctgggtcccaattcctccaagacctatggcatcaagtggaagcgtcccacggaactgctgtcaaacccccagttcattgtggatggagctacccgcacagacatctgccagggagcactgggggactgctggctcttggcggccatcgcctccctcactctcaacgacaccctcctgcaccgagtggttccgcacggccagagcttccagaatggctatgccggcatcttccatttccagctgtggcaatttggggagtgggtggacgtggtcgtggatgacctgctgcccatcaaggacgggaagctagtgttcgtgcactctgccgaaggcaacgagttctggagcgccctgcttgagaaggcctatgccaaggtaaatggcagctacgaggccctgtcagggggcagcacctcagagggctttgaggacttcacaggcggggttaccgagtggtacgagttgcgcaaggctcccagtgacctctaccagatcatcctcaaggcgctggagcggggctccctgctgggctgctccatagacatctccagcgttctagacatggaggccatcactttcaagaagttggtgaagggccatgcctactctgtgaccggggccaagcaggtgaactaccgaggccaggtggtgagcctgatccggatgcggaacccctggggcgaggtggagtggacgggagcctggagcgacagctcctcagagtggaacaacgtggacccatatgcatctgtctgtgatgtgtttctccccagcctactgc

SEQ ID NO: 64814 - DNA, 1805 bp, Homo sapiens
  misc_feature (59)..(59): n is a, c, g, or t
  misc_feature (81)..(81): n is a, c, g, or t
cgcagcgagcccggtccccctgtcgttccccggggagcgctgagccggaccggcgtggntggggaaggggagtggcgcggncctgcggggtgaggctgccgtttgctgagtgtccggcaggggtctgctcgctgccagcccggcccctcctcagagcagctgccgcagcccgaggtaatctcggccccgcgccggggctggctgggaacggcgggagcagcttcggtcgcgcggagcgaggggagctggggaccgggcgggcccgggggctgcgggaggcggcgccgccgcacaatcgccccggaatgcccgccagggcgcgcgtggggtgcggccgtcccgccctcaacttcgactgctgcccctgtttaaaaataccccttgcccgcccctccccctcgtttccccgcgtgcccttccgccgcgccccagcccccgcatgtccccccgcgctggcccctccccggggactgctctgccttttactaatttgtcctctcgcggaattggcccccggcctgcggagggaggggcggggagacaccgtgagtaagagatagtcagagaccgtgccggagagataagggagagccgagaggaagcggggtaggagccccaggaggaggaggaggagaaggagagagggagggcggagggcggaggggcggcgggaggagggcggggaggagcgctcttcctggttgggccctgccctgagctgccaccgggaagccagcctcagggactgcagcgacccccaaacacccctcccccaggatgtcggaggagatcatcacgccggtgtactgcactggggtgtcagcccaagtgcagaagcagcgggccagggagctgggcctgggccgccatgagaatgccatcaagtacctgggccaggattatgagcagctgcgggtgcgatgcctgcagagtgggaccctcttccgtgatgaggccttccccccggtaccccagagcctgggttacaaggacctgggtcccaattcctccaagacctatggcatcaagtggaagcgtcccacggaactgctgtcaaacccccagttcattgtggatggagctacccgcacagacatctgccagggagcactgggggactgctggctcttggcggccatcgcctccctcactctcaacgacaccctcctgcaccgagtggttccgcacggccagagcttccagaatggctatgccggcatcttccatttccagctgtggcaatttggggagtgggtggacgtggtcgtggatgacctgctgcccatcaaggacgggaagctagtgttcgtgcactctgccgaaggcaacgagttctggagcgccctgcttgagaaggcctatgccaaggtaaatggcagctacgaggccctgtcagggggcagcacctcagagggctttgaggacttcacaggcggggttaccgagtggtacgagttgcgcaaggctcccagtgacctctaccagatcatcctcaaggcgctggagcggggctccctgctgggctgctccatagacatctccagcgttctagacatggaggccatcactttcaagaagttggtgaagggccatgcctactctgtgaccggggccaagcaggtactgccctgggtggggccttccctgaagggcggttcctgccccctggcctgtccttgcctctctggcacctgaccagggctgtggaaggtgctggctcctcctttcccctcctgcagctcgcccctgagttagcagctcgcgccctgagttagcagctcgccctgagttagcagctcgccctg

SEQ ID NO: 64815 - DNA, 1529 bp, Homo sapiens
  misc_feature (59)..(59): n is a, c, g, or t
  misc_feature (81)..(81): n is a, c, g, or t
cgcagcgagcccggtccccctgtcgttccccggggagcgctgagccggaccggcgtggntggggaaggggagtggcgcggncctgcggggtgaggctgccgtttgctgagtgtccggcaggggtctgctcgctgccagcccggcccctcctcagagcagctgccgcagcccgaggtaatctcggccccgcgccggggctggctgggaacggcgggagcagcttcggtcgcgcggagcgaggggagctggggaccgggcgggcccgggggctgcgggaggcggcgccgccgcacaatcgccccggaatgcccgccagggcgcgcgtggggtgcggccgtcccgccctcaacttcgactgctgcccctgtttaaaaataccccttgcccgcccctccccctcgtttccccgcgtgcccttccgccgcgccccagcccccgcatgtccccccgcgctggcccctccccggggactgctctgccttttactaatttgtcctctcgcggaattggcccccggcctgcggagggaggggcggggagacaccgtgagtaagagatagtcagagaccgtgccggagagataagggagagccgagaggaagcggggtaggagccccaggaggaggaggaggagaaggagagagggagggcggagggcggaggggcggcgggaggagggcggggaggagcgctcttcctggttgggccctgccctgagctgccaccgggaagccagcctcagggactgcagcgacccccaaacacccctcccccaggatgtcggaggagatcatcacgccggtgtactgcactggggtgtcagcccaagtgcagaagcagcgggccagggagctgggcctgggccgccatgagaatgccatcaagtacctgggccaggattatgagcagctgcgggtgcgatgcctgcagagtgggaccctcttccgtgatgaggccttccccccggtaccccagagcctgggttacaaggacctgggtcccaattcctccaagacctatggcatcaagtggaagcgtcccacggaactgctgtcaaacccccagttcattgtggatggagctacccgcacagacatctgccagggagcactgggggactgctggctcttggcggccatcgcctccctcacttcagcaccaccggcctggccttgcctgcagactataaactataaccactagctcgacacagtctgcagtccaggcgtgtggagccgcctcccggctcggggaggccccggggctgggaacgcctgtgccttcctgcgccgaagccaacgccccctctgtccttccctggccctgctgccgaccaggagctgcccagcctgtgggcggtcggccttccctccttcgctccttttttatattagtgattttaaaggggactcttcagggacttgtgtactggttatgggggtgccagaggcactaggcttggggtggggaggtcccgtgttccatatagaggaaccccaaataataaaaggccccacatctgtctgtga

SEQ ID NO: 64816 - DNA, 2354 bp, Homo sapiens
  misc_feature (59)..(59): n is a, c, g, or t
  misc_feature (81)..(81): n is a, c, g, or t
cgcagcgagcccggtccccctgtcgttccccggggagcgctgagccggaccggcgtggntggggaaggggagtggcgcggncctgcggggtgaggctgccgtttgctgagtgtccggcaggggtctgctcgctgccagcccggcccctcctcagagcagctgccgcagcccgaggtaatctcggccccgcgccggggctggctgggaacggcgggagcagcttcggtcgcgcggagcgaggggagctggggaccgggcgggcccgggggctgcgggaggcggcgccgccgcacaatcgccccggaatgcccgccagggcgcgcgtggggtgcggccgtcccgccctcaacttcgactgctgcccctgtttaaaaataccccttgcccgcccctccccctcgtttccccgcgtgcccttccgccgcgccccagcccccgcatgtccccccgcgctggcccctccccggggactgctctgccttttactaatttgtcctctcgcggaattggcccccggcctgcggagggaggggcggggagacaccgtgagtaagagatagtcagagaccgtgccggagagataagggagagccgagaggaagcggggtaggagccccaggaggaggaggaggagaaggagagagggagggcggagggcggaggggcggcgggaggagggcggggaggagcgctcttcctggttgggccctgccctgagctgccaccgggaagccagcctcagggactgcagcgacccccaaacacccctcccccaggatgtcggaggagatcatcacgccggtgtactgcactggggtgtcagcccaagtgcagaagcagcgggccagggagctgggcctgggccgccatgagaatgccatcaagtacctgggccaggattatgagcagctgcgggtgcgatgcctgcagagtgggaccctcttccgtgatgaggccttccccccggtaccccagagcctgggttacaaggacctgggtcccaattcctccaagacctatggcatcaagtggaagcgtcccacggaactgctgtcaaacccccagttcattgtggatggagctacccgcacagacatctgccagggagcactgggggactgctggctcttggcggccatcgcctccctcactctcaacgacaccctcctgcaccgagtggttccgcacggccagagcttccagaatggctatgccggcatcttccatttccagctgtggcaatttggggagtgggtggacgtggtcgtggatgacctgctgcccatcaaggacgggaagctagtgttcgtgcactctgccgaaggcaacgagttctggagcgccctgcttgagaaggcctatgccaaaagtgagtagcggctgagggggcaactccagcttccagctccccctaggggtgggggctcatgactgtcttctcagagggtcctgcttgatgccagagtgctgacctggagctgcccacagggtaaatggcagctacgaggccctgtcagggggcagcacctcagagggctttgaggacttcacaggcggggttaccgagtggtacgagttgcgcaaggctcccagtgacctctaccagatcatcctcaaggcgctggagcggggctccctgctgggctgctccatagacatctccagcgttctagacatggaggccatcactttcaagaagttggtgaagggccatgcctactctgtgaccggggccaagcaggtactgccctgggtggggccttccctgaagggcggttcctgccccctggcctgtccttgcctctctggcacctgaccagggctgtggaaggtgctggctcctcctttcccctcctgcagcaccttatctctcttctggggacacccatctgagatgcctatcatgtcctgccctgactgactgtagttcatgtgtgcagctgcctgcctgggctgtgaattccaagaggacaggcttcatctgggtgctgagcagggcttggagaggatgagggtatgggaggcggagtgttaaagtgcgtgcatgggccaggtgcactggctcacacctgtaatcccaacactttgggaggctgaggtgggcagatcacctgaggtcaggagttcgagaccagcctggccaacatggtgaaactctgtctctactaaaaatacaaaaactacctgggtgtggtggcaggtgcctgtaattccagctatttgggaggctgaggcaagagaattgaattgcttgaacccaggaggcggaggttgcagtgagctgagatcgcaccactgcactccagcctgggtgacagagcaagactctgtctcaaaaaagaaaaaaaaaaaaa

SEQ ID NO: 64817 - DNA, 1390 bp, Homo sapiens
cctccatccacacggtttccttaagcagagcttttctcctcctcttctctgctagtgaagcactgcttaccctcctagcctacagcaagccctgccctgccccatctttctacccaatttctcgctcttctgtttcacactcatttctttttactttggactaattgtggctgttgggactttggcttgattgctaaaatactttacttgtacttcctgatgatacaaacaatcctgcccacttcctctgccagatattgcacccactcgtcaggatttgtgcgtccttgactctgccccacccagtgctcccagcaggggcaggtgcaggaagctcactaggtggagatgttggaattggtttttcttgcagacaaagacctgcggaccaagggcttcagcctagagtcgtgccgcagcatggtgaacctcatggatcgtgatggcaatgggaagctgggcctggtggagttcaacatcctgtggaaccgcatccggaattacctgtccatcttccggaagtttgacctggacaagtcgggcagcatgagtgcctacgagatgcggatggccattgagtcggcaggcttcaagctcaacaagaagctgtacgagctcatcatcacccgctactcggagcccgacctggcggtcgactttgacaatttcgtttgctgcctggtgcggctagagaccatgttccgatttttcaaaactctggacacagatctggatggagttgtgacctttgacttgtttaagtggttgcagctgaccatgtttgcatgaggcagggactcggtcccccttgccgtgctcccctccctcctcgtctgccaagcctcgcctcctaccacaccacaccaggccaccccagctgcaagtgccttccttggagcagagaggcagcctcgtcctcctgtcccctctcctcccagccaccatcgttcatctgctccgggcagaactgtgtggcccctgcctgtgccagccatgggctcgggatggactccctgggccccacccattgccaagccaggaaggcagctttcgcttgttcctgcctcgggacagccccgggtttccccagcatcctgatgtgtcccctctccccacttcagaggccacccactcagcaccaccggcctggccttgcctgcagactataaactataaccactagctcgacacagtctgcagtccaggcgtgtggagggcggtcggccttccctccttcgctccttttttatattagtgattttaaaggggactcttcagggacttgtgtactggttatgggggtgccagaggcactaggcttggggtggggaggtcccgtgttccatatagaggaaccccaaataataaaaggccccacatctgtctgtga

SEQ ID NO: 64818 - DNA, 1078 bp, Homo sapiens
  misc_feature (45)..(45): n is a, c, g, or t
gaccgacgctctctctggggggcgtgcgcagcatggtgaactcanggatcgtgatggcaatgggaagctgggcctggtggagttcaacatcctgtggaaccgcatccggaattacctgtccatcttccggaagtttgacctggacaagtcgggcagcatgagtgcctacgagatgcggatggccattgagtcggcaggcttcaagctcaacaagaagctgtacgagctcatcatcacccgctactcggagcccgacctggcggtcgactttgacaatttcgtttgctgcctggtgcggctagagaccatgttccgatttttcaaaactctggacacagatctggatggagttgtgacctttgacttgtttaagtggttgcagctgaccatgtttgcatgaggcagggactcggtcccccttgccgtgctcccctccctcctcgtctgccaagcctcgcctcctaccacaccacaccaggccaccccagctgcaagtgccttccttggagcagagaggcagcctcgtcctcctgtcccctctcctcccagccaccatcgttcatctgctccgggcagaactgtgtggcccctgcctgtgccagccatgggctcgggatggactccctgggccccacccattgccaagccaggaaggcagctttcgcttgttcctgcctcgggacagccccgggtttccccagcatcctgatgtgtcccctctccccacttcagaggccacccactcagcaccaccggcctggccttgcctgcagactataaactataaccactagctcgacacagtctgcagtccaggcgtgtggagccgcctccggctcggggaggccccggggctgggaacgcctgtgccttcctgcgccgaagccaacgccccctctgtcgggcggtcggccttccctccttcgctccttttttatattagtgattttaaaggggactcttcagggacttgtgtactggttatgggggtgccagaggcactaggcttggggtggggaggtcccgtgttccatatagaggaaccccaaataataaaaggccccacatctgtctgtga

SEQ ID NO: 64819 - DNA, 1473 bp, Homo sapiens
  misc_feature (59)..(59): n is a, c, g, or t
  misc_feature (81)..(81): n is a, c, g, or t
  misc_feature (1389)..(1389): n is a, c, g, or t
  misc_feature (1403)..(1403): n is a, c, g, or t
  misc_feature (1427)..(1427): n is a, c, g, or t
cgcagcgagcccggtccccctgtcgttccccggggagcgctgagccggaccggcgtggntggggaaggggagtggcgcggncctgcggggtgaggctgccgtttgctgagtgtccggcaggggtctgctcgctgccagcccggcccctcctcagagcagctgccgcagcccgaggtaatctcggccccgcgccggggctggctgggaacggcgggagcagcttcggtcgcgcggagcgaggggagctggggaccgggcgggcccgggggctgcgggaggcggcgccgccgcacaatcgccccggaatgcccgccagggcgcgcgtggggtgcggccgtcccgccctcaacttcgactgctgcccctgtttaaaaataccccttgcccgcccctccccctcgtttccccgcgtgcccttccgccgcgccccagcccccgcatgtccccccgcgctggcccctccccggggactgctctgccttttactaatttgtcctctcgcggaattggcccccggcctgcggagggaggggcggggagacaccgtgagtaagagatagtcagagaccgtgccggagagataagggagagccgagaggaagcggggtaggagccccaggaggaggaggaggagaaggagagagggagggcggagggcggaggggcggcgggaggagggcggggaggagcgctcttcctggttgggccctgccctgagctgccaccgggaagccagcctcagggactgcagcgacccccaaacacccctcccccaggatgtcggaggagatcatcacgccggtgtactgcactggggtgtcagcccaagtgcagaagcagcgggccagggagctgggcctgggccgccatgagaatgccatcaagtacctgggccaggattatgagcagctgcgggtgcgatgcctgcagagtgggaccctcttccgtgatgaggccttccccccggtaccccagagcctgggttacaaggacctgggtcccaattcctccaagacctatggcatcaagtggaagcgtcccacggaactgctgtcaaacccccagttcattgtggatggagctacccgcacagacatctgccagggagcactgggggactgctggctcttggcggccatcgcctccctcactctcaacgacaccctcctgcaccgagtggttccgcacggccagagcttccagaatggctatgccggcatcttccatttccagctgtggcaatttggggagtgggtggacgtggtcgtggatgacctgctgcccatcaaggacgggaagctagtgttcgtgcactctgccgaaggcaacgagttctggagcgccctgcttgagaaggcctatgccaaaggttaaaatggcaagcttacnaaggccctgttcangggggggcaaccacctccaaaaangggctttttgaaaggaacttccccaagggcggggggtttacccgaa

SEQ ID NO: 64820 - DNA, 1471 bp, Homo sapiens
  misc_feature (59)..(59): n is a, c, g, or t
  misc_feature (81)..(81): n is a, c, g, or t
cgcagcgagcccggtccccctgtcgttccccggggagcgctgagccggaccggcgtggntggggaaggggagtggcgcggncctgcggggtgaggctgccgtttgctgagtgtccggcaggggtctgctcgctgccagcccggcccctcctcagagcagctgccgcagcccgaggtaatctcggccccgcgccggggctggctgggaacggcgggagcagcttcggtcgcgcggagcgaggggagctggggaccgggcgggcccgggggctgcgggaggcggcgccgccgcacaatcgccccggaatgcccgccagggcgcgcgtggggtgcggccgtcccgccctcaacttcgactgctgcccctgtttaaaaataccccttgcccgcccctccccctcgtttccccgcgtgcccttccgccgcgccccagcccccgcatgtccccccgcgctggcccctccccggggactgctctgccttttactaatttgtcctctcgcggaattggcccccggcctgcggagggaggggcggggagacaccgtgagtaagagatagtcagagaccgtgccggagagataagggagagccgagaggaagcggggtaggagccccaggaggaggaggaggagaaggagagagggagggcggagggcggaggggcggcgggaggagggcggggaggagcgctcttcctggttgggccctgccctgagctgccaccgggaagccagcctcagggactgcagcgacccccaaacacccctcccccaggatgtcggaggagatcatcacgccggtgtactgcactggggtgtcagcccaagtgcagaagcagcgggccagggagctgggcctgggccgccatgagaatgccatcaagtacctgggccaggattatgagcagctgcgggtgcgatgcctgcagagtgggaccctcttccgtgatgaggccttccccccggtaccccagagcctgggttacaaggacctgggtcccaattcctccaagacctatggcatcaagtggaagcgtcccacggaactgctgtcaaacccccagttcattgtggatggagctacccgcacagacatctgccagggagcactgggggactgctggctcttggcggccatcgcctccctcactctcaacgacaccctcctgcaccgagtggttccgcacggccagagcttccagaatggctatgccggcatcttccatttccagctgtggcaatttggggagtgggtggacgtggtcgtggatgacctgctgcccatcaaggacgggaagctagtgttcgtgcactctgccgaaggcaacgagttctggagcgccctgcttgagaaggcctatgccaagtgagggaggcgatggccgccaagagccagcagtcccccagtgctccctggcagtgtctgtgcgggtagctccatccacaataaactggtgcggcagagggagt

SEQ ID NO: 64821 - DNA, 1033 bp, Homo sapiens
gctcgctgattctagaggatccctaatccggatacggttctacatcctgtggaaccgcatccggaattacctgtccatcttccggaagtttgacctggacaagtcgggcagcatgagtgcctacgagatgcggatggccattgagtcggcaggcttcaagctcaacaagaagctgtacgagctcatcatcacccgctactcggagcccgacctggcggtcgactttgacaatttcgtttgctgcctggtgcggctagagaccatgttccgatttttcaaaactctggacacagatctggatggagttgtgacctttgacttgtttaagtggttgcagctgaccatgtttgcatgaggcagggactcggtcccccttgccgtgctcccctccctcctcgtctgccaagcctcgcctcctaccacaccacaccaggccaccccagctgcaagtgccttccttggagcagagaggcagcctcgtcctcctgtcccctctcctcccagccaccatcgttcatctgctccgggcagaactgtgtggcccctgcctgtgccagccatgggctcgggatggactccctgggccccacccattgccaagccaggaaggcagctttcgcttgttcctgcctcgggacagccccgggtttccccagcatcctgatgtgtcccctctccccacttcagaggccacccactcagcaccaccggcctggccttgcctgcagactataaactataaccactagctcgacacagtctgcagtccaggcgtgtggagccgcctccggctcggggaggccccggggctgggaacgcctgtgccttcctgcgccgaagccaacgccccctctgtcgggcggtcggccttccctccttcgctccttttttatattagtgattttaaaggggactcttcagggacttgtgtactggttatgggggtgccagaggcactaggcttggggtggggaggtcccgtgttccatatagaggaaccccaaataataaaaggccccacatctgtctgtga

SEQ ID NO: 64822 - DNA, 922 bp, Homo sapiens
cctccatccacacggtttccttaagcagagcttttctcctcctcttctctgctagtgaagcactgcttaccctcctagcctacagcaagccctgccctgccccatctttctacccaatttctcgctcttctgtttcacactcatttctttttactttggactaattgtggctgttgggactttggcttgattgctaaaatactttacttgtacttcctgatgatacaaacaatcctgcccacttcctctgccagatattgcacccactcgtcaggatttgtgcgtccttgactctgccccacccagtgctcccagcaggggcaggtgcaggaagctcactaggtggagatgttggaattggtttttcttgcagacaaagacctgcggaccaagggcttcagcctagagtcgtgccgcagcatggtgaacctcatggatcgtgatggcaatgggaagctgggcctggtggagttcaacatcctgtggaaccgcatccggaattacctgtccatcttccggaagtttgacctggacaagtcgggcagcatgagtgcctacgagatgcggatggccattgagtcggcaggcttcaagctcaacaagaagctgtacgagctcatcatcacccgctactcggagcccgacctggcggtcgactttgacaatttcgtttgctgcctggtgcggctagagaccatgttccgatttttcaaaactctggacacagatctggatggagttgtgacctttgacttgtttaagtggttgcagctgaccatgtttgcatgaggcagggactcggtcccccttgccgtgctcccctccctcctcgtctgccaaaggcactaggcttggggtggggaggtcccgtgttccatatagaggaaccccaaataataaaaggccccacatctgtctgtga

SEQ ID NO: 64823 - DNA, 907 bp, Homo sapiens
cctccatccacacggtttccttaagcagagcttttctcctcctcttctctgctagtgaagcactgcttaccctcctagcctacagcaagccctgccctgccccatctttctacccaatttctcgctcttctgtttcacactcatttctttttactttggactaattgtggctgttgggactttggcttgattgctaaaatactttacttgtacttcctgatgatacaaacaatcctgcccacttcctctgccagatattgcacccactcgtcaggatttgtgcgtccttgactctgccccacccagtgctcccagcaggggcaggtgcaggaagctcactaggtggagatgttggaattggtttttcttgcagacaaagacctgcggaccaagggcttcagcctagagtcgtgccgcagcatggtgaacctcatggatcgtgatggcaatgggaagctgggcctggtggagttcaacatcctgtggaaccgcatccggaattacctgtccatcttccggaagtttgacctggacaagtcgggcagcatgagtgcctacgagatgcggatggccattgagtcggcaggcttcaagctcaacaagaagctgtacgagctcatcatcacccgctactcggagcccgacctggcggtcgactttgacaatttcgtttgctgcctggtgcggctagagaccatgttccgatttttcaaaactctggacacagatctggatggagttgtgacctttgacttgtttaagtggttgcagctgaccatgtttgcatgaggcagggactcggtcccccttgccgtgctcccctccctcctcgtctgccaagcctcgcctactaccatgatcaccacacaggattctttcataagatcctgtagagtcaccttcagca

SEQ ID NO: 64824 - DNA, 795 bp, Homo sapiens
agctcgatcctcactagtgcaggcctgttccgatttttcaaaactctggacacagatctggatggagttgtgacctttgacttgtttaagtggttgcagctgaccatgtttgcatgaggcagggactcggtcccccttgccgtgctcccctccctcctcgtctgccaagcctcgcctcctaccacaccacaccaggccaccccagctgcaagtgccttccttggagcagagaggcagcctcgtcctcctgtcccctctcctcccagccaccatcgttcatctgctccgggcagaactgtgtggcccctgcctgtgccagccatgggctcgggatggactccctgggccccacccattgccaagccaggaaggcagctttcgcttgttcctgcctcgggacagccccgggtttccccagcatcctgatgtgtcccctctccccacttcagaggccacccactcagcaccaccggcctggccttgcctgcagactataaactataaccactagctcgacacagtctgcagtccaggcgtgtggagccgcctccggctcggggaggccccggggctgggaacgcctgtgccttcctgcgccgaagccaacgccccctctgtcgggcggtcggccttccctccttcgctccttttttatattagtgattttaaaggggactcttcagggacttgtgtactggttatgggggtgccagaggcactaggcttggggtggggaggtcccgtgttccatatagaggaaccccaaataataaaaggccccacatctgtctgtga

SEQ ID NO: 64825 - DNA, 749 bp, Homo sapiens
tcttagtacctacctagtggggagtgtgaccttgactgtttaagtggttgcagctgaccatgtttgcatgaggcagggactcggtcccccttgccgtgctcccctccctcctcgtctgccaagcctcgcctcctaccacaccacaccaggccaccccagctgcaagtgccttccttggagcagagaggcagcctcgtcctcctgtcccctctcctcccagccaccatcgttcatctgctccgggcagaactgtgtggcccctgcctgtgccagccatgggctcgggatggactccctgggccccacccattgccaagccaggaaggcagctttcgcttgttcctgcctcgggacagccccgggtttccccagcatcctgatgtgtcccctctccccacttcagaggccacccactcagcaccaccggcctggccttgcctgcagactataaactataaccactagctcgacacagtctgcagtccaggcgtgtggagccgcctccggctcggggaggccccggggctgggaacgcctgtgccttcctgcgccgaagccaacgccccctctgtcgggcggtcggccttccctccttcgctccttttttatattagtgattttaaaggggactcttcagggacttgtgtactggttatgggggtgccagaggcactaggcttggggtggggaggtcccgtgttccatatagaggaaccccaaataataaaaggccccacatctgtctgtga

SEQ ID NO: 64826 - DNA, 482 bp, Homo sapiens
  misc_feature (482)..(482): n is a, c, g, or t
cagctgacctgcctgttctcccgcagtggttgcagctgaccatgtttgcatgaggcagggactcggtcccccttgccgtgctcccctccctcctcgtctgccaagcctcgcctcctaccacaccacaccaggccaccccagctgcaagtgccttccttggagcagagaggcagcctcgtcctcctgtcccctctcctcccagccaccatcgttcatctgctccgggcagaactgtgtggcccctgcctgtgccagccatgggctcgggatggactccctgggccccacccattgccaagccaggaaggcagctttcgcttgttcctgcctcgggacagccccgggtttccccagcatcctgatgtgtcccctctccccacttcagaggccacccactcagcaccaccggcctggccttgcctgcagactataaactataaccactagctcgacatatagctatgggggatcaactagagtcn

SEQ ID NO: 64827 - DNA, 3040 bp, Homo sapiens
  misc_feature (59)..(59): n is a, c, g, or t
  misc_feature (81)..(81): n is a, c, g, or t
cgcagcgagcccggtccccctgtcgttccccggggagcgctgagccggaccggcgtggntggggaaggggagtggcgcggncctgcggggtgaggctgccgtttgctgagtgtccggcaggggtctgctcgctgccagcccggcccctcctcagagcagctgccgcagcccgaggatgtcggaggagatcatcacgccggtgtactgcactggggtgtcagcccaagtgcagaagcagcgggccagggagctgggcctgggccgccatgagaatgccatcaagtacctgggccaggattatgagcagctgcgggtgcgatgcctgcagagtgggaccctcttccgtgatgaggccttccccccggtaccccagagcctgggttacaaggacctgggtcccaattcctccaagacctatggcatcaagtggaagcgtcccacggaactgctgtcaaacccccagttcattgtggatggagctacccgcacagacatctgccagggagcactgggggactgctggctcttggcggccatcgcctccctcactctcaacgacaccctcctgcaccgagtggttccgcacggccagagcttccagaatggctatgccggcatcttccatttccagctgtggcaatttggggagtgggtggacgtggtcgtggatgacctgctgcccatcaaggacgggaagctagtgttcgtgcactctgccgaaggcaacgagttctggagcgccctgcttgagaaggcctatgccaaggtaaatggcagctacgaggccctgtcagggggcagcacctcagagggctttgaggacttcacaggcggggttaccgagtggtacgagttgcgcaaggctcccagtgacctctaccagatcatcctcaaggcgctggagcggggctccctgctgggctgctccatagacatctccagcgttctagacatggaggccatcactttcaagaagttggtgaagggccatgcctactctgtgaccggggccaagcaggtgaactaccgaggccaggtggtgagcctgatccggatgcggaacccctggggcgaggtggagtggacgggagcctggagcgacagctcctcagagtggaacaacgtggacccatatgaacgggaccagctccgggtcaagatggaggacggggagttctggatgtcattccgagacttcatgcgggagttcacccgcctggagatctgcaacctcacacccgacgccctcaagagccggaccatccgcaaatggaacaccacactctacgaaggcacctggcggcgggggagcaccgcggggggctgccgaaactacccagccaccttctgggtgaaccctcagttcaagatccggctggatgagacggatgacccggacgactacggggaccgcgagtcaggctgcagcttcgtgctcgcccttatgcagaagcaccgtcgccgcgagcgccgcttcggccgcgacatggagactattggcttcgcggtctacgaggtccctccggagctggtgggccagccggccgtacacttgaagcgtgacttcttcctggccaatgcgtctcgggcgcgctcagagcagttcatcaacctgcgagaggtcagcacccgcttccgcctgccacccggggagtatgtggtggtgccctccaccttcgagcccaacaaggagggcgacttcgtgctgcgcttcttctcagagaagagtgctgggactgtggagctggatgaccagatccaggccaatctccccgatgagcaagtgctctcagaagaggagattgacgagaacttcaaggccctcttcaggcagctggcaggggaggacatggagatcagcgtgaaggagttgcggacaatcctcaataggatcatcagcaaacacaaagacctgcggaccaagggcttcagcctagagtcgtgccgcagcatggtgaacctcatggatcgtgatggcaatgggaagctgggcctggtggagttcaacatcctgtggaaccgcatccggaattacctgtccatcttccggaagtttgacctggacaagtcgggcagcatgagtgcctacgagatgcggatggccattgagtcggcaggcttcaagctcaacaagaagctgtacgagctcatcatcacccgctactcggagcccgacctggcggtcgactttgacaatttcgtttgctgcctggtgcggctagagaccatgttccgatttttcaaaactctggacacagatctggatggagttgtgacctttgacttgtttaagtggttgcagctgaccatgtttgcatgaggcagggactcggtcccccttgccgtgctcccctccctcctcgtctgccaagcctcgcctcctaccacaccacaccaggccaccccagctgcaagtgccttccttggagcagagaggcagcctcgtcctcctgtcccctctcctcccagccaccatcgttcatctgctccgggcagaactgtgtggcccctgcctgtgccagccatgggctcgggatggactccctgggccccacccattgccaagccaggaaggcagctttcgcttgttcctgcctcgggacagccccgggtttccccagcatcctgatgtgtcccctctccccacttcagaggccacccactcagcaccaccggcctggccttgcctgcagactataaactataaccactagctcgacacagtctgcagtccaggcgtgtggagccgcctcccggctcggggaggccccggggctgggaacgcctgtgccttcctgcgccgaagccaacgccccctctgtccttccctggccctgctgccgaccaggagctgcccagcctgtgggcggtcggccttccctccttcgctccttttttatattagtgattttaaaggggactcttcagggacttgtgtactggttatgggggtgccagaggcactaggcttggggtggggaggtcccgtgttccatatagaggaaccccaaataataaaaggccccacatctgtctgtga

SEQ ID NO: 64828 - DNA, 3472 bp, Homo sapiens
  misc_feature (59)..(59): n is a, c, g, or t
  misc_feature (81)..(81): n is a, c, g, or t
cgcagcgagcccggtccccctgtcgttccccggggagcgctgagccggaccggcgtggntggggaaggggagtggcgcggncctgcggggtgaggctgccgtttgctgagtgtccggcaggggtctgctcgctgccagcccggcccctcctcagagcagctgccgcagcccgaggtaatctcggccccgcgccggggctggctgggaacggcgggagcagcttcggtcgcgcggagcgaggggagctggggaccgggcgggcccgggggctgcgggaggcggcgccgccgcacaatcgccccggaatgcccgccagggcgcgcgtggggtgcggccgtcccgccctcaacttcgactgctgcccctgtttaaaaataccccttgcccgcccctccccctcgtttccccgcgtgcccttccgccgcgccccagcccccgcatgtccccccgcgctggcccctccccggggactgctctgccttttactaatttgtcctctcgcggaattggcccccggcctgcggagggaggggcggggagacaccgtgagtaagagatagtcagagaccgtgccggagagataagggagagccgagaggaagcggggatgtcggaggagatcatcacgccggtgtactgcactggggtgtcagcccaagtgcagaagcagcgggccagggagctgggcctgggccgccatgagaatgccatcaagtacctgggccaggattatgagcagctgcgggtgcgatgcctgcagagtgggaccctcttccgtgatgaggccttccccccggtaccccagagcctgggttacaaggacctgggtcccaattcctccaagacctatggcatcaagtggaagcgtcccacggaactgctgtcaaacccccagttcattgtggatggagctacccgcacagacatctgccagggagcactgggggactgctggctcttggcggccatcgcctccctcactctcaacgacaccctcctgcaccgagtggttccgcacggccagagcttccagaatggctatgccggcatcttccatttccagctgtggcaatttggggagtgggtggacgtggtcgtggatgacctgctgcccatcaaggacgggaagctagtgttcgtgcactctgccgaaggcaacgagttctggagcgccctgcttgagaaggcctatgccaaggtaaatggcagctacgaggccctgtcagggggcagcacctcagagggctttgaggacttcacaggcggggttaccgagtggtacgagttgcgcaaggctcccagtgacctctaccagatcatcctcaaggcgctggagcggggctccctgctgggctgctccatagacatctccagcgttctagacatggaggccatcactttcaagaagttggtgaagggccatgcctactctgtgaccggggccaagcaggtgaactaccgaggccaggtggtgagcctgatccggatgcggaacccctggggcgaggtggagtggacgggagcctggagcgacagctcctcagagtggaacaacgtggacccatatgaacgggaccagctccgggtcaagatggaggacggggagttctggatgtcattccgagacttcatgcgggagttcacccgcctggagatctgcaacctcacacccgacgccctcaagagccggaccatccgcaaatggaacaccacactctacgaaggcacctggcggcgggggagcaccgcggggggctgccgaaactacccagccaccttctgggtgaaccctcagttcaagatccggctggatgagacggatgacccggacgactacggggaccgcgagtcaggctgcagcttcgtgctcgcccttatgcagaagcaccgtcgccgcgagcgccgcttcggccgcgacatggagactattggcttcgcggtctacgaggtccctccggagctggtgggccagccggccgtacacttgaagcgtgacttcttcctggccaatgcgtctcgggcgcgctcagagcagttcatcaacctgcgagaggtcagcacccgcttccgcctgccacccggggagtatgtggtggtgccctccaccttcgagcccaacaaggagggcgacttcgtgctgcgcttcttctcagagaagagtgctgggactgtggagctggatgaccagatccaggccaatctccccgatgagcaagtgctctcagaagaggagattgacgagaacttcaaggccctcttcaggcagctggcaggggaggacatggagatcagcgtgaaggagttgcggacaatcctcaataggatcatcagcaaacacaaagacctgcggaccaagggcttcagcctagagtcgtgccgcagcatggtgaacctcatggatcgtgatggcaatgggaagctgggcctggtggagttcaacatcctgtggaaccgcatccggaattacctgtccatcttccggaagtttgacctggacaagtcgggcagcatgagtgcctacgagatgcggatggccattgagtcggcaggcttcaagctcaacaagaagctgtacgagctcatcatcacccgctactcggagcccgacctggcggtcgactttgacaatttcgtttgctgcctggtgcggctagagaccatgttccgatttttcaaaactctggacacagatctggatggagttgtgacctttgacttgtttaagtggttgcagctgaccatgtttgcatgaggcagggactcggtcccccttgccgtgctcccctccctcctcgtctgccaagcctcgcctcctaccacaccacaccaggccaccccagctgcaagtgccttccttggagcagagaggcagcctcgtcctcctgtcccctctcctcccagccaccatcgttcatctgctccgggcagaactgtgtggcccctgcctgtgccagccatgggctcgggatggactccctgggccccacccattgccaagccaggaaggcagctttcgcttgttcctgcctcgggacagccccgggtttccccagcatcctgatgtgtcccctctccccacttcagaggccacccactcagcaccaccggcctggccttgcctgcagactataaactataaccactagctcgacacagtctgcagtccaggcgtgtggagccgcctcccggctcggggaggccccggggctgggaacgcctgtgccttcctgcgccgaagccaacgccccctctgtccttccctggccctgctgccgaccaggagctgcccagcctgtgggcggtcggccttccctccttcgctccttttttatattagtgattttaaaggggactcttcagggacttgtgtactggttatgggggtgccagaggcactaggcttggggtggggaggtcccgtgttccatatagaggaaccccaaataataaaaggccccacatctgtctgtga

SEQ ID NO: 64829 - DNA, 2966 bp, Homo sapiens
ggatggataagcaggggcaggagagcagagcttgcaggcaggagcccaggttctagtcttgggaaggcctgggttctgagcaggcccatctgtccggcaggatgtcggaggagatcatcacgccggtgtactgcactggggtgtcagcccaagtgcagaagcagcgggccagggagctgggcctgggccgccatgagaatgccatcaagtacctgggccaggattatgagcagctgcgggtgcgatgcctgcagagtgggaccctcttccgtgatgaggccttccccccggtaccccagagcctgggttacaaggacctgggtcccaattcctccaagacctatggcatcaagtggaagcgtcccacggaactgctgtcaaacccccagttcattgtggatggagctacccgcacagacatctgccagggagcactgggggactgctggctcttggcggccatcgcctccctcactctcaacgacaccctcctgcaccgagtggttccgcacggccagagcttccagaatggctatgccggcatcttccatttccagctgtggcaatttggggagtgggtggacgtggtcgtggatgacctgctgcccatcaaggacgggaagctagtgttcgtgcactctgccgaaggcaacgagttctggagcgccctgcttgagaaggcctatgccaaggtaaatggcagctacgaggccctgtcagggggcagcacctcagagggctttgaggacttcacaggcggggttaccgagtggtacgagttgcgcaaggctcccagtgacctctaccagatcatcctcaaggcgctggagcggggctccctgctgggctgctccatagacatctccagcgttctagacatggaggccatcactttcaagaagttggtgaagggccatgcctactctgtgaccggggccaagcaggtgaactaccgaggccaggtggtgagcctgatccggatgcggaacccctggggcgaggtggagtggacgggagcctggagcgacagctcctcagagtggaacaacgtggacccatatgaacgggaccagctccgggtcaagatggaggacggggagttctggatgtcattccgagacttcatgcgggagttcacccgcctggagatctgcaacctcacacccgacgccctcaagagccggaccatccgcaaatggaacaccacactctacgaaggcacctggcggcgggggagcaccgcggggggctgccgaaactacccagccaccttctgggtgaaccctcagttcaagatccggctggatgagacggatgacccggacgactacggggaccgcgagtcaggctgcagcttcgtgctcgcccttatgcagaagcaccgtcgccgcgagcgccgcttcggccgcgacatggagactattggcttcgcggtctacgaggtccctccggagctggtgggccagccggccgtacacttgaagcgtgacttcttcctggccaatgcgtctcgggcgcgctcagagcagttcatcaacctgcgagaggtcagcacccgcttccgcctgccacccggggagtatgtggtggtgccctccaccttcgagcccaacaaggagggcgacttcgtgctgcgcttcttctcagagaagagtgctgggactgtggagctggatgaccagatccaggccaatctccccgatgagcaagtgctctcagaagaggagattgacgagaacttcaaggccctcttcaggcagctggcaggggaggacatggagatcagcgtgaaggagttgcggacaatcctcaataggatcatcagcaaacacaaagacctgcggaccaagggcttcagcctagagtcgtgccgcagcatggtgaacctcatggatcgtgatggcaatgggaagctgggcctggtggagttcaacatcctgtggaaccgcatccggaattacctgtccatcttccggaagtttgacctggacaagtcgggcagcatgagtgcctacgagatgcggatggccattgagtcggcaggcttcaagctcaacaagaagctgtacgagctcatcatcacccgctactcggagcccgacctggcggtcgactttgacaatttcgtttgctgcctggtgcggctagagaccatgttccgatttttcaaaactctggacacagatctggatggagttgtgacctttgacttgtttaagtggttgcagctgaccatgtttgcatgaggcagggactcggtcccccttgccgtgctcccctccctcctcgtctgccaagcctcgcctcctaccacaccacaccaggccaccccagctgcaagtgccttccttggagcagagaggcagcctcgtcctcctgtcccctctcctcccagccaccatcgttcatctgctccgggcagaactgtgtggcccctgcctgtgccagccatgggctcgggatggactccctgggccccacccattgccaagccaggaaggcagctttcgcttgttcctgcctcgggacagccccgggtttccccagcatcctgatgtgtcccctctccccacttcagaggccacccactcagcaccaccggcctggccttgcctgcagactataaactataaccactagctcgacacagtctgcagtccaggcgtgtggagccgcctcccggctcggggaggccccggggctgggaacgcctgtgccttcctgcgccgaagccaacgccccctctgtccttccctggccctgctgccgaccaggagctgcccagcctgtgggcggtcggccttccctccttcgctccttttttatattagtgattttaaaggggactcttcagggacttgtgtactggttatgggggtgccagaggcactaggcttggggtggggaggtcccgtgttccatatagaggaaccccaaataataaaaggccccacatctgtctgtga

SEQ ID NO: 64830 - DNA, 3666 bp, Homo sapiens
  misc_feature (59)..(59): n is a, c, g, or t
  misc_feature (81)..(81): n is a, c, g, or t
cgcagcgagcccggtccccctgtcgttccccggggagcgctgagccggaccggcgtggntggggaaggggagtggcgcggncctgcggggtgaggctgccgtttgctgagtgtccggcaggggtctgctcgctgccagcccggcccctcctcagagcagctgccgcagcccgaggtaatctcggccccgcgccggggctggctgggaacggcgggagcagcttcggtcgcgcggagcgaggggagctggggaccgggcgggcccgggggctgcgggaggcggcgccgccgcacaatcgccccggaatgcccgccagggcgcgcgtggggtgcggccgtcccgccctcaacttcgactgctgcccctgtttaaaaataccccttgcccgcccctccccctcgtttccccgcgtgcccttccgccgcgccccagcccccgcatgtccccccgcgctggcccctccccggggactgctctgccttttactaatttgtcctctcgcggaattggcccccggcctgcggagggaggggcggggagacaccgtgagtaagagatagtcagagaccgtgccggagagataagggagagccgagaggaagcggggtaggagccccaggaggaggaggaggagaaggagagagggagggcggagggcggaggggcggcgggaggagggcggggaggagcgctcttcctggttgggccctgccctgagctgccaccgggaagccagcctcagggactgcagcgacccccaaacacccctcccccaggatgtcggaggagatcatcacgccggtgtactgcactggggtgtcagcccaagtgcagaagcagcgggccagggagctgggcctgggccgccatgagaatgccatcaagtacctgggccaggattatgagcagctgcgggtgcgatgcctgcagagtgggaccctcttccgtgatgaggccttccccccggtaccccagagcctgggttacaaggacctgggtcccaattcctccaagacctatggcatcaagtggaagcgtcccacggaactgctgtcaaacccccagttcattgtggatggagctacccgcacagacatctgccagggagcactgggggactgctggctcttggcggccatcgcctccctcactctcaacgacaccctcctgcaccgagtggttccgcacggccagagcttccagaatggctatgccggcatcttccatttccagctgtggcaatttggggagtgggtggacgtggtcgtggatgacctgctgcccatcaaggacgggaagctagtgttcgtgcactctgccgaaggcaacgagttctggagcgccctgcttgagaaggcctatgccaaggtaaatggcagctacgaggccctgtcagggggcagcacctcagagggctttgaggacttcacaggcggggttaccgagtggtacgagttgcgcaaggctcccagtgacctctaccagatcatcctcaaggcgctggagcggggctccctgctgggctgctccatagacatctccagcgttctagacatggaggccatcactttcaagaagttggtgaagggccatgcctactctgtgaccggggccaagcaggtgaactaccgaggccaggtggtgagcctgatccggatgcggaacccctggggcgaggtggagtggacgggagcctggagcgacagctcctcagagtggaacaacgtggacccatatgaacgggaccagctccgggtcaagatggaggacggggagttctggatgtcattccgagacttcatgcgggagttcacccgcctggagatctgcaacctcacacccgacgccctcaagagccggaccatccgcaaatggaacaccacactctacgaaggcacctggcggcgggggagcaccgcggggggctgccgaaactacccagccaccttctgggtgaaccctcagttcaagatccggctggatgagacggatgacccggacgactacggggaccgcgagtcaggctgcagcttcgtgctcgcccttatgcagaagcaccgtcgccgcgagcgccgcttcggccgcgacatggagactattggcttcgcggtctacgaggtccctccggagctggtgggccagccggccgtacacttgaagcgtgacttcttcctggccaatgcgtctcgggcgcgctcagagcagttcatcaacctgcgagaggtcagcacccgcttccgcctgccacccggggagtatgtggtggtgccctccaccttcgagcccaacaaggagggcgacttcgtgctgcgcttcttctcagagaagagtgctgggactgtggagctggatgaccagatccaggccaatctccccgatgagcaagtgctctcagaagaggagattgacgagaacttcaaggccctcttcaggcagctggcaggggaggacatggagatcagcgtgaaggagttgcggacaatcctcaataggatcatcagcaaacacaaagacctgcggaccaagggcttcagcctagagtcgtgccgcagcatggtgaacctcatggatcgtgatggcaatgggaagctgggcctggtggagttcaacatcctgtggaaccgcatccggaattacctgtccatcttccggaagtttgacctggacaagtcgggcagcatgagtgcctacgagatgcggatggccattgagtcggcaggcttcaagctcaacaagaagctgtacgagctcatcatcacccgctactcggagcccgacctggcggtcgactttgacaatttcgtttgctgcctggtgcggctagagaccatgttccgatttttcaaaactctggacacagatctggatggagttgtgacctttgacttgtttaagtggttgcagctgaccatgtttgcatgaggcagggactcggtcccccttgccgtgctcccctccctcctcgtctgccaagcctcgcctcctaccacaccacaccaggccaccccagctgcaagtgccttccttggagcagagaggcagcctcgtcctcctgtcccctctcctcccagccaccatcgttcatctgctccgggcagaactgtgtggcccctgcctgtgccagccatgggctcgggatggactccctgggccccacccattgccaagccaggaaggcagctttcgcttgttcctgcctcgggacagccccgggtttccccagcatcctgatgtgtcccctctccccacttcagaggccacccactcagcaccaccggcctggccttgcctgcagactataaactataaccactagctcgacacagtctgcagtccaggcgtgtggagccgcctcccggctcggggaggccccggggctgggaacgcctgtgccttcctgcgccgaagccaacgccccctctgtccttccctggccctgctgccgaccaggagctgcccagcctgtgggcggtcggccttccctccttcgctccttttttatattagtgattttaaaggggactcttcagggacttgtgtactggttatgggggtgccagaggcactaggcttggggtggggaggtcccgtgttccatatagaggaaccccaaataataaaaggccccacatctgtctgtgatagcccgtgcgggggagagacgga

SEQ ID NO: 64831 - DNA, 3475 bp, Homo sapiens
  misc_feature (59)..(59): n is a, c, g, or t
  misc_feature (81)..(81): n is a, c, g, or t
cgcagcgagcccggtccccctgtcgttccccggggagcgctgagccggaccggcgtggntggggaaggggagtggcgcggncctgcggggtgaggctgccgtttgctgagtgtccggcaggggtctgctcgctgccagcccggcccctcctcagagcagctgccgcagcccgaggtaatctcggccccgcgccggggctggctgggaacggcgggagcagcttcggtcgcgcggagcgaggggagctggggaccgggcgggcccgggggctgcgggaggcggcgccgccgcacaatcgccccggaatgcccgccagggcgcgcgtggggtgcggccgtcccgccctcaacttcgactgctgcccctgtttaaaaataccccttgcccgcccctccccctcgtttccccgcgtgcccttccgccgcgccccagcccccgcatgtccccccgcgctggcccctccccggggactgctctgccttttactaatttgtcctctcgcggaattggcccccggcctgcggagggaggggcggggagacaccgtgagtaagagatagtcagagaccgtgccggagagataagggagagccgagaggaagcggggtaggagccccaggaggaggaggaggagaaggagagagggagggcggagggcggaggggcggcgggaggagggcggggaggagcgctcttcctggttgggccctgccctgagctgccaccgggaagccagcctcagggactgcagcgacccccaaacacccctcccccaggatgtcggaggagatcatcacgccggtgtactgcactggggtgtcagcccaagtgcagaagcagcgggccagggagctgggcctgggccgccatgagaatgccatcaagtacctgggccaggattatgagcagctgcgggtgcgatgcctgcagagtgggaccctcttccgtgatgaggccttccccccggtaccccagagcctgggttacaaggacctgggtcccaattcctccaagacctatggcatcaagtggaagcgtcccacggaactgctgtcaaacccccagttcattgtggatggagctacccgcacagacatctgccagggagcactgggggactgctggctcttggcggccatcgcctccctcactctcaacgacaccctcctgcaccgagtggttccgcacggccagagcttccagaatggctatgccggcatcttccatttccagctgtggcaatttggggagtgggtggacgtggtcgtggatgacctgctgcccatcaaggacgggaagctagtgttcgtgcactctgccgaaggcaacgagttctggagcgccctgcttgagaaggcctatgccaaggtaaatggcagctacgaggccctgtcagggggcagcacctcagagggctttgaggacttcacaggcggggttaccgagtggtacgagttgcgcaaggctcccagtgacctctaccagatcatcctcaaggcgctggagcggggctccctgctgggctgctccatagacatctccagcgttctagacatggaggccatcactttcaagaagttggtgaagggccatgcctactctgtgaccggggccaagcaggtgaactaccgaggccaggtggtgagcctgatccggatgcggaacccctggggcgaggtggagtggacgggagcctggagcgacagctcctcagagtggaacaacgtggacccatatgaacgggaccagctccgggtcaagatggaggacggggagttctggatgtcattccgagacttcatgcgggagttcacccgcctggagatctgcaacctcacacccgacgccctcaagagccggaccatccgcaaatggaacaccacactctacgaaggcacctggcggcgggggagcaccgcggggggctgccgaaactacccagccaccttctgggtgaaccctcagttcaagatccggctggatgagacggatgacccggacgactacggggaccgcgagtcaggctgcagcttcgtgctcgcccttatgcagaagcaccgtcgccgcgagcgccgcttcggccgcgacatggagactattggcttcgcggtctacgaggtccctccggagctggtgggccagccggccgtacacttgaagcgtgacttcttcctggccaatgcgtctcgggcgcgctcagagcagttcatcaacctgcgagaggtcagcacccgcttccgcctgccacccggggagtatgtggtggtgccctccaccttcgagcccaacaaggagggcgacttcgtgctgcgcttcttctcagagaagagtgctgggactgtggagctggatgaccagatccaggccaatctccccgatgagcaagtgctctcagaagaggagattgacgagaacttcaaggccctcttcaggcagctggcaggggaggacatggagatcagcgtgaaggagttgcggacaatcctcaataggatcatcagcaaacacaaagacctgcggaccaagggcttcagcctagagtcgtgccgcagcatggtgaacctcatggatcgtgatggcaatgggaagctgggcctggtggagttcaacatcctgtggaaccgcatccggaattacctgtccatcttccggaagtttgacctggacaagtcgggcagcatgagtgcctacgagatgcggatggccattgagtcggcaggcttcaagctcaacaagaagctgtacgagctcatcatcacccgctactcggagcccgacctggcggtcgactttgacaatttcgtttgctgcctggtgcggctagagaccatgttccgatttttcaaaactctggacacagatctggatggagttgtgacctttgacttgtttaagtggttgcagctgaccatgtttgcatgaggcagggactcggtcccccttgccgtgctcccctccctcctcgtctgccaagcctcgcctcctaccacaccacaccaggccaccccagctgcaagtgccttccttggagcagagaggcagcctcgtcctcctgtcccctctcctcccagccaccatcgttcatctgctccgggcagaactgtgtggcccctgcctgtgccagccatgggctcgggatggactccctgggccccacccattgccaagccaggaaggcagctttcgcttgttcctgcctcggccccggggctgggaacgcctgtgccttcctgcgccgaagccaacgccccctctgtccttccctggccctgctgccgaccaggagctgcccagcctgtgggcggtcggccttccctccttcgctccttttttatattagtgattttaaaggggactcttcagggacttgtgtactggttatgggggtgccagaggcactaggcttggggtggggaggtcccgtgttccatatagaggaaccccaaataataaaaggccccacatctgtctgtga

SEQ ID NO: 64832 - DNA, 3503 bp, Homo sapiens
  misc_feature (59)..(59): n is a, c, g, or t
  misc_feature (81)..(81): n is a, c, g, or t
cgcagcgagcccggtccccctgtcgttccccggggagcgctgagccggaccggcgtggntggggaaggggagtggcgcggncctgcggggtgaggctgccgtttgctgagtgtccggcaggggtctgctcgctgccagcccggcccctcctcagagcagctgccgcagcccgaggtaatctcggccccgcgccggggctggctgggaacggcgggagcagcttcggtcgcgcggagcgaggggagctggggaccgggcgggcccgggggctgcgggaggcggcgccgccgcacaatcgccccggaatgcccgccagggcgcgcgtggggtgcggccgtcccgccctcaacttcgactgctgcccctgtttaaaaataccccttgcccgcccctccccctcgtttccccgcgtgcccttccgccgcgccccagcccccgcatgtccccccgcgctggcccctccccggggactgctctgccttttactaatttgtcctctcgcggaattggcccccggcctgcggagggaggggcggggagacaccgtgagtaagagatagtcagagaccgtgccggagagataagggagagccgagaggaagcggggtaggagccccaggaggaggaggaggagaaggagagagggagggcggagggcggaggggcggcgggaggagggcggggaggagcgctcttcctggttgggccctgccctgagctgccaccgggaagccagcctcagggactgcagcgacccccaaacacccctcccccaggatgtcggaggagatcatcacgccggtgtactgcactggggtgtcagcccaagtgcagaagcagcgggccagggagctgggcctgggccgccatgagaatgccatcaagtacctgggccaggattatgagcagctgcgggtgcgatgcctgcagagtgggaccctcttccgtgatgaggccttccccccggtaccccagagcctgggttacaaggacctgggtcccaattcctccaagacctatggcatcaagtggaagcgtcccacggaactgctgtcaaacccccagttcattgtggatggagctacccgcacagacatctgccagggagcactgggggactgctggctcttggcggccatcgcctccctcactctcaacgacaccctcctgcaccgagtggttccgcacggccagagcttccagaatggctatgccggcatcttccatttccagctgtggcaatttggggagtgggtggacgtggtcgtggatgacctgctgcccatcaaggacgggaagctagtgttcgtgcactctgccgaaggcaacgagttctggagcgccctgcttgagaaggcctatgccaaggtaaatggcagctacgaggccctgtcagggggcagcacctcagagggctttgaggacttcacaggcggggttaccgagtggtacgagttgcgcaaggctcccagtgacctctaccagatcatcctcaaggcgctggagcggggctccctgctgggctgctccatagacatctccagcgttctagacatggaggccatcactttcaagaagttggtgaagggccatgcctactctgtgaccggggccaagcaggtgaactaccgaggccaggtggtgagcctgatccggatgcggaacccctggggcgaggtggagtggacgggagcctggagcgacagctcctcagagtggaacaacgtggacccatatgaacgggaccagctccgggtcaagatggaggacggggagttctggatgtcattccgagacttcatgcgggagttcacccgcctggagatctgcaacctcacacccgacgccctcaagagccggaccatccgcaaatggaacaccacactctacgaaggcacctggcggcgggggagcaccgcggggggctgccgaaactacccagccaccttctgggtgaaccctcagttcaagatccggctggatgagacggatgacccggacgactacggggaccgcgagtcaggctgcagcttcgtgctcgcccttatgcagaagcaccgtcgccgcgagcgccgcttcggccgcgacatggagactattggcttcgcggtctacgaggtccctccggagctggtgggccagccggccgtacacttgaagcgtgacttcttcctggccaatgcgtctcgggcgcgctcagagcagttcatcaacctgcgagaggtcagcacccgcttccgcctgccacccggggagtatgtggtggtgccctccaccttcgagcccaacaaggagggcgacttcgtgctgcgcttcttctcagagaagagtgctgggactgtggagctggatgaccagatccaggccaatctccccgatgagcaagtgctctcagaagaggagattgacgagaacttcaaggccctcttcaggcagctggcaggggaggacatggagatcagcgtgaaggagttgcggacaatcctcaataggatcatcagcaaacacaaagacctgcggaccaagggcttcagcctagagtcgtgccgcagcatggtgaacctcatggatcgtgatggcaatgggaagctgggcctggtggagttcaacatcctgtggaaccgcatccggaattacctgtccatcttccggaagtttgacctggacaagtcgggcagcatgagtgcctacgagatgcggatggccattgagtcggcaggcttcaagctcaacaagaagctgtacgagctcatcatcacccgctactcggagcccgacctggcggtcgactttgacaatttcgtttgctgcctggtgcggctagagaccatgttccgatttttcaaaactctggacacagatctggatggagttgtgacctttgacttgtttaagtggttgcagctgaccatgtttgcatgaggcagggactcggtcccccttgccgtgctcccctccctcctcgtctgccaagcctcgcctcctaccacaccacaccaggccaccccagctgcaagtgccttccttggagcagagaggcagcctcgtcctcctgtcccctctcctcccagccaccatcgttcatctgctccgggcagaactgtgtggcccctgcctgtgccagccatgggctcgggatggactccctgggccccacccattgccaagccaggaaggcagctttcgcttgttcctgcctcgggacagccccgggtttccccagcatcctgatgtgtcccctctccccacttcagaggccacccactcagcaccaccggcctggccttgcctgcagactataaactataaccactagctcgacacagtgggcggtcggccttccctccttcgctccttttttatattagtgattttaaaggggactcttcagggacttgtgtactggttatgggggtgccagaggcactaggcttggggtggggaggtcccgtgttccatatagaggaaccccaaataataaaaggccccacatctgtctgtga

SEQ ID NO: 64833 - DNA, 2797 bp, Homo sapiens
ggatggataagcaggggcaggagagcagagcttgcaggcaggagcccaggttctagtcttgggaaggcctgggttctgagcaggcccatctgtccggcaggatgtcggaggagatcatcacgccggtgtactgcactggggtgtcagcccaagtgcagaagcagcgggccagggagctgggcctgggccgccatgagaatgccatcaagtacctgggccaggattatgagcagctgcgggtgcgatgcctgcagagtgggaccctcttccgtgatgaggccttccccccggtaccccagagcctgggttacaaggacctgggtcccaattcctccaagacctatggcatcaagtggaagcgtcccacggaactgctgtcaaacccccagttcattgtggatggagctacccgcacagacatctgccagggagcactgggggactgctggctcttggcggccatcgcctccctcactctcaacgacaccctcctgcaccgagtggttccgcacggccagagcttccagaatggctatgccggcatcttccatttccagctgtggcaatttggggagtgggtggacgtggtcgtggatgacctgctgcccatcaaggacgggaagctagtgttcgtgcactctgccgaaggcaacgagttctggagcgccctgcttgagaaggcctatgccaaatctccagcgttctagacatggaggccatcactttcaagaagttggtgaagggccatgcctactctgtgaccggggccaagcaggtgaactaccgaggccaggtggtgagcctgatccggatgcggaacccctggggcgaggtggagtggacgggagcctggagcgacagctcctcagagtggaacaacgtggacccatatgaacgggaccagctccgggtcaagatggaggacggggagttctggatgtcattccgagacttcatgcgggagttcacccgcctggagatctgcaacctcacacccgacgccctcaagagccggaccatccgcaaatggaacaccacactctacgaaggcacctggcggcgggggagcaccgcggggggctgccgaaactacccagccaccttctgggtgaaccctcagttcaagatccggctggatgagacggatgacccggacgactacggggaccgcgagtcaggctgcagcttcgtgctcgcccttatgcagaagcaccgtcgccgcgagcgccgcttcggccgcgacatggagactattggcttcgcggtctacgaggtccctccggagctggtgggccagccggccgtacacttgaagcgtgacttcttcctggccaatgcgtctcgggcgcgctcagagcagttcatcaacctgcgagaggtcagcacccgcttccgcctgccacccggggagtatgtggtggtgccctccaccttcgagcccaacaaggagggcgacttcgtgctgcgcttcttctcagagaagagtgctgggactgtggagctggatgaccagatccaggccaatctccccgatgagcaagtgctctcagaagaggagattgacgagaacttcaaggccctcttcaggcagctggcaggggaggacatggagatcagcgtgaaggagttgcggacaatcctcaataggatcatcagcaaacacaaagacctgcggaccaagggcttcagcctagagtcgtgccgcagcatggtgaacctcatggatcgtgatggcaatgggaagctgggcctggtggagttcaacatcctgtggaaccgcatccggaattacctgtccatcttccggaagtttgacctggacaagtcgggcagcatgagtgcctacgagatgcggatggccattgagtcggcaggcttcaagctcaacaagaagctgtacgagctcatcatcacccgctactcggagcccgacctggcggtcgactttgacaatttcgtttgctgcctggtgcggctagagaccatgttccgatttttcaaaactctggacacagatctggatggagttgtgacctttgacttgtttaagtggttgcagctgaccatgtttgcatgaggcagggactcggtcccccttgccgtgctcccctccctcctcgtctgccaagcctcgcctcctaccacaccacaccaggccaccccagctgcaagtgccttccttggagcagagaggcagcctcgtcctcctgtcccctctcctcccagccaccatcgttcatctgctccgggcagaactgtgtggcccctgcctgtgccagccatgggctcgggatggactccctgggccccacccattgccaagccaggaaggcagctttcgcttgttcctgcctcgggacagccccgggtttccccagcatcctgatgtgtcccctctccccacttcagaggccacccactcagcaccaccggcctggccttgcctgcagactataaactataaccactagctcgacacagtctgcagtccaggcgtgtggagccgcctcccggctcggggaggccccggggctgggaacgcctgtgccttcctgcgccgaagccaacgccccctctgtccttccctggccctgctgccgaccaggagctgcccagcctgtgggcggtcggccttccctccttcgctccttttttatattagtgattttaaaggggactcttcagggacttgtgtactggttatgggggtgccagaggcactaggcttggggtggggaggtcccgtgttccatatagaggaaccccaaataataaaaggccccacatctgtctgtga

SEQ ID NO: 64834 - DNA, 2434 bp, Homo sapiens
cctccatccacacggtttccttaagcagagcttttctcctcctcttctctgctagtgaagcactgcttaccctcctagcctacagcaagccctgccctgccccatctttctacccaatttctcgctcttctgtttcacactcatttctttttactttggactaattgtggctgttgggactttggcttgattgctaaaatactttacttgtacttcctgatgatacaaacaatcctgcccacttcctctgccagatattgcacccactcgtcaggatttgtgcgtccttgactctgccccacccagtgctcccagcaggggcaggtgcaggaagctcactaggtggagatgttggaattggtttttcttgcagacaaagacctgcggaccaagggcttcagcctagagtcgtgccgcagcatggtgaacctcatggatcctgatccggatgcggaacccctggggcgaggtggagtggacgggagcctggagcgacagctcctcagagtggaacaacgtggacccatatgaacgggaccagctccgggtcaagatggaggacggggagttctggatgtcattccgagacttcatgcgggagttcacccgcctggagatctgcaacctcacacccgacgccctcaagagccggaccatccgcaaatggaacaccacactctacgaaggcacctggcggcgggggagcaccgcggggggctgccgaaactacccagccaccttctgggtgaaccctcagttcaagatccggctggatgagacggatgacccggacgactacggggaccgcgagtcaggctgcagcttcgtgctcgcccttatgcagaagcaccgtcgccgcgagcgccgcttcggccgcgacatggagactattggcttcgcggtctacgaggtccctccggagctggtgggccagccggccgtacacttgaagcgtgacttcttcctggccaatgcgtctcgggcgcgctcagagcagttcatcaacctgcgagaggtcagcacccgcttccgcctgccacccggggagtatgtggtggtgccctccaccttcgagcccaacaaggagggcgacttcgtgctgcgcttcttctcagagaagagtgctgggactgtggagctggatgaccagatccaggccaatctccccgatgagcaagtgctctcagaagaggagattgacgagaacttcaaggccctcttcaggcagctggcaggggaggacatggagatcagcgtgaaggagttgcggacaatcctcaataggatcatcagcaaacacaaagacctgcggaccaagggcttcagcctagagtcgtgccgcagcatggtgaacctcatggatcgtgatggcaatgggaagctgggcctggtggagttcaacatcctgtggaaccgcatccggaattacctgtccatcttccggaagtttgacctggacaagtcgggcagcatgagtgcctacgagatgcggatggccattgagtcggcaggcttcaagctcaacaagaagctgtacgagctcatcatcacccgctactcggagcccgacctggcggtcgactttgacaatttcgtttgctgcctggtgcggctagagaccatgttccgatttttcaaaactctggacacagatctggatggagttgtgacctttgacttgtttaagtggttgcagctgaccatgtttgcatgaggcagggactcggtcccccttgccgtgctcccctccctcctcgtctgccaagcctcgcctcctaccacaccacaccaggccaccccagctgcaagtgccttccttggagcagagaggcagcctcgtcctcctgtcccctctcctcccagccaccatcgttcatctgctccgggcagaactgtgtggcccctgcctgtgccagccatgggctcgggatggactccctgggccccacccattgccaagccaggaaggcagctttcgcttgttcctgcctcgggacagccccgggtttccccagcatcctgatgtgtcccctctccccacttcagaggccacccactcagcaccaccggcctggccttgcctgcagactataaactataaccactagctcgacacagtctgcagtccaggcgtgtggagccgcctcccggctcggggaggccccggggctgggaacgcctgtgccttcctgcgccgaagccaacgccccctctgtccttccctggccctgctgccgaccaggagctgcccagcctgtgggcggtcggccttccctccttcgctccttttttatattagtgattttaaaggggactcttcagggacttgtgtactggttatgggggtgccagaggcactaggcttggggtggggaggtcccgtgttccatatagaggaaccccaaataataaaaggccccacatctgtctgtga

SEQ ID NO: 64835 - DNA, 2863 bp, Homo sapiens
  misc_feature (59)..(59): n is a, c, g, or t
  misc_feature (81)..(81): n is a, c, g, or t
cgcagcgagcccggtccccctgtcgttccccggggagcgctgagccggaccggcgtggntggggaaggggagtggcgcggncctgcggggtgaggctgccgtttgctgagtgtccggcaggggtctgctcgctgccagcccggcccctcctcagagcagctgccgcagcccgaggtaatctcggccccgcgccggggctggctgggaacggcgggagcagcttcggtcgcgcggagcgaggggagctggggaccgggcgggcccgggggctgcgggaggcggcgccgccgcacaatcgccccggaatgcccgccagggcgcgcgtggggtgcggccgtcccgccctcaacttcgactgctgcccctgtttaaaaataccccttgcccgcccctccccctcgtttccccgcgtgcccttccgccgcgccccagcccccgcatgtccccccgcgctggcccctccccggggactgctctgccttttactaatttgtcctctcgcggaattggcccccggcctgcggagggaggggcggggagacaccgtgagtaagagatagtcagagaccgtgccggagagataagggagagccgagaggaagcggggtaggagccccaggaggaggaggaggagaaggagagagggagggcggagggcggaggggcggcgggaggagggcggggaggagcgctcttcctggttgggccctgccctgagctgccaccgggaagccagcctcagggactgcagcgacccccaaacacccctcccccaggatgtcggaggagatcatcacgccggtgtactgcactggggtgtcagcccaagtgcagaagcagcgggccagggagctgggcctgggccgccatgagaatgccatcaagtacctgggccaggattatgagcagctgcgggtgcgatgcctgcagagtgggaccctcttccgtgatgaggccttccccccggtaccccagagcctgggttacaaggacctgggtcccaattcctccaagacctatggcatcaagtggaagcgtcccacggaactgctgtcaaacccccagttcattgtggatggagctacccgcacagacatctgccagggagcactgggggactgctggctcttggcggccatcgcctccctcactctcaacgacaccctcctgcaccgagtggttccgcacggccagagcttccagaatggctatgccggcatcttccatttccagctgtggcaatttggggagtgggtggacgtggtcgtggatgacctgctgcccatcaaggacgggaagctagtgttcgtgcactctgccgaaggcaacgagttctggagcgccctgcttgagaaggcctatgccaaggtaaatggcagctacgaggccctgtcagggggcagcacctcagagggctttgaggacttcacaggcggggttaccgagtggtacgagttgcgcaaggctcccagtgacctctaccagatcatcctcaaggcgctggagcggggctccctgctgggctgctccatagacatctccagcgttctagacatggaggccatcactttcaagaagttggtgaagggccatgcctactctgtgaccggggccaagcaggtgaactaccgaggccaggtggtgagcctgatccggatgcggaacccctggggcgaggtggagtggacgggagcctggagcgacagctcctcagagtggaacaacgtggacccatatgaacgggaccagctccgggtcaagatggaggacggggagttctggatgtcattccgagacttcatgcgggagttcacccgcctggagatctgcaacctcacacccgacgccctcaagagccggaccatccgcaaatggaacaccacactctacgaaggcacctggcggcgggggagcaccgcggggggctgccgaaactacccagccaccttctgggtgaaccctcagttcaagatccggctggatgagacggatgacccggacgactacggggaccgcgagtcaggctgcagcttcgtgctcgcccttatgcagaagcaccgtcgccgcgagcgccgcttcggccgcgacatggagactattggcttcgcggtctacgaggtccctccggagctggtgggccagccggccgtacacttgaagcgtgacttcttcctggccaatgcgtctcgggcgcgctcagagcagttcatcaacctgcgagaggtcagcacccgcttccgcctgccacccggggagtatgtggtggtgccctccaccttcgagcccaacaaggagggcgacttcgtgctgcgcttcttctcagagaagagtgctgggactgtggagctggatgaccagatccaggccaatctccccgatgagcaagtgctctcagaagaggagattgacgagaacttcaaggggacagccccgggtttccccagcatcctgatgtgtcccctctccccacttcagaggccacccactcagcaccaccggcctggccttgcctgcagactataaactataaccactagctcgacacagtctgcagtccaggcgtgtggagccgcctcccggctcggggaggccccggggctgggaacgcctgtgccttcctgcgccgaagccaacgccccctctgtccttccctggccctgctgccgaccaggagctgcccagcctgtgggcggtcggccttccctccttcgctccttttttatattagtgattttaaaggggactcttcagggacttgtgtactggttatgggggtgccagaggcactaggcttggggtggggaggtcccgtgttccatatagaggaaccccaaataataaaaggccccacatctgtctgtga

SEQ ID NO: 64836 - DNA, 1509 bp, Homo sapiens
cctccatccacacggtttccttaagcagagcttttctcctcctcttctctgctagtgaagcactgcttaccctcctagcctacagcaagccctgccctgccccatctttctacccaatttctcgctcttctgtttcacactcatttctttttactttggactaattgtggctgttgggactttggcttgattgctaaaatactttacttgtacttcctgatgatacaaacaatcctgcccacttcctctgccagatattgcacccactcgtcaggatttgtgcgtccttgactctgccccacccagtgctcccagcaggggcaggtgcaggaagctcactaggtggagatgttggaattggtttttcttgcagacaaagacctgcggaccaagggcttcagcctagagtcgtgccgcagcatggtgaacctcatggatcgtgatggcaatgggaagctgggcctggtggagttcaacatcctgtggaaccgcatccggaattacctgtccatcttccggaagtttgacctggacaagtcgggcagcatgagtgcctacgagatgcggatggccattgagtcggcaggcttcaagctcaacaagaagctgtacgagctcatcatcacccgctactcggagcccgacctggcggtcgactttgacaatttcgtttgctgcctggtgcggctagagaccatgttccgatttttcaaaactctggacacagatctggatggagttgtgacctttgacttgtttaagtggttgcagctgaccatgtttgcatgaggcagggactcggtcccccttgccgtgctcccctccctcctcgtctgccaagcctcgcctcctaccacaccacaccaggccaccccagctgcaagtgccttccttggagcagagaggcagcctcgtcctcctgtcccctctcctcccagccaccatcgttcatctgctccgggcagaactgtgtggcccctgcctgtgccagccatgggctcgggatggactccctgggccccacccattgccaagccaggaaggcagctttcgcttgttcctgcctcgggacagccccgggtttccccagcatcctgatgtgtcccctctccccacttcagaggccacccactcagcaccaccggcctggccttgcctgcagactataaactataaccactagctcgacacagtctgcagtccaggcgtgtggagccgcctcccggctcggggaggccccggggctgggaacgcctgtgccttcctgcgccgaagccaacgccccctctgtccttccctggccctgctgccgaccaggagctgcccagcctgtgggcggtcggccttccctccttcgctccttttttatattagtgattttaaaggggactcttcagggacttgtgtactggttatgggggtgccagaggcactaggcttggggtggggaggtcccgtgttccatatagaggaaccccaaataataaaaggccccacatctgtctgtga

SEQ ID NO: 64837 - DNA, 2724 bp, Homo sapiens
  misc_feature (59)..(59): n is a, c, g, or t
  misc_feature (81)..(81): n is a, c, g, or t
cgcagcgagcccggtccccctgtcgttccccggggagcgctgagccggaccggcgtggntggggaaggggagtggcgcggncctgcggggtgaggctgccgtttgctgagtgtccggcaggggtctgctcgctgccagcccggcccctcctcagagcagctgccgcagcccgaggtaatctcggccccgcgccggggctggctgggaacggcgggagcagcttcggtcgcgcggagcgaggggagctggggaccgggcgggcccgggggctgcgggaggcggcgccgccgcacaatcgccccggaatgcccgccagggcgcgcgtggggtgcggccgtcccgccctcaacttcgactgctgcccctgtttaaaaataccccttgcccgcccctccccctcgtttccccgcgtgcccttccgccgcgccccagcccccgcatgtccccccgcgctggcccctccccggggactgctctgccttttactaatttgtcctctcgcggaattggcccccggcctgcggagggaggggcggggagacaccgtgagtaagagatagtcagagaccgtgccggagagataagggagagccgagaggaagcggggtaggagccccaggaggaggaggaggagaaggagagagggagggcggagggcggaggggcggcgggaggagggcggggaggagcgctcttcctggttgggccctgccctgagctgccaccgggaagccagcctcagggactgcagcgacccccaaacacccctcccccaggatgtcggaggagatcatcacgccggtgtactgcactggggtgtcagcccaagtgcagaagcagcgggccagggagctgggcctgggccgccatgagaatgccatcaagtacctgggccaggattatgagcagctgcgggtgcgatgcctgcagagtgggaccctcttccgtgatgaggccttccccccggtaccccagagcctgggttacaaggacctgggtcccaattcctccaagacctatggcatcaagtggaagcgtcccacggaactgctgtcaaacccccagttcattgtggatggagctacccgcacagacatctgccagggagcactgggggactgctggctcttggcggccatcgcctccctcactctcaacgacaccctcctgcaccgagtggttccgcacggccagagcttccagaatggctatgccggcatcttccatttccagctgtggcaatttggggagtgggtggacgtggtcgtggatgacctgctgcccatcaaggacgggaagctagtgttcgtgcactctgccgaaggcaacgagttctggagcgccctgcttgagaaggcctatgccaaggtaaatggcagctacgaggccctgtcagggggcagcacctcagagggctttgaggacttcacaggcggggttaccgagtggtacgagttgcgcaaggctcccagtgacctctaccagatcatcctcaaggcgctggagcggggctccctgctgggctgctccatagacatctccagcgttctagacatggaggccatcactttcaagaagttggtgaagggccatgcctactctgtgaccggggccaagcaggtgaactaccgaggccaggtggtgagcctgatccggatgcggaacccctggggcgaggtggagtggacgggagcctggagcgacagctcctcagagtggaacaacgtggacccatatgaacgggaccagctccgggtcaagatggaggacggggagttctggatgtcattccgagacttcatgcgggagttcacccgcctggagatctgcaacctcacacccgacgccctcaagagccggaccatccgcaaatggaacaccacactctacgaaggcacctggcggcgggggagcaccgcggggggctgccgaaactacccagccaccttctgggtgaaccctcagttcaagatccggctggatgagacggatgacccggacgactacggggaccgcgagtcaggctgcagcttcgtgctcgcccttatgcagaagcaccgtcgccgcgagcgccgcttcggccgcgacatggagactattggcttcgcggtctacgaggtccctccggagctggtgggccagccggccgtacacttgaagcgtgacttcttcctggccaatgcgtctcgggcgcgctcagagcagttcatcaacctgcgagaggtcagcacccgcttccgcctgccacccggggagtatgtggtggtgccctccaccttcgagcccaacaaggagggcgacttcgtgctgcgcttcttctcagagaagagtgctgggactgtggagctggatgaccagatccaggccaatctccccgatgagcaagtgctctcagaagaggagattgacgagaacttcaaggggacagccccgggtttccccagcatcctgatgtgtcccctctccccacttcagaggccacccactcagcaccaccggcctggccttgcctgcagactataaactataaccactagctcgacacagtgggcggtcggccttccctccttcgctccttttttatattagtgattttaaaggggactcttcagggacttgtgtactggttatgggggtgccagaggcactaggcttggggtggggaggtcccgtgttccatatagaggaaccccaaataataaaaggccccacatctgtctgtga

SEQ ID NO: 64838 - DNA, 2463 bp, Homo sapiens
  misc_feature (59)..(59): n is a, c, g, or t
  misc_feature (81)..(81): n is a, c, g, or t
cgcagcgagcccggtccccctgtcgttccccggggagcgctgagccggaccggcgtggntggggaaggggagtggcgcggncctgcggggtgaggctgccgtttgctgagtgtccggcaggggtctgctcgctgccagcccggcccctcctcagagcagctgccgcagcccgaggtaatctcggccccgcgccggggctggctgggaacggcgggagcagcttcggtcgcgcggagcgaggggagctggggaccgggcgggcccgggggctgcgggaggcggcgccgccgcacaatcgccccggaatgcccgccagggcgcgcgtggggtgcggccgtcccgccctcaacttcgactgctgcccctgtttaaaaataccccttgcccgcccctccccctcgtttccccgcgtgcccttccgccgcgccccagcccccgcatgtccccccgcgctggcccctccccggggactgctctgccttttactaatttgtcctctcgcggaattggcccccggcctgcggagggaggggcggggagacaccgtgagtaagagatagtcagagaccgtgccggagagataagggagagccgagaggaagcggggtaggagccccaggaggaggaggaggagaaggagagagggagggcggagggcggaggggcggcgggaggagggcggggaggagcgctcttcctggttgggccctgccctgagctgccaccgggaagccagcctcagggactgcagcgacccccaaacacccctcccccaggatgtcggaggagatcatcacgccggtgtactgcactggggtgtcagcccaagtgcagaagcagcgggccagggagctgggcctgggccgccatgagaatgccatcaagtacctgggccaggattatgagcagctgcgggtgcgatgcctgcagagtgggaccctcttccgtgatgaggccttccccccggtaccccagagcctgggttacaaggacctgggtcccaattcctccaagacctatggcatcaagtggaagcgtcccacggaactgctgtcaaacccccagttcattgtggatggagctacccgcacagacatctgccagggagcactgggggactgctggctcttggcggccatcgcctccctcactctcaacgacaccctcctgcaccgagtggttccgcacggccagagcttccagaatggctatgccggcatcttccatttccagctgtggcaatttggggagtgggtggacgtggtcgtggatgacctgctgcccatcaaggacgggaagctagtgttcgtgcactctgccgaaggcaacgagttctggagcgccctgcttgagaaggcctatgccaaggtaaatggcagctacgaggccctgtcagggggcagcacctcagagggctttgaggacttcacaggcggggttaccgagtggtacgagttgcgcaaggctcccagtgacctctaccagatcatcctcaaggcgctggagcggggctccctgctgggctgctccatagacatctccagcgttctagacatggaggccatcactttcaagaagttggtgaagggccatgcctactctgtgaccggggccaagcaggtgaactaccgaggccaggtggtgagcctgatccggatgcggaacccctggggcgaggtggagtggacgggagcctggagcgacagctcctcagagtggaacaacgtggacccatatgaacgggaccagctccgggtcaagatggaggacggggagttctggatgtcattccgagacttcatgcgggagttcacccgcctggagatctgcaacctcacacccgacgccctcaagagccggaccatccgcaaatggaacaccacactctacgaaggcacctggcggcgggggagcaccgcggggggctgccgaaactacccagccaccttctgggtgaaccctcagttcaagatccggctggatgagacggatgacccggacgactacggggaccgcgagtcaggctgcagcttcgtgctcgcccttatgcagaagcaccgtcgccgcgagcgccgcttcggccgcgacatggagactattggcttcgcggtctacgaggtccctccggagctggtgggccagccggccgtacacattgaagcgtgacttctttcccttgggccaaattgcggttcttcggggccgcgcttcaagagccaagttccattcaacccttgcgacaaaggctcagaacccgatttccgcttgcaaacccggggcgagactctcgtgcggtgcgcgcaccctcaccagcttccaagcccccacacaagggagggcgcgagcacatccggtaccatagacgcactactatcatccagcagcaaagacgatgctcggggaacttgtgaaaccctagaaatgacccagcaccaccgggccaaactccccccaatgtacaca

SEQ ID NO: 64839 - DNA, 2233 bp, Homo sapiens
  misc_feature (59)..(59): n is a, c, g, or t
  misc_feature (81)..(81): n is a, c, g, or t
cgcagcgagcccggtccccctgtcgttccccggggagcgctgagccggaccggcgtggntggggaaggggagtggcgcggncctgcggggtgaggctgccgtttgctgagtgtccggcaggggtctgctcgctgccagcccggcccctcctcagagcagctgccgcagcccgaggtaatctcggccccgcgccggggctggctgggaacggcgggagcagcttcggtcgcgcggagcgaggggagctggggaccgggcgggcccgggggctgcgggaggcggcgccgccgcacaatcgccccggaatgcccgccagggcgcgcgtggggtgcggccgtcccgccctcaacttcgactgctgcccctgtttaaaaataccccttgcccgcccctccccctcgtttccccgcgtgcccttccgccgcgccccagcccccgcatgtccccccgcgctggcccctccccggggactgctctgccttttactaatttgtcctctcgcggaattggcccccggcctgcggagggaggggcggggagacaccgtgagtaagagatagtcagagaccgtgccggagagataagggagagccgagaggaagcggggtaggagccccaggaggaggaggaggagaaggagagagggagggcggagggcggaggggcggcgggaggagggcggggaggagcgctcttcctggttgggccctgccctgagctgccaccgggaagccagcctcagggactgcagcgacccccaaacacccctcccccaggatgtcggaggagatcatcacgccggtgtactgcactggggtgtcagcccaagtgcagaagcagcgggccagggagctgggcctgggccgccatgagaatgccatcaagtacctgggccaggattatgagcagctgcgggtgcgatgcctgcagagtgggaccctcttccgtgatgaggccttccccccggtaccccagagcctgggttacaaggacctgggtcccaattcctccaagacctatggcatcaagtggaagcgtcccacggaactgctgtcaaacccccagttcattgtggatggagctacccgcacagacatctgccagggagcactgggggactgctggctcttggcggccatcgcctccctcactctcaacgacaccctcctgcaccgagtggttccgcacggccagagcttccagaatggctatgccggcatcttccatttccagctgtggcaatttggggagtgggtggacgtggtcgtggatgacctgctgcccatcaaggacgggaagctagtgttcgtgcactctgccgaaggcaacgagttctggagcgccctgcttgagaaggcctatgccaaggtaaatggcagctacgaggccctgtcagggggcagcacctcagagggctttgaggacttcacaggcggggttaccgagtggtacgagttgcgcaaggctcccagtgacctctaccagatcatcctcaaggcgctggagcggggctccctgctgggctgctccatagacatctccagcgttctagacatggaggccatcactttcaagaagttggtgaagggccatgcctactctgtgaccggggccaagcaggtactgccctgggtggggccttccctgaagggcggttcctgccccctggcctgtccttgcctctctggcacctgaccagggctgtggaaggtgctggctcctcctttcccctcctgcagcaccttatctctcttctggggacacccatctgagatgcctatcatgtcctgccctgactgactgtagttcatgtgtgcagctgcctgcctgggctgtgaattccaagaggacaggcttcatctgggtgctgagcagggcttggagaggatgagggtatgggaggcggagtgttaaagtgcgtgcatgggccaggtgcactggctcacacctgtaatcccaacactttgggaggctgaggtgggcagatcacctgaggtcaggagttcgagaccagcctggccaacatggtgaaactctgtctctactaaaaatacaaaaactacctgggtgtggtggcaggtgcctgtaattccagctatttgggaggctgaggcaagagaattgaattgcttgaacccaggaggcggaggttgcagtgagctgagatcgcaccactgcactccagcctgggtgacagagcaagactctgtctcaaaaaagaaaaaaaaaaaaa

SEQ ID NO: 64840 - DNA, 1467 bp, Homo sapiens
cctccatccacacggtttccttaagcagagcttttctcctcctcttctctgctagtgaagcactgcttaccctcctagcctacagcaagccctgccctgccccatctttctacccaatttctcgctcttctgtttcacactcatttctttttactttggactaattgtggctgttgggactttggcttgattgctaaaatactttacttgtacttcctgatgatacaaacaatcctgcccacttcctctgccagatattgcacccactcgtcaggatttgtgcgtccttgactctgccccacccagtgctcccagcaggggcaggtgcaggaagctcactaggtggagatgttggaattggtttttcttgcagacaaagacctgcggaccaagggcttcagcctagagtcgtgccgcagcatggtgaacctcatggatcgtgatggcaatgggaagctgggcctggtggagttcaacatcctgtggaaccgcatccggaattacctgtccatcttccggaagtttgacctggacaagtcgggcagcatgagtgcctacgagatgcggatggccattgagtcggcaggcttcaagctcaacaagaagctgtacgagctcatcatcacccgctactcggagcccgacctggcggtcgactttgacaatttcgtttgctgcctggtgcggctagagaccatgttccgatttttcaaaactctggacacagatctggatggagttgtgacctttgacttgtttaagtggttgcagctgaccatgtttgcatgaggcagggactcggtcccccttgccgtgctcccctccctcctcgtctgccaagcctcgcctcctaccacaccacaccaggccaccccagctgcaagtgccttccttggagcagagaggcagcctcgtcctcctgtcccctctcctcccagccaccatcgttcatctgctccgggcagaactgtgtggcccctgcctgtgccagccatgggctcgggatggactccctgggccccacccattgccaagccaggaaggcagctttcgcttgttcctgcctcgggacagccccgggtttccccagcatcctgatgtgtcccctctccccacttcagaggccacccactcagcaccaccggcctggccttgcctgcagactataaactataaccactagctcgacacagtctgcagtccaggcgtgtggagccgcctccggctcggggaggccccggggctgggaacgcctgtgccttcctgcgccgaagccaacgccccctctgtcgggcggtcggccttccctccttcgctccttttttatattagtgattttaaaggggactcttcagggacttgtgtactggttatgggggtgccagaggcactaggcttggggtggggaggtcccgtgttccatatagaggaaccccaaataataaaaggccccacatctgtctgtga

SEQ ID NO: 64841 - DNA, 1174 bp, Homo sapiens
tagctgatggcctcgggtgtgctgacacttcccgcgcaccgcaggggggcaaccaatcctcaataggatcatcagcaaacacaaagacctgcggaccaagggcttcagcctagagtcgtgccgcagcatggtgaacctcatggatcgtgatggcaatgggaagctgggcctggtggagttcaacatcctgtggaaccgcatccggaattacctgtccatcttccggaagtttgacctggacaagtcgggcagcatgagtgcctacgagatgcggatggccattgagtcggcaggcttcaagctcaacaagaagctgtacgagctcatcatcacccgctactcggagcccgacctggcggtcgactttgacaatttcgtttgctgcctggtgcggctagagaccatgttccgatttttcaaaactctggacacagatctggatggagttgtgacctttgacttgtttaagtggttgcagctgaccatgtttgcatgaggcagggactcggtcccccttgccgtgctcccctccctcctcgtctgccaagcctcgcctcctaccacaccacaccaggccaccccagctgcaagtgccttccttggagcagagaggcagcctcgtcctcctgtcccctctcctcccagccaccatcgttcatctgctccgggcagaactgtgtggcccctgcctgtgccagccatgggctcgggatggactccctgggccccacccattgccaagccaggaaggcagctttcgcttgttcctgcctcgggacagccccgggtttccccagcatcctgatgtgtcccctctccccacttcagaggccacccactcagcaccaccggcctggccttgcctgcagactataaactataaccactagctcgacacagtctgcagtccaggcgtgtggagccgcctccggctcggggaggccccggggctgggaacgcctgtgccttcctgcgccgaagccaacgccccctctgtcgggcggtcggccttccctccttcgctccttttttatattagtgattttaaaggggactcttcagggacttgtgtactggttatgggggtgccagaggcactaggcttggggtggggaggtcccgtgttccatatagaggaaccccaaataataaaaggccccacatctgtctgtga

SEQ ID NO: 64842 - DNA, 1179 bp, Homo sapiens
tgatgagccggtcccatcgttagggaggacatggagatcagcgtgaaggagttgcggacaatcctcaataggatcatcagcaaacacaaagacctgcggaccaagggcttcagcctagagtcgtgccgcagcatggtgaacctcatggatcgtgatggcaatgggaagctgggcctggtggagttcaacatcctgtggaaccgcatccggaattacctgtccatcttccggaagtttgacctggacaagtcgggcagcatgagtgcctacgagatgcggatggccattgagtcggcaggcttcaagctcaacaagaagctgtacgagctcatcatcacccgctactcggagcccgacctggcggtcgactttgacaatttcgtttgctgcctggtgcggctagagaccatgttccgatttttcaaaactctggacacagatctggatggagttgtgacctttgacttgtttaagtggttgcagctgaccatgtttgcatgaggcagggactcggtcccccttgccgtgctcccctccctcctcgtctgccaagcctcgcctcctaccacaccacaccaggccaccccagctgcaagtgccttccttggagcagagaggcagcctcgtcctcctgtcccctctcctcccagccaccatcgttcatctgctccgggcagaactgtgtggcccctgcctgtgccagccatgggctcgggatggactccctgggccccacccattgccaagccaggaaggcagctttcgcttgttcctgcctcgggacagccccgggtttccccagcatcctgatgtgtcccctctccccacttcagaggccacccactcagcaccaccggcctggccttgcctgcagactataaactataaccactagctcgacacagtctgcagtccaggcgtgtggagccgcctccggctcggggaggccccggggctgggaacgcctgtgccttcctgcgccgaagccaacgccccctctgtcgggcggtcggccttccctccttcgctccttttttatattagtgattttaaaggggactcttcagggacttgtgtactggttatgggggtgccagaggcactaggcttggggtggggaggtcccgtgttccatatagaggaaccccaaataataaaaggccccacatctgtctgtga

SEQ ID NO: 64843 - DNA, 1218 bp, Homo sapiens
  misc_feature (1218)..(1218): n is a, c, g, or t
cctccatccacacggtttccttaagcagagcttttctcctcctcttctctgctagtgaagcactgcttaccctcctagcctacagcaagccctgccctgccccatctttctacccaatttctcgctcttctgtttcacactcatttctttttactttggactaattgtggctgttgggactttggcttgattgctaaaatactttacttgtacttcctgatgatacaaacaatcctgcccacttcctctgccagatattgcacccactcgtcaggatttgtgcgtccttgactctgccccacccagtgctcccagcaggggcaggtgcaggaagctcactaggtggagatgttggaattggtttttcttgcagacaaagacctgcggaccaagggcttcagcctagagtcgtgccgcagcatggtgaacctcatggatcgtgatggcaatgggaagctgggcctggtggagttcaacatcctgtggaaccgcatccggaattacctgtccatcttccggaagtttgacctggacaagtcgggcagcatgagtgcctacgagatgcggatggccattgagtcggcaggcttcaagctcaacaagaagctgtacgagctcatcatcacccgctactcggagcccgacctggcggtcgactttgacaatttcgtttgctgcctggtgcggctagagaccatgttccgatttttcaaaactctggacacagatctggatggagttgtgacctttgacttgtttaagtggttgcagctgaccatgtttgcatgaggcagggactcggtcccccttgccgtgctcccctccctcctcgtctgccaagcctcgcctcctaccacaccacaccaggccaccccagctgcaagtgccttccttggagcagagaggcagcctcgtcctcctgtcccctctcctcccagccaccatcgttcatctgctccgggcagaactgtgtggcccctgcctgtgccagccatgggctcgggatggactccctgggccccacccattgccaagccaggaaggcagctttcgcttgttcctgcctcgggacagccccgggtttccccagcatcctgatgtgtcccctctccccacttcagaggccacccactcagcaccaccggcctggccttgcctgcagactataaactataaccactagctcgacatatagctatgggggatcaactagagtcn

SEQ ID NO: 64844 - DNA, 1275 bp, Homo sapiens
cctccatccacacggtttccttaagcagagcttttctcctcctcttctctgctagtgaagcactgcttaccctcctagcctacagcaagccctgccctgccccatctttctacccaatttctcgctcttctgtttcacactcatttctttttactttggactaattgtggctgttgggactttggcttgattgctaaaatactttacttgtacttcctgatgatacaaacaatcctgcccacttcctctgccagatattgcacccactcgtcaggatttgtgcgtccttgactctgccccacccagtgctcccagcaggggcaggtgcaggaagctcactaggtggagatgttggaattggtttttcttgcagacaaagacctgcggaccaagggcttcagcctagagtcgtgccgcagcatggtgaacctcatggatcgtgatggcaatgggaagctgggcctggtggagttcaacatcctgtggaaccgcatccggaattacctgtccatcttccggaagtttgacctggacaagtcgggcagcatgagtgcctacgagatgcggatggccattgagtcggcaggcttcaagctcaacaagaagctgtacgagctcatcatcacccgctactcggagcccgacctggcggtcgactttgacaatttcgtttgctgcctggtgcggctagagaccatgttccgatttttcaaaactctggacacagatctggatggagttgtgacctttgacttgtttaagtggttgcagctgaccatgtttgcatgaggcagggactcggtcccccttgccgtgctcccctccctcctcgtctgccaagcctcgcctcctaccacaccacaccaggccaccccagctgcaagtgccttccttggagcagagaggcagcctcgtcctcctgtcccctctcctcccagccaccatcgttcatctgctccgggcagaactgtgtggcccctgcctgtgccagccattggggcttcggggaatctggcacttcccttggggccccaacccaatttgcacaagcccaggcacgcgccacgctctctcgcctgtgttcccctggtcctccgcgggcactcaagtgtccccgggggtctttccgccgcgtcagggcatctccccgttgggcactggttggattcccgcgcgttcttgcgcgcccgaagcctattccacgcgcaggtgtcccccatccgcctccaatctttcccaggtccgtatcccctaactcgcggggttccccttggg

SEQ ID NO: 64845 - DNA, 1565 bp, Homo sapiens
  misc_feature (59)..(59): n is a, c, g, or t
  misc_feature (81)..(81): n is a, c, g, or t
cgcagcgagcccggtccccctgtcgttccccggggagcgctgagccggaccggcgtggntggggaaggggagtggcgcggncctgcggggtgaggctgccgtttgctgagtgtccggcaggggtctgctcgctgccagcccggcccctcctcagagcagctgccgcagcccgaggtaatctcggccccgcgccggggctggctgggaacggcgggagcagcttcggtcgcgcggagcgaggggagctggggaccgggcgggcccgggggctgcgggaggcggcgccgccgcacaatcgccccggaatgcccgccagggcgcgcgtggggtgcggccgtcccgccctcaacttcgactgctgcccctgtttaaaaataccccttgcccgcccctccccctcgtttccccgcgtgcccttccgccgcgccccagcccccgcatgtccccccgcgctggcccctccccggggactgctctgccttttactaatttgtcctctcgcggaattggcccccggcctgcggagggaggggcggggagacaccgtgagtaagagatagtcagagaccgtgccggagagataagggagagccgagaggaagcggggtaggagccccaggaggaggaggaggagaaggagagagggagggcggagggcggaggggcggcgggaggagggcggggaggagcgctcttcctggttgggccctgccctgagctgccaccgggaagccagcctcagggactgcagcgacccccaaacacccctcccccaggatgtcggaggagatcatcacgccggtgtactgcactggggtgtcagcccaagtgcagaagcagcgggccagggagctgggcctgggccgccatgagaatgccatcaagtacctgggccaggattatgagcagctgcgggtgcgatgcctgcagagtgggaccctcttccgtgatgaggccttccccccggtaccccagagcctgggttacaaggacctgggtcccaattcctccaagacctatggcatcaagtggaagcgtcccacggaactgctgtcaaacccccagttcattgtggatggagctacccgcacagacatctgccagggagcactgggggactgctggctcttggcggccatcgcctccctcactctcaacgacaccctcctgcaccgagtggttccgcacggccagagcttccagaatggctatgccggcatcttccatttccaggtgagggctcccctggggaggaggggcagcaggcactgggggagatgcggaaggatgacccacaatacctgcagttagggccacaccctgtgggccagccctccctctagcaggtatttgacctctcagtgccatctcgggtctgtcatgtgtgaagtgactgggctgggcaggtatttcggctggcagttttcctaggtggttgtatgtatcaggtggaaagtgcttgaaagaacagaaagacttttgtgttatatcctgtgggacaaattccactcctcccggaggtcggtctcagttgccccatctgagaaaggagtgttcgctgggga

SEQ ID NO: 64846 - DNA, 930 bp, Homo sapiens
agtcgctctggtgagcgcgacgtaatgcggatggccattgagtcggcaggcttcaagctcaacaagaagctgtacgagctcatcatcacccgctactcggagcccgacctggcggtcgactttgacaatttcgtttgctgcctggtgcggctagagaccatgttccgatttttcaaaactctggacacagatctggatggagttgtgacctttgacttgtttaagtggttgcagctgaccatgtttgcatgaggcagggactcggtcccccttgccgtgctcccctccctcctcgtctgccaagcctcgcctcctaccacaccacaccaggccaccccagctgcaagtgccttccttggagcagagaggcagcctcgtcctcctgtcccctctcctcccagccaccatcgttcatctgctccgggcagaactgtgtggcccctgcctgtgccagccatgggctcgggatggactccctgggccccacccattgccaagccaggaaggcagctttcgcttgttcctgcctcgggacagccccgggtttccccagcatcctgatgtgtcccctctccccacttcagaggccacccactcagcaccaccggcctggccttgcctgcagactataaactataaccactagctcgacacagtctgcagtccaggcgtgtggagccgcctccggctcggggaggccccggggctgggaacgcctgtgccttcctgcgccgaagccaacgccccctctgtcgggcggtcggccttccctccttcgctccttttttatattagtgattttaaaggggactcttcagggacttgtgtactggttatgggggtgccagaggcactaggcttggggtggggaggtcccgtgttccatatagaggaaccccaaataataaaaggccccacatctgtctgtga

SEQ ID NO: 64847 - DNA, 755 bp, Homo sapiens
ggtccgtggttgacgtggctgatggagttgtgacctttgacttgtttaagtggttgcagctgaccatgtttgcatgaggcagggactcggtcccccttgccgtgctcccctccctcctcgtctgccaagcctcgcctcctaccacaccacaccaggccaccccagctgcaagtgccttccttggagcagagaggcagcctcgtcctcctgtcccctctcctcccagccaccatcgttcatctgctccgggcagaactgtgtggcccctgcctgtgccagccatgggctcgggatggactccctgggccccacccattgccaagccaggaaggcagctttcgcttgttcctgcctcgggacagccccgggtttccccagcatcctgatgtgtcccctctccccacttcagaggccacccactcagcaccaccggcctggccttgcctgcagactataaactataaccactagctcgacacagtctgcagtccaggcgtgtggagccgcctccggctcggggaggccccggggctgggaacgcctgtgccttcctgcgccgaagccaacgccccctctgtcgggcggtcggccttccctccttcgctccttttttatattagtgattttaaaggggactcttcagggacttgtgtactggttatgggggtgccagaggcactaggcttggggtggggaggtcccgtgttccatatagaggaaccccaaataataaaaggccccacatctgtctgtga

SEQ ID NO: 64848 - DNA, 731 bp, Homo sapiens
accctgcctagccccagccccctcctggggacccaacccctcccccatcctgttgggcaggggctgcgcctcactgaccttcactcactctcctggaccaggcttcaagctcaacaagaagctgtacgagctcatcatcacccgctactcggagcccgacctggcggtcgactttgacaatttcgtttgctgcctggtgcggctagagaccatgttccgtgagtgtccccaactgcctcccaccctccagctccgtcccaaacgcgtcccccaggagctggggggaatgacagatgggtgaattagcagatacaggccagtgctgtgggtgtgtgccagagaggcctgggtctgggtttggggggccctggctgagtgccaggagagtcggggagggagggagttgacagtggcttctcaggcagcaggaaggggtgaagcttcccagcttcaaggggtgtcagcttgcggtactgtggggaggtagagagggaccaggcaggaagggggccaggcctggccctgcgtgaatatcccactgagttttcagccctgtatcaccttttcttgaacacacaggatttttcaaaactctggacacagatctggatggagttgtgacctttgacttgtttaaggtgggaacctccctgggcccatggttggggaagagttccaggcgatcgaattttcttatctggccagtgttccctgtcctttcctggaaatga

SEQ ID NO: 64849 - DNA, 1384 bp, Homo sapiens
tgagcgtccgggcccaggggctccacacagcaggttctccccatgacaccacctgaacgtctcttcctcccaagggtgtgtggcaccaccctacacctcctccttctggggctgctgctggttctgctgcctggggcccaggtgaggcagcaggagaatgggggctgctggggtggctcagccaaaccttgagccctagagcccccctcaactctgttctcccctaggggctccctggtgttggcctcacaccttcagctgcccagactgcccgtcagcaccccaagatgcatcttgcccacagcaccctcaaacctgctgctcacctcattggagaccccagcaagcagaactcactgctctggagagcaaacacggaccgtgccttcctccaggatggtttctccttgagcaacaattctctcctggtccccaccagtggcatctacttcgtctactcccaggtggtcttctctgggaaagcctactctcccaaggccacctcctccccactctacctggcccatgaggtccagctcttctcctcccagtaccccttccatgtgcctctcctcagctcccagaagatggtgtatccagggctgcaggaaccctggctgcactcgatgtaccacggggctgcgttccagctcacccagggagaccagctatccacccacacagatggcatcccccacctagtcctcagccctagtactgtcttctttggagccttcgctctgtagaacttggaaaaatccagaaagaaaaaataattgatttcaagaccttctccccattctgcctccattctgaccatttcaggggtcgtcaccacctctcctttggccattccaacagctcaagtcttccctgatcaagtcaccggagctttcaaagaaggaattctaggcatcccaggggaccacacctccctgaaccatccctgatgtctgtctggctgaggatttcaagcctgcctaggaattcccagcccaaagctgttggtctgtcccaccagctaggtggggcctagatccacacacagaggaagagcaggcacatggaggagcttgggggatgactagaggcagggaggggactatttatgaaggcaaaaaaattaaattatttatttatggaggatggagagaggggaataatagaagaacatccaaggagaaacagagacaggcccaagagatgaagagtgagagggcatgcgcacaaggctgaccaagagagaaagaagtaggcatgagggatcacagggccccagaaggcagggaaaggctctgaaagccagctgccgaccagagccccacacggaggcatctgcaccctcgatgaagcccaataaacctcttttctctgaaaaaaaaaa

SEQ ID NO: 64850 - DNA, 1442 bp, Homo sapiens
tgagcgtccgggcccaggggctccacacagcaggtgaggctctcctgccccatctccttgggctgcccgtgcttcgtgctttggactaccgcccagcagtgtcctgccctctgcctgggcctcggtccctcctgcacctgctgcctggatccccggcctgcctgggcctgggccttggttctccccatgacaccacctgaacgtctcttcctcccaagggtgtgtggcaccaccctacacctcctccttctggggctgctgctggttctgctgcctggggcccaggggctccctggtgttggcctcacaccttcagctgcccagactgcccgtcagcaccccaagatgcatcttgcccacagcaccctcaaacctgctgctcacctcattggagaccccagcaagcagaactcactgctctggagagcaaacacggaccgtgccttcctccaggatggtttctccttgagcaacaattctctcctggtccccaccagtggcatctacttcgtctactcccaggtggtcttctctgggaaagcctactctcccaaggccacctcctccccactctacctggcccatgaggtccagctcttctcctcccagtaccccttccatgtgcctctcctcagctcccagaagatggtgtatccagggctgcaggaaccctggctgcactcgatgtaccacggggctgcgttccagctcacccagggagaccagctatccacccacacagatggcatcccccacctagtcctcagccctagtactgtcttctttggagccttcgctctgtagaacttggaaaaatccagaaagaaaaaataattgatttcaagaccttctccccattctgcctccattctgaccatttcaggggtcgtcaccacctctcctttggccattccaacagctcaagtcttccctgatcaagtcaccggagctttcaaagaaggaattctaggcatcccaggggaccacacctccctgaaccatccctgatgtctgtctggctgaggatttcaagcctgcctaggaattcccagcccaaagctgttggtctgtcccaccagctaggtggggcctagatccacacacagaggaagagcaggcacatggaggagcttgggggatgactagaggcagggaggggactatttatgaaggcaaaaaaattaaattatttatttatggaggatggagagaggggaataatagaagaacatccaaggagaaacagagacaggcccaagagatgaagagtgagagggcatgcgcacaaggctgaccaagagagaaagaagtaggcatgagggatcacagggccccagaaggcagggaaaggctctgaaagccagctgccgaccagagccccacacggaggcatctgcaccctcgatgaagcccaataaacctcttttctctgaaaaaaaaaa

SEQ ID NO: 64851 - DNA, 1528 bp, Homo sapiens
tgagcgtccgggcccaggggctccacacagcaggtgaggctctcctgccccatctccttgggctgcccgtgcttcgtgctttggactaccgcccagcagtgtcctgccctctgcctgggcctcggtccctcctgcacctgctgcctggatccccggcctgcctgggcctgggccttggttctccccatgacaccacctgaacgtctcttcctcccaagggtgtgtggcaccaccctacacctcctccttctggggctgctgctggttctgctgcctggggcccaggtgaggcagcaggagaatgggggctgctggggtggctcagccaaaccttgagccctagagcccccctcaactctgttctcccctaggggctccctggtgttggcctcacaccttcagctgcccagactgcccgtcagcaccccaagatgcatcttgcccacagcaccctcaaacctgctgctcacctcattggagaccccagcaagcagaactcactgctctggagagcaaacacggaccgtgccttcctccaggatggtttctccttgagcaacaattctctcctggtccccaccagtggcatctacttcgtctactcccaggtggtcttctctgggaaagcctactctcccaaggccacctcctccccactctacctggcccatgaggtccagctcttctcctcccagtaccccttccatgtgcctctcctcagctcccagaagatggtgtatccagggctgcaggaaccctggctgcactcgatgtaccacggggctgcgttccagctcacccagggagaccagctatccacccacacagatggcatcccccacctagtcctcagccctagtactgtcttctttggagccttcgctctgtagaacttggaaaaatccagaaagaaaaaataattgatttcaagaccttctccccattctgcctccattctgaccatttcaggggtcgtcaccacctctcctttggccattccaacagctcaagtcttccctgatcaagtcaccggagctttcaaagaaggaattctaggcatcccaggggaccacacctccctgaaccatccctgatgtctgtctggctgaggatttcaagcctgcctaggaattcccagcccaaagctgttggtctgtcccaccagctaggtggggcctagatccacacacagaggaagagcaggcacatggaggagcttgggggatgactagaggcagggaggggactatttatgaaggcaaaaaaattaaattatttatttatggaggatggagagaggggaataatagaagaacatccaaggagaaacagagacaggcccaagagatgaagagtgagagggcatgcgcacaaggctgaccaagagagaaagaagtaggcatgagggatcacagggccccagaaggcagggaaaggctctgaaagccagctgccgaccagagccccacacggaggcatctgcaccctcgatgaagcccaataaacctcttttctctgaaaaaaaaaa

SEQ ID NO: 64852 - DNA, 822 bp, Homo sapiens
tgggacaagtatgatttgagttgtttgggacaaggacaggggtacaagagaaggaaatgggcaaagagagaagcctgtactcagccaagggtgcagagatgttatatatgattgctcttcagggaaccgggcctccagctcacaccccagctgctcaaccgcctcctctctgaattgactgtcccttctttggaactctaggcctgaccccactccctggccctcccagcccacgattcccctgacccgactccctttcccagaactcagtcgcctgaacccccagcctgtggttctctcctaggcctcagcctttcctgcctttgactgaaacagcagtatcttctaagccctgggggcttccccgggccccagccccgacctagaacccgcccgctgcctgccacgctgccactgccgcttcctctataaagggacctgagcgtccgggcccaggggctccacacagcaggtgaggctctcctgccccatctccttgggctgcccgtgcttcgtgctttggactaccgcccagcagtgtcctgccctctgcctgggcctcggtccctcctgcacctgctgcctggatccccggcctgcctgggcctgggccttggtgggtttggttttggtttccttctctgtctctgactctccatctgtcagtctcattgtctctgtcacacattctctgtttctgccatggttcctctctgttcccttcctgtctctctctgtctccctctgctcaccttggggtttctctgactgcatcttgtccccttctctgtcgatctctctctcgggggtcggggggtgctg

SEQ ID NO: 64853 - DNA, 2988 bp, Homo sapiens
taactgagcgaggagcaattgattaatagctcggcgaggggactcactgactgttataataacactacaccagcaactcctggcttcccagcagccggaacacagacaggagagagtcagtggcaaatagacatttttcttatttcttaaaaaacagcaacttgtttgctacttttatttctgttgatttttttttcttggtgtgtgtggtggttgtttttaagtgtggagggcaaaaggagataccatcccaggctcagtccaacccctctccaaaacggcttttctgacactccaggtagcgagggagttgggtctccaggttgtgcgaggagcaaatgatgaccgccaaggccgtagacaaaatcccagtaactctcagtggttttgtgcaccagctgtctgacaacatctacccggtggaggacctcgccgccacgtcggtgaccatctttcccaatgccgaactgggaggcccctttgaccagatgaacggagtggccggagatggcatgatcaacattgacatgactggagagaagaggtcgttggatctcccatatcccagcagctttgctcccgtctctgcacctagaaaccagaccttcacttacatgggcaagttctccattgaccctcagtaccctggtgccagctgctacccagaaggcataatcaatattgtgagtgcaggcatcttgcaaggggtcacttccccagcttcaaccacagcctcatccagcgtcacctctgcctcccccaacccactggccacaggacccctgggtgtgtgcaccatgtcccagacccagcctgacctggaccacctgtactctccgccaccgcctcctcctccttattctggctgtgcaggagacctctaccaggacccttctgcgttcctgtcagcagccaccacctccacctcttcctctctggcctacccaccacctccttcctatccatcccccaagccagccacggacccaggtctcttcccaatgatcccagactatcctggattctttccatctcagtgccagagagacctacatggtacagctggcccagaccgtaagccctttccctgcccactggacaccctgcgggtgccccctccactcactccactctctacaatccgtaactttaccctggggggccccagtgctggggtgaccggaccaggggccagtggaggcagcgagggaccccggctgcctggtagcagctcagcagcagcagcagccgccgccgccgccgcctataacccacaccacctgccactgcggcccattctgaggcctcgcaagtaccccaacagacccagcaagacgccggtgcacgagaggccctacccgtgcccagcagaaggctgcgaccggcggttctcccgctctgacgagctgacacggcacatccgaatccacactgggcataagcccttccagtgtcggatctgcatgcgcaacttcagccgcagtgaccacctcaccacccatatccgcacccacaccggtgagaagcccttcgcctgtgactactgtggccgaaagtttgcccggagtgatgagaggaagcgccacaccaagatccacctgagacagaaagagcggaaaagcagtgccccctctgcatcggtgccagccccctctacagcctcctgctctgggggcgtgcagcctgggggtaccctgtgcagcagtaacagcagcagtcttggcggagggccgctcgccccttgctcctctcggacccggacaccttgagatgagactcaggctgatacaccagctcccaaaggtcccggaggccctttgtccactggagctgcacaacaaacactaccaccctttcctgtccctctctccctttgttgggcaaagggctttggtggagctagcactgccccctttccacctagaagcaggttcttcctaaaacttagcccattctagtctctcttaggtgagttgactatcaacccaaggcaaaggggaggctcagaaggaggtggtgtggggacccctggccaagagggctgaggtctgaccctgctttaaagggttgtttgactaggttttgctaccccacttccccttattttgacccatcacaggtttttgaccctggatgtcagagttgatctaagacgttttctacaataggttgggagatgctgatcccttcaagtggggacagcaaaaagacaagcaaaactgatgtgcactttatggcttgggactgatttgggggacattgtacagtgagtgaagtatagcctttatgccacactctgtggccctaaaatggtgaatcagagcatatctagttgtctcaacccttgaagcaatatgtattataaactcagagaacagaagtgcaatgtgatgggaggaacatagcaatatctgctccttttcgagttgtttgagaaatgtaggctattttttcagtgtatatccactcagattttgtgtatttttgatgtaacactgttctctaaattctgaatctttgggaaaaaatgtaaagcatttatgatctcagaggttaacttatttaagggggatgtacatatattctctgaaactaggatgcatgcaattgtgttggaagtgtccttggtgccttgtgtgatgtagacaatgttacaaggtctgcatgtaaatgggttgccttattatggagaaaaaaatcactccctgagtttagtatggctgtatatttctgcctattaatatttggaattttttttagaaagtatatttttgtatgctttgttttgtgacttaaaagtgttacctttgtagtcaaatttcagataagaatgtacataatgttaccggagctgatttgtttggtcattagctcttaatagttgtgaaaaaataaatctattctaacgcaaaaccactaactgaagttcagataatggatggtttgtgactatagtgtaaataaatacttttcaacaataaaaaaaat

SEQ ID NO: 64854 - DNA, 3136 bp, Homo sapiens
agcggcaagttctaaggccttactgatttccagtcaacttgttctatccattattgagagacgagtgttatagtcagcaactataattagccgtctgttctcaggccaagcttgcttcctactctgccataaggtgagccatctctacctgcctggagatggacctgcggtcatccagttccaccagtgcctggctggagctataagttggtgctgtttgccagggttggtgtctacagagggccaggggaattccaagcgagggactcaaggagagcttcttggactcctcaagttctaccaggaggcagtgctatggtgtgcccaaccctcccaggggcctaagtggccaccctcttgggaatgcccaaagcatctgctatttaggacttggttacagagcaccatcagcttccccaagtttgcaagcaagcattttcccaggagatagagtggccaaggtattgcttgtgtctgacccccttcttctgtctgaaacaagggctaccctccacccagccactgtctaaagagcttcatttaaagctgtctgacaacatctacccggtggaggacctcgccgccacgtcggtgaccatctttcccaatgccgaactgggaggcccctttgaccagatgaacggagtggccggagatggcatgatcaacattgacatgactggagagaagaggtcgttggatctcccatatcccagcagctttgctcccgtctctgcacctagaaaccagaccttcacttacatgggcaagttctccattgaccctcagtaccctggtgccagctgctacccagaaggcataatcaatattgtgagtgcaggcatcttgcaaggggtcacttccccagcttcaaccacagcctcatccagcgtcacctctgcctcccccaacccactggccacaggacccctgggtgtgtgcaccatgtcccagacccagcctgacctggaccacctgtactctccgccaccgcctcctcctccttattctggctgtgcaggagacctctaccaggacccttctgcgttcctgtcagcagccaccacctccacctcttcctctctggcctacccaccacctccttcctatccatcccccaagccagccacggacccaggtctcttcccaatgatcccagactatcctggattctttccatctcagtgccagagagacctacatggtacagctggcccagaccgtaagccctttccctgcccactggacaccctgcgggtgccccctccactcactccactctctacaatccgtaactttaccctggggggccccagtgctggggtgaccggaccaggggccagtggaggcagcgagggaccccggctgcctggtagcagctcagcagcagcagcagccgccgccgccgccgcctataacccacaccacctgccactgcggcccattctgaggcctcgcaagtaccccaacagacccagcaagacgccggtgcacgagaggccctacccgtgcccagcagaaggctgcgaccggcggttctcccgctctgacgagctgacacggcacatccgaatccacactgggcataagcccttccagtgtcggatctgcatgcgcaacttcagccgcagtgaccacctcaccacccatatccgcacccacaccggtgagaagcccttcgcctgtgactactgtggccgaaagtttgcccggagtgatgagaggaagcgccacaccaagatccacctgagacagaaagagcggaaaagcagtgccccctctgcatcggtgccagccccctctacagcctcctgctctgggggcgtgcagcctgggggtaccctgtgcagcagtaacagcagcagtcttggcggagggccgctcgccccttgctcctctcggacccggacaccttgagatgagactcaggctgatacaccagctcccaaaggtcccggaggccctttgtccactggagctgcacaacaaacactaccaccctttcctgtccctctctccctttgttgggcaaagggctttggtggagctagcactgccccctttccacctagaagcaggttcttcctaaaacttagcccattctagtctctcttaggtgagttgactatcaacccaaggcaaaggggaggctcagaaggaggtggtgtggggacccctggccaagagggctgaggtctgaccctgctttaaagggttgtttgactaggttttgctaccccacttccccttattttgacccatcacaggtttttgaccctggatgtcagagttgatctaagacgttttctacaataggttgggagatgctgatcccttcaagtggggacagcaaaaagacaagcaaaactgatgtgcactttatggcttgggactgatttgggggacattgtacagtgagtgaagtatagcctttatgccacactctgtggccctaaaatggtgaatcagagcatatctagttgtctcaacccttgaagcaatatgtattataaactcagagaacagaagtgcaatgtgatgggaggaacatagcaatatctgctccttttcgagttgtttgagaaatgtaggctattttttcagtgtatatccactcagattttgtgtatttttgatgtaacactgttctctaaattctgaatctttgggaaaaaatgtaaagcatttatgatctcagaggttaacttatttaagggggatgtacatatattctctgaaactaggatgcatgcaattgtgttggaagtgtccttggtgccttgtgtgatgtagacaatgttacaaggtctgcatgtaaatgggttgccttattatggagaaaaaaatcactccctgagtttagtatggctgtatatttctgcctattaatatttggaattttttttagaaagtatatttttgtatgctttgttttgtgacttaaaagtgttacctttgtagtcaaatttcagataagaatgtacataatgttaccggagctgatttgtttggtcattagctcttaatagttgtgaaaaaataaatctattctaacgcaaaaccactaactgaagttcagataatggatggtttgtgactatagtgtaaataaatacttttcaacaataaaaaaaat

SEQ ID NO: 64855 - DNA, 356 bp, Homo sapiens
tggctgggggtggaggggagttgggaaaagctcattctgcttttttggaggtagttcttgagttccatactgtcaatgggttgccacagttgggctggcctcttcttacagtctgtgggcctcaatttccccaccttttggactttgccacagctctacagtgctgagactctcggccttggaaatggacctatgtgagcgggggtgagaagggagtcctggctgtattttcattgttccacctccattctgcctttcccctccccagatggcatgatcaacattgacatgactggagagaagaggtcgttggatctcccatatcccagcagctttgctcccgtctctgcacctag

SEQ ID NO: 64856 - DNA, 238 bp, Homo sapiens
tccccagcactctgcccagcccaagctctcccagcctctgcctcccatcccccaggaggaaagacagtgcccaggctgggccaggcagctggccctggtgcccatgagcagaggggaccctccctggagaactcgaaaatgccagtgaacaaggcccaaacacctccatcctgagtccttctccagccttaaagcaaatcatcttttaatcctgaaacaccaaatatttaatttatgc

SEQ ID NO: 64857 - DNA, 701 bp, Homo sapiens
ttgtctttttattaatggccatttggactggtgtgagatgatatctcattatggtttagatttgcatttttctgatgattagtgatggcttttctctagggtgaaggtacactcgagcgtggtcattgaggacaagtcgacgagagatcccgagtacgtctacagtcagccttacgagtggactgatcaagttgaaagcaacagaacaagcatctataagaattgattatatgtcccagcactttggaaggctgaggcaagtggatcccttgggcctaggacttcgcgagaccagttgggcaacatgatgaactcctactaattttcgtccttcagaacaagatggaagaaactacggtcacatatgcaaatggagaagatgatgaacacagaaaaattatgcaaagataatccctaaaccttctttctcatcaaaagttatagcaaggtggtttaatatatcactgacggaacacgatgctttgtttaatgaagactcagacggaaaggatcagacatcaacctataaatgcatcaaccagaaggaaagaccaattttgaaaactgttgagcattattctatacctctaagctgttcttttctgaaccatgaatcgggagaattattgtcactcatacatgagtatgagttgtaattctcaattcccaagtaaaaatcttcctgcttttgttatattttt

SEQ ID NO: 64858 - DNA, 974 bp, Homo sapiens
tgacttaaaactagagaggatctaggaactggagctgctgcctctgtctgctaagatgtgaagtccaagactgaaagtaacatagcagaaggagaaccaaaagatatgttgagtcttgatgctatttgttgaaccagtcctgaatccagctgtgtcggagtcagcgcagcttttgaagctggagagcatcatattttagaaagatcaagcaatgtggatgaggacacattaaaaagagaagaccgagaggaggggacaccactcaggcttataacctccagctcacatttcagcaccaaaggaccaaagcctagacctgagatctggcacttgcaaaaagaaagatcacctggaagaacaaaatagaagactcctgctcccaataggcttgggtcaggaagaaggctgttggcataattgtggagtaggaagatggaaaacaactcctagagatcccaacagctgaacgcgtgcttgggcagtggctgcgggtgaagtcatgggaaggcaagtcatgaagggcattaatcaaggatatgttctgggagtaactcccctgctttccctggatgtgtgcgagaaagcataggcatccactttctgaccaacaggagacccagtctcaggatggagcagacaccatgcatggtagagcagagagacagatacaacctaggtccttgatgaaatgattggccactggatcagccacagttaaagactgcctacctttggacttctggttatcttaggccaaaaatgtcctttttgtttaaggcactttgagccgggttttctaagacctagcagtctcaaccatccaaactaataagctgaattaactagatttcctgtcatgtccttcctgcctgattggtagcccttgactccaatttggcctcattttccgtaccttactggctgccttttcctctactcataggtcacttggaaataaaatatagatttacttc

SEQ ID NO: 64859 - DNA, 1096 bp, Homo sapiens
tgacttaaaactagagaggatctaggaactggagctgctgcctctgtctgctaagatgtgaagtccaagactgaaagtaacatagcagaaggagaaccaaaagatatgttgagtcttgatgctatttgttgaaccagtcctgaatccagctgtgtcggagtcagcgcagcttttgaagctggagagcatcatattttagaaagatcaagcaatgtggatgaggacacattaaaaagagaagaccgagaggaggggacaccactcaggcttataacctccagctcacatttcagcaccaaaggaccaaagcctagacctgagatctggcacttgcaaaaagaaagatcacctggaagaacaaaatagaagactcctgctcccaataggcttgggtcaggaagaaggctgttggcataattgtggagtaggaagatggaaaacaactcctagagatcccaacagctgaacgcgtgcttgggcagtggctgcgggtgaagtcatgggaaggcaagtcatgaagggcattaatcaaggtaaaagcaaaaggaaaatgaggttcttcagggcacagtgtgtgggaagcaacagcatgatggaatcattaggagagatgcccatgactcctgcgcccagcaggagttgtttctgcaggggtccctgcttccatctcctaagttgcaggcagagagggcagaagccaggatcatcaatacccaagagggagcatcgaagagtgcatgcttcctctactatgtcgtgatatagatggaggccaggatttgggagctttggaacacatctctcccaggcctgattgttaggagaggacttaggcaaggtgtgggcaatgctggtgcttcacctttccttgttgaccagacagacccagaagggtcatttgtcaaaacaaagaaaatctcttccaggggtgaggcaggtgtggctgcctgtatgtgaatgtgctgcacacctttcccatcagcaggtgtctgagaccctactctcctcctgactttgttggcccgagcatcagcctgtgaggtccagcacccagagcccaaatcttctggctcctaggctggcacacaacctaaca

SEQ ID NO: 64860 - DNA, 1028 bp, Homo sapiens
ggaaggagtgagcatggtagaaagatgtggctacaaagaggaacacacatgtggttcttgccctttaggagtttaattcaagtatgggggagtcagcgcagcttttgaagctggagagcatcatattttagaaagatcaagcaatgtggatgaggacacattaaaaagagaagaccgagaggaggggacaccactcaggcttataacctccagctcacatttcagcaccaaaggaccaaagcctagacctgagatctggcacttgcaaaaagaaagatcacctggaagaacaaaatagaagactcctgctcccaataggcttgggtcaggaagaaggctgttggcataattgtggagtaggaagatggaaaacaactcctagagatcccaacagctgaacgcgtgcttgggcagtggctgcgggtgaagtcatgggaaggcaagtcatgaagggcattaatcaaggtaaaagcaaaaggaaaatgaggttcttcagggcacagtgtgtgggaagcaacagcatgatggaatcattaggagagatgcccatgactcctgcgcccagcaggagttgtttctgcaggggtccctgcttccatctcctaagttgcaggcagagagggcagaagccaggatcatcaatacccaagagggagcatcgaagagtgcatgcttcctctactatgtcgtgatatagatggaggccaggatttgggagctttggaacacatctctcccaggcctgattgttaggagaggacttaggcaaggtgtgggcaatgctggtgcttcacctttccttgttgaccagacagacccagaagggtcatttgtcaaaacaaagaaaatctcttccaggggtgaggcaggtgtggctgcctgtatgtgaatgtgctgcacacctttcccatcagcaggtgtctgagaccctactctcctcctgactttgttggcccgagcatcagcctgtgaggtccagcacccagagcccaaatcttctggctcctaggctggcacacaacctaaca

SEQ ID NO: 64861 - DNA, 672 bp, Homo sapiens
ttgtctttttattaatggccatttggactggtgtgagatgatatctcattatggtttagatttgcatttttctgatgattagtgatggcttttctctagggtgaaggtacactcgagcgtggtcattgaggacaagtcgacgagagatcccgagtacgtctacagtcagccttacgagtggactgatcaagttgaaagcaacagaacaagcatctataagaattgattatatgtcccagcactttggaaggctgaggcaagtggatcccttgggcctaggacttcgcgagaccagttgggcaacatgaacaagatggaagaaactacggtcacatatgcaaatggagaagatgatgaacacagaaaaattatgcaaagataatccctaaaccttctttctcatcaaaagttatagcaaggtggtttaatatatcactgacggaacacgatgctttgtttaatgaagactcagacggaaaggatcagacatcaacctataaatgcatcaaccagaaggaaagaccaattttgaaaactgttgagcattattctatacctctaagctgttcttttctgaaccatgaatcgggagaattattgtcactcatacatgagtatgagttgtaattctcaattcccaagtaaaaatcttcctgcttttgttatattttt

SEQ ID NO: 64862 - DNA, 1218 bp, Homo sapiens
tgacttaaaactagagaggatctaggaactggagctgctgcctctgtctgctaagatgtgaagtccaagactgaaagtaacatagcagaaggagaaccaaaagatatgttgagtcttgatgctatttgttgaaccagtcctgaatccagctgtgtcggagtcagcgcagcttttgaagctggagagcatcatattttagaaagatcaagcaatgtggatgaggacacattaaaaagagaagaccgagaggaggggacaccactcaggcttataacctccagctcacatttcagcaccaaaggaccaaagcctagacctgagatctggcacttgcaaaaagaaagatcacctggaagaacaaaatagaagactcctgctcccaataggcttgggtcaggaagaaggctgttggcataattgtggagtaggaagatggaaaacaactcctagagatcccaacagctgaacgcgtgcttgggcagtggctgcgggtgaagtcatgggaaggcaagtcatgaagggcattaatcaaggttattttttccacagatgaatttctaatcctaaataatcatttacatgaattcagatttttttgatccaggcttttctctagggtgaaggtacactcgagcgtggtcattgaggacaagtcgacgagagatcccgagtacgtctacagtcagccttacgagtggactgatcaagttgaaagcaacagaacaagcatctataagaattgattatatgtcccagcactttggaaggctgaggcaagtggatcccttgggcctaggacttcgcgagaccagttgggcaacatgatgaactcctactaattttcgtccttcagaacaagatggaagaaactacggtcacatatgcaaatggagaagatgatgaacacagaaaaattatgcaaagataatccctaaaccttctttctcatcaaaagttatagcaaggtggtttaatatatcactgacggaacacgatgctttgtttaatgaagactcagacggaaaggatcagacatcaacctataaatgcatcaaccagaaggaaagaccaattttgaaaactgttgagcattattctatacctctaagctgttcttttctgaaccatgaatcgggagaattattgtcactcatacatgagtatgagttgtaattctcaattcccaagtaaaaatcttcctgcttttgttatattttt

SEQ ID NO: 64863 - DNA, 1267 bp, Homo sapiens
tgacttaaaactagagaggatctaggaactggagctgctgcctctgtctgctaagatgtgaagtccaagactgaaagtaacatagcagaaggagaaccaaaagatatgttgagtcttgatgctatttgttgaaccagtcctgaatccagctgtgtcggagtcagcgcagcttttgaagctggagagcatcatattttagaaagatcaagcaatgtggatgaggacacattaaaaagagaagaccgagaggaggggacaccactcaggcttataacctccagctcacatttcagcaccaaaggaccaaagcctagacctgagatctggcacttgcaaaaagaaagatcacctggaagaacaaaatagaagactcctgctcccaataggcttgggtcaggaagaaggctgttggcataattgtggagtaggaagatggaaaacaactcctagagatcccaacagctgaacgcgtgcttgggcagtggctgcgggtgaagtcatgggaaggcaagtcatgaagggcattaatcaaggtctgttgtggggaaagtcagatgatgtgagtccttgttcacacagtaagtgcccagaaaaccttggtgcttttcctcttcccttccctgaagctgaacttctgcggaaaaatccaagaggcttttctctagggtgaaggtacactcgagcgtggtcattgaggacaagtcgacgagagatcccgagtacgtctacagtcagccttacgagtggactgatcaagttgaaagcaacagaacaagcatctataagaattgattatatgtcccagcactttggaaggctgaggcaagtggatcccttgggcctaggacttcgcgagaccagttgggcaacatgatgaactcctactaattttcgtccttcagaacaagatggaagaaactacggtcacatatgcaaatggagaagatgatgaacacagaaaaattatgcaaagataatccctaaaccttctttctcatcaaaagttatagcaaggtggtttaatatatcactgacggaacacgatgctttgtttaatgaagactcagacggaaaggatcagacatcaacctataaatgcatcaaccagaaggaaagaccaattttgaaaactgttgagcattattctatacctctaagctgttcttttctgaaccatgaatcgggagaattattgtcactcatacatgagtatgagttgtaattctcaattcccaagtaaaaatcttcctgcttttgttatattttt

SEQ ID NO: 64864 - DNA, 1196 bp, Homo sapiens
tgacttaaaactagagaggatctaggaactggagctgctgcctctgtctgctaagatgtgaagtccaagactgaaagtaacatagcagaaggagaaccaaaagatatgttgagtcttgatgctatttgttgaaccagtcctgaatccagctgtgtcggagtcagcgcagcttttgaagctggagagcatcatattttagaaagatcaagcaatgtggatgaggacacattaaaaagagaagaccgagaggaggggacaccactcaggcttataacctccagctcacatttcagcaccaaaggaccaaagcctagacctgagatctggcacttgcaaaaagaaagatcacctggaagaacaaaatagaagactcctgctcccaataggcttgggtcaggaagaaggctgttggcataattgtggagtaggaagatggaaaacaactcctagagatcccaacagctgaacgcgtgcttgggcagtggctgcgggtgaagtcatgggaaggcaagtcatgaagggcattaatcaaggttattttttccacagatgaatttctaatcctaaataatcatttacatgaattcagatttttttgatccaggatatgttctgggagtaactcccctgctttccctggatgtgtgcgagaaagcataggcatccactttctgaccaacaggagacccagtctcaggatggagcagacaccatgcatggtagagcagagagacagatacaacctaggtccttgatgaaatgattggccactggatcagccacagttaaagactgcctacctttggacttctggttatcttaggccaaaaatgtcctttttgtttaaggcactttgagccgggttttctaagacctagcagtctcaaccatccaaactaataagctgaattaactagatttcctgtcatgtccttcctgcctgattggtagcccttgactccaatttggcctcattttccgtaccttactggctgccttttcctctactcataggtcacttggaaataaaatatagatttacttcaaactcccactatcacatgcatttcttttcttactgacttcacggccttcaaatacggcctcataatcatttactctctgttaggttcctccaatgacttggatcactcctagcctgtcttgattggccacctccacactaatgccaaaaa

SEQ ID NO: 64865 - DNA, 852 bp, Homo sapiens
gaaaatgtgacaggatatatgcagtttccttaggggcacattctgagatgcttggatgacccacaaggactttgttaaacacaaatcccatcaggaaacaggcagttcactatgaccttatgaaagttttaattcaaagcacttgaagatacttttttttctgggcttcctgatcttacttcagtaaggtttttataaagttaatatccaagtaagagtatagctttcaaaggctattcctcattcttaaatgcattaaactgttgattaataacattatctaaaagctgtcaaataaaaataagaccaaactctttacttgtacagagtggactgatcaagttgaaagcaacagaacaagcatctataagaattgattatatgtcccagcactttggaaggctgaggcaagtggatcccttgggcctaggacttcgcgagaccagttgggcaacatgatgaactcctactaattttcgtccttcagaacaagatggaagaaactacggtcacatatgcaaatggagaagatgatgaacacagaaaaattatgcaaagataatccctaaaccttctttctcatcaaaagttatagcaaggtggtttaatatatcactgacggaacacgatgctttgtttaatgaagactcagacggaaaggatcagacatcaacctataaatgcatcaaccagaaggaaagaccaattttgaaaactgttgagcattattctatacctctaagctgttcttttctgaaccatgaatcgggagaattattgtcactcatacatgagtatgagttgtaattctcaattcccaagtaaaaatcttcctgcttttgttatattttt

SEQ ID NO: 64866 - DNA, 1045 bp, Homo sapiens
tgacttaaaactagagaggatctaggaactggagctgctgcctctgtctgctaagatgtgaagtccaagactgaaagtaacatagcagaaggagaaccaaaagatatgttgagtcttgatgctatttgttgaaccagtcctgaatccagctgtgtcggagtcagcgcagcttttgaagctggagagcatcatattttagaaagatcaagcaatgtggatgaggacacattaaaaagagaagaccgagaggaggggacaccactcaggcttataacctccagctcacatttcagcaccaaaggaccaaagcctagacctgagatctggcacttgcaaaaagaaagatcacctggaagaacaaaatagaagactcctgctcccaataggcttgggtcaggaagaaggctgttggcataattgtggagtaggaagatggaaaacaactcctagagatcccaacagctgaacgcgtgcttgggcagtggctgcgggtgaagtcatgggaaggcaagtcatgaagggcattaatcaaggttattttttccacagatgaatttctaatcctaaataatcatttacatgaattcagatttttttgatccaggatatgttctgggagtaactcccctgctttccctggatgtgtgcgagaaagcataggcatccactttctgaccaacaggagacccagtctcaggatggagcagacaccatgcatggtagagcagagagacagatacaacctaggtccttgatgaaatgattggccactggatcagccacagttaaagactgcctacctttggacttctggttatcttaggccaaaaatgtcctttttgtttaaggcactttgagccgggttttctaagacctagcagtctcaaccatccaaactaataagctgaattaactagatttcctgtcatgtccttcctgcctgattggtagcccttgactccaatttggcctcattttccgtaccttactggctgccttttcctctactcataggtcacttggaaataaaatatagatttacttc

SEQ ID NO: 64867 - DNA, 1238 bp, Homo sapiens
tgacttaaaactagagaggatctaggaactggagctgctgcctctgtctgctaagatgtgaagtccaagactgaaagtaacatagcagaaggagaaccaaaagatatgttgagtcttgatgctatttgttgaaccagtcctgaatccagctgtgtcggagtcagcgcagcttttgaagctggagagcatcatattttagaaagatcaagcaatgtggatgaggacacattaaaaagagaagaccgagaggaggggacaccactcaggcttataacctccagctcacatttcagcaccaaaggaccaaagcctagacctgagatctggcacttgcaaaaagaaagatcacctggaagaacaaaatagaagactcctgctcccaataggcttgggtcaggaagaaggctgttggcataattgtggagtaggaagatggaaaacaactcctagagatcccaacagctgaacgcgtgcttgggcagtggctgcgggtgaagtcatgggaaggcaagtcatgaagggcattaatcaaggtctgttgtggggaaagtcagatgatgtgagtccttgttcacacagtaagtgcccagaaaaccttggtgcttttcctcttcccttccctgaagctgaacttctgcggaaaaatccaagaggcttttctctagggtgaaggtacactcgagcgtggtcattgaggacaagtcgacgagagatcccgagtacgtctacagtcagccttacgagtggactgatcaagttgaaagcaacagaacaagcatctataagaattgattatatgtcccagcactttggaaggctgaggcaagtggatcccttgggcctaggacttcgcgagaccagttgggcaacatgaacaagatggaagaaactacggtcacatatgcaaatggagaagatgatgaacacagaaaaattatgcaaagataatccctaaaccttctttctcatcaaaagttatagcaaggtggtttaatatatcactgacggaacacgatgctttgtttaatgaagactcagacggaaaggatcagacatcaacctataaatgcatcaaccagaaggaaagaccaattttgaaaactgttgagcattattctatacctctaagctgttcttttctgaaccatgaatcgggagaattattgtcactcatacatgagtatgagttgtaattctcaattcccaagtaaaaatcttcctgcttttgttatattttt

SEQ ID NO: 64868 - DNA, 1280 bp, Homo sapiens
tgacttaaaactagagaggatctaggaactggagctgctgcctctgtctgctaagatgtgaagtccaagactgaaagtaacatagcagaaggagaaccaaaagatatgttgagtcttgatgctatttgttgaaccagtcctgaatccagctgtgtcggagtcagcgcagcttttgaagctggagagcatcatattttagaaagatcaagcaatgtggatgaggacacattaaaaagagaagaccgagaggaggggacaccactcaggcttataacctccagctcacatttcagcaccaaaggaccaaagcctagacctgagatctggcacttgcaaaaagaaagatcacctggaagaacaaaatagaagactcctgctcccaataggcttgggtcaggaagaaggctgttggcataattgtggagtaggaagatggaaaacaactcctagagatcccaacagctgaacgcgtgcttgggcagtggctgcgggtgaagtcatgggaaggcaagtcatgaagggcattaatcaaggttattttttccacagatgaatttctaatcctaaataatcatttacatgaattcagatttttttgatccagagatggggtttcaccattggtacccaggctggtctctaactcttgagctcaagtgatccacctgcctcagcctcccaaagtgctgggattacaggtgtgagccaccacacctagcctatgttgtctatagttttatcaaggacagactaaggtatattggaattaaaaaaaaagtagattttaaccatgaaggtttatttcttgctcatctccatcatgggctgactgggggctctgctccatgctcctcatttggggatgtatacagaaggagcagctaccacctgagctgctctgcattaattagtctctaatgcagaactaaagatagctaaggaggcctcatttggccattaaagtttctagcctgatggtgacatgtgccacttctgctcactactcattgactgcaacaagtctcacagccccacccagccactaagagccaggaggtacaatcctatcatgtgccaggaaggtgggaattcagaaatgctgggtgaacagcattagtgatgatcacagtggcccatgcagtgtgcatctcctctttctttttcctaggagattgctgactttggttagttttctatctctcctccatgctgaccattaatttaggcaaagctaatcccattttctgacaccaggagtggactttgatgcacttaagcca

SEQ ID NO: 64869 - DNA, 1029 bp, Homo sapiens
gtagattaggaagaggcttctgggacaagctttggagtttcaatatccctttattcacagggagtcagcgcagcttttgaagctggagagcatcatattttagaaagatcaagcaatgtggatgaggacacattaaaaagagaagaccgagaggaggggacaccactcaggcttataacctccagctcacatttcagcaccaaaggaccaaagcctagacctgagatctggcacttgcaaaaagaaagatcacctggaagaacaaaatagaagactcctgctcccaataggcttgggtcaggaagaaggctgttggcataattgtggagtaggaagatggaaaacaactcctagagatcccaacagctgaacgcgtgcttgggcagtggctgcgggtgaagtcatgggaaggcaagtcatgaagggcattaatcaaggatatgttctgggagtaactcccctgctttccctggatgtgtgcgagaaagcataggcatccactttctgaccaacaggagacccagtctcaggatggagcagacaccatgcatggtagagcagagagacagatacaacctaggtccttgatgaaatgattggccactggatcagccacagttaaagactgcctacctttggacttctggttatcttaggccaaaaatgtcctttttgtttaaggcactttgagccgggttttctaagacctagcagtctcaaccatccaaactaataagctgaattaactagatttcctgtcatgtccttcctgcctgattggtagcccttgactccaatttggcctcattttccgtaccttactggctgccttttcctctactcataggtcacttggaaataaaatatagatttacttcaaactcccactatcacatgcatttcttttcttactgacttcacggccttcaaatacggcctcataatcatttactctctgttaggttcctccaatgacttggatcactcctagcctgtcttgattggccacctccacactaatgccaaaaa

SEQ ID NO: 64870 - DNA, 474 bp, Homo sapiens
taaatgtgcttgttaaaaataaagatttcatttgtcaaaacccatagaatgtacaacacaaagagtgacccctaatatttggttgataataatgtgtcaatatcagttcatcagttgtaataactggaccacactgatgtaagatattgatggtagagaggctgtgagctggtggagaagggagtatgtgggaactctctttactttgctcagttttgctgtacacctaaactgctctggtgcccaacgtggaggcttttctctagggtgaaggtacactcgagcgtggtcattgaggacaagtcgacgagagatcccgagtacgtctacagtcagccttacggtaagcttgtgcgctcggaagaagctagggtgataatggggcaaactaaaagtaaaattaaaagtaaatatgcctcttatctcagctttattaaaattcttttaaaaagagggggagttaaagtatctaca

SEQ ID NO: 64871 - DNA, 1687 bp, Homo sapiens
atttcgctttatcgtggtggagtccaccctggctgtggacctattcaaactcagtctgtctcttgactggaggaggagaaggaaaagttgagcacattgccaaccggagttccccaagaatggcaagttaaaaccaaagtgtcagcacctcaacaacatttttttttggcttaacaaaacatcaaacggcatacaaatggcagaaatccacaatggaggggaactctgtgactttatggaaaatggagaaatcttcagtgaacactcatgccttaatgcacacatgggaactgaaaatacaggggacacttatgactgtgatgagtatggagaaaactttcccatgttacacaacagtgcccctgctggagagacactttctgtgttgaatcagtgcagaaaagccttcagcctgccaccaaatgttcaccagagaacgtggataggagacaaatcctttgaatacagtgactgtgaggaagcctttgttgatcagtcacatcttcaggcaaataggataactcacaatggagaaacactctatgaacagaagcaatgtgggagagcttttacttactccacaagccatgctgtgtctgttaaaatgcatactgtagaaaaaccctacgaatgtaaggaatgtggaaaattctttagatattcttcatatcttaatagtcacatgcgaacccatactggggagaaaccctatgaatgtaaggaatgtgggaaatgcttcactgtttcttcacacctagttgaacatgtaagaattcatactggagagaaaccttatcaatgtaaggaatgtggaagagccttcgctgggcgctcaggccttactaaacatgtacgaatacacactggagagaagccctatgaatgtaacgaatgtgggaaagcctacaataggttttatctactaactgaacattttaaaactcacacagaggagaagccctttgaatgtaaggtatgtggaaaatccttcagaagctcttcatgccttaagaatcactttagaattcacactggaataaaaccctataaatgtaaggagtgtgggaaagcattcactgtttcctcaagcttacataatcatgtaaaaatccatactggagagaagccctatgaatgtaaggactgtgggaaagcctttgctacatcttcacaactcattgaacatataagaactcacactggagagaaaccgtatatatgtaaggaatgtgggaaaaccttccgtgcttcttcacatctacagaaacatgttagaattcacactggagagaaaccctatatatgtaacgaatgtgggaaagcctacaatagattttatttacttactaaacatttaaaaacacactgaagaaaaactctgaatgtaaggaatgtggaaatcttttaggaatttctcataccataattaccacatttgaattcacactgaagagaaattttattggtacaaagaatgtgaggaggccttcagttatccccattcacttcgaagacatgaaagaactcatactctatgtgtcccctataaattttaggaatgttagggagccaatggaatctttttttattattttattttattttatttgagacagagttttgctgttgtcatcacacaggctggagtgcaatggcatgatcccagctcactgcaacctttgtctcc

SEQ ID NO: 64872 - DNA, 2082 bp, Homo sapiens
  misc_feature (54)..(54): n is a, c, g, or t
atttcgctttatcgtggtggagtccaccctggctgtggggctgtcggtcctccntgcgcggccagtggctagaggccgcaggctcagtgggtcccagtcaggagccaggtcgggaagtgtgtttgtcccgactccgcgcgttttctggagtggtttcatccgctgtgctcccttcttcaaaagcttggaaagcaacctttgacctattcaaactcagtctgtctcttgactggaggaggagaaggaaaagttgagcacattgccaaccggagttccccaagaatggcaagttaaaaccaaagtgtcagcacctcaacaacatttttttttggcttaacaaaacatcaaacggcatacaaatgatgggactgtctagttgcaggaaaacaagctcaggcctcctgctgatcctattttatggcagaaatccacaatggaggggaactctgtgactttatggaaaatggagaaatcttcagtgaacactcatgccttaatgcacacatgggaactgaaaatacaggggacacttatgactgtgatgagtatggagaaaactttcccatgttacacaacagtgcccctgctggagagacactttctgtgttgaatcagtgcagaaaagccttcagcctgccaccaaatgttcaccagagaacgtggataggagacaaatcctttgaatacagtgactgtgaggaagcctttgttgatcagtcacatcttcaggcaaataggataactcacaatggagaaacactctatgaacagaagcaatgtgggagagcttttacttactccacaagccatgctgtgtctgttaaaatgcatactgtagaaaaaccctacgaatgtaaggaatgtggaaaattctttagatattcttcatatcttaatagtcacatgcgaacccatactggggagaaaccctatgaatgtaaggaatgtgggaaatgcttcactgtttcttcacacctagttgaacatgtaagaattcatactggagagaaaccttatcaatgtaaggaatgtggaagagccttcgctgggcgctcaggccttactaaacatgtacgaatacacactggagagaagccctatgaatgtaacgaatgtgggaaagcctacaataggttttatctactaactgaacattttaaaactcacacagaggagaagccctttgaatgtaaggtatgtggaaaatccttcagaagctcttcatgccttaagaatcactttagaattcacactggaataaaaccctataaatgtaaggagtgtgggaaagcattcactgtttcctcaagcttacataatcatgtaaaaatccatactggagagaagccctatgaatgtaaggactgtgggaaagcctttgctacatcttcacaactcattgaacatataagaactcacactggagagaaaccgtatatatgtaaggaatgtgggaaaaccttccgtgcttcttcacatctacagaaacatgttagaattcacactggagagaaaccctgatccatgggctaagaatctgaatgaaaaagactatgagttgctgtgccttgatggtaccaggaaacctgtggaggagtatgcgaactgccacctggccagagccccgaatcacgctgtggtcacacggaaagataaggaagcttgcgtccacaagatattacgtcaacagcagcacctatttggaagcaacgtaactgactgctcgggcaacttttgtttgttccggtcggaaaccaaggaccttctgttcagagatgacacagtatgtttggccaaacttcatgacagaaacacatatgaaaaatacttaggagaagaatatgtcaaggctgttggtaacctgagaaaatgctccacctcatcactcctggaagcctgcactttccgtagaccttaaaatctcagaggtagggctgccaccaaggtgaagatgggaacgcagatgatccatgagtttgccctggtttcactggcccaagtggtttgtgctaaccacgtctgtcttcacagctctgtgttgccatgtgtgctgaacaaaaaataaaaattattattgatttt

SEQ ID NO: 64873 - DNA, 1349 bp, Homo sapiens
cggcggccgttgcagcggcggcggcgagagcggcgggagcccgaggcggcggcgctcgcggcccatcgtggggcccgagctgtgcgcctcggctcggagcccggaccgggcgggggcgccgacgtgcctcagcctgccttcgcgagggaggcgggagtgagcagaaaggcttagggcccagggggcggggaaggggggccgggcctggatccggcggggaggccgagccggaggccggaccgtggctcgcgctgtccccgggacgcggatcgaacgttggcggcgcggatcgcacgtcggcggccggtggaacgcgggagctgggcggcgcgcggactggggccatggcgtctgtgcaggcgtcccgccgccagtggtgctacctgtgcgacctgcccaagatgccgtgggccatggtgtgggacttcagcgaggccgtgtgtcgcggctgcgtgaacttcgagggcgcggaccgcatcgaactgctcatcgatgccgcccgccagctcaagcgcagccacgtgctccccgagggccgctcgcccgggcccccggcccttaacaacccagcatcgccttgtggcccgcaacggcgaagcagaagtcagtcccacagcgggggccgaagctgtcagcgggggtggcagcggcactggggcgacccctggggcccccctgtgctgtaccctgtgcagggagcggctagaagacacccacttcgtccagtgcccctcggtgcccggacacaagttctgctttccctgctcccgggagttcatcaaggcgcagggcccggccggggaggtgtactgcccgagcggagacaagtgcccgctggtcggctcctccgtgccctgggccttcatgcagggcgagatcgccaccatccttgctggagacatcaaagttaagaaagaacgggacccctaggctaccactgcctccaggctactgccctctgcccctttgccacccaccgctgccgcggataaattattccctccccgacccagcccagtgccacctctatctgtgtacatactcccttcttccacccagatgggtcccctggggtagatgcattgtgggtggggggagaaagcttgtggctcctgtccgagggggtgtttggggtcccttggcccctccagtttccctctgtcctccttggcttggctttgctgctgcttgtagttgggggagaggtgcccccctcctccttgagaagggacctcctgaaaactcgctctttataaacgaggcaaaagcatttaattcccacccccccaccccccgctcccttctgctccttcaataaaccgaaagatgggttttttttttcaaacttg

SEQ ID NO: 64874 - DNA, 851 bp, Homo sapiens
cggcggccgttgcagcggcggcggcgagagcggcgggagcccgaggcggcggcgctcgcggcccatcgtggggcccgagctgtgcgcctcggctcggagcccggaccgggcgggggcgccgacgtgcctcagcctgccttcgcgagggaggcgggagtgagcagaaaggcttagggcccagggggcggggaaggggggccgggcctggatccggcggggaggccgagccggaggccggaccgtggctcgcgctgtccccgggacgcggatcgaacgttggcggcgcggatcgcacgtcggcggccggtggaacgcgggagctgggcggcgcgcggactggggccatggcgtctgtgcaggcgtcccgccgccagtggtgctacctgtgcgacctgcccaagatgccgtgggccatggtgtgggacttcagcgaggccgtgtgtcgcggctgcgtgaacttcgagggcgcggaccgcatcgaactgctcatcgatgccgcccgccagctcaagcgcagccacgtgctccccgagggccgctcgcccgggcccccggcccttaagcacccggccaccaaggacctggcggcggcagccgcacaggggccccagctgccgcccccgcaggcccagccccagccgtcagggaccggcggcggcgtgtcgggccaggaccgctatgacagggccacatcatcaggccgcctccccctgccctcgcccgccctggagtacactctggggtcccgcctggccaatgggctgggccgtgaggaggccgtggctgtcgggctagtcggggctgtcggctaatcggactgtcggctagtcggggagatcctcaagcaccag

SEQ ID NO: 64875 - DNA, 2518 bp, Homo sapiens
cggcggccgttgcagcggcggcggcgagagcggcgggagcccgaggcggcggcgctcgcggcccatcgtggggcccgagctgtgcgcctcggctcggagcccggaccgggcgggggcgccgacgtgcctcagcctgccttcgcgagggaggcgggagtgagcagaaaggcttagggcccagggggcggggaaggggggccgggcctggatccggcggggaggccgagccggaggccggaccgtggctcgcgctgtccccgggacgcggatcgaacgttggcggcgcggatcgcacgtcggcggccggtggaacgcgggagctgggcggcgcgcggactggggccatggcgtctgtgcaggcgtcccgccgccagtggtgctacctgtgcgacctgcccaagatgccgtgggccatggtgtgggacttcagcgaggccgtgtgtcgcggctgcgtgaacttcgagggcgcggaccgcatcgaactgctcatcgatgccgcccgccagctcaagcgcagccacgtgctccccgagggccgctcgcccgggcccccggcccttaagcacccggccaccaaggacctggcggcggcagccgcacaggggccccagctgccgcccccgcaggcccagccccagccgtcagggaccggcggcggcgtgtcgggccaggaccgctatgacagggccacatcatcaggccgcctccccctgccctcgcccgccctggagtacactctggggtcccgcctggccaatgggctgggccgtgaggaggccgtggctgagggggcgcgaagggccttgcttggctccatgcctggcttgatgccccctgggctgctggcagctgcagtgtctggcctgggaagccgaggcctgacgctggcacccggcttgagtcctgcccgtcccctcttcggctccgatttcgagaaagagaagcagcagaggaatgcggactgtctggcagaactgaacgaggccatgcgaggccgggcagaggaatggcacgggcgccccaaagcagtgcgggaacagctactggcgctgtccgcctgcgccccgttcaatgtgcgcttcaagaaggatcacgggctggtggggcgagtgttcgccttcgatgctactgcccgtcctccaggatacgagttcgagctgaagctcttcaccgaatacccctgtggttccggcaatgtgtacgccggcgtcctggcagtggctcgccagatgttccacgatgctctgcgggagccgggcaaggcactggcttcttcgggcttcaagtacctcgaatatgaacgccggcatggatcaggagaatggcggcagctgggcgagctgcttaccgacggcgtccgcagcttccgcgagccagctcccgcggaggccctgccccagcagtacccagagccggcccctgcggctctctgtggcccacccccgcgagccccatcccggaacctggcgcccacgccgcgccgtcgcaaggcatcccccgagccggagggcgaggcggctgggaagatgaccaccgaggagcagcagcaacggcactgggtggcacccggcggcccgtactccgctgagacccctggtgtgccctcgcccattgccgccctgaagaatgtggccgaagccctgggccactcacccaaggaccctggcggaggcggggggcctgtgcgtgcagggggcgccagccctgcagcctcctccacggcccagccgccaacccagcatcgccttgtggcccgcaacggcgaagcagaagtcagtcccacagcgggggccgaagctgtcagcgggggtggcagcggcactggggcgacccctggggcccccctgtgctgtaccctgtgcagggagcggctagaagacacccacttcgtccagtgcccctcggtgcccggacacaagttctgctttccctgctcccgggagttcatcaaggcgcagggcccggccggggaggtgtactgcccgagcggagacaagtgcccgctggtcggctcctccgtgccctgggccttcatgcagggcgagatcgccaccatccttgctggagacatcaaagttaagaaagaacgggacccctaggctaccactgcctccaggctactgccctctgcccctttgccacccaccgctgccgcggataaattattccctccccgacccagcccagtgccacctctatctgtgtacatactcccttcttccacccagatgggtcccctggggtagatgcattgtgggtggggggagaaagcttgtggctcctgtccgagggggtgtttggggtcccttggcccctccagtttccctctgtcctccttggcttggctttgctgctgcttgtagttgggggagaggtgcccccctcctccttgagaagggacctcctgaaaactcgctctttataaacgaggcaaaagcatttaattcccacccccccaccccccgctcccttctgctccttcaataaaccgaaagatgggttttttttttcaaacttg

SEQ ID NO: 64876 - DNA, 2261 bp, Homo sapiens
cggcggccgttgcagcggcggcggcgagagcggcgggagcccgaggcggcggcgctcgcggcccatcgtggggcccgagctgtgcgcctcggctcggagcccggaccgggcgggggcgccgacgtgcctcagcctgccttcgcgagggaggcgggagtgagcagaaaggcttagggcccagggggcggggaaggggggccgggcctggatccggcggggaggccgagccggaggccggaccgtggctcgcgctgtccccgggacgcggatcgaacgttggcggcgcggatcgcacgtcggcggccggtggaacgcgggagctgggcggcgcgcggactggggccatggcgtctgtgcaggcgtcccgccgccagtggtgctacctgtgcgaccggcggcggcgtgtcgggccaggaccgctatgacagggccacatcatcaggccgcctccccctgccctcgcccgccctggagtacactctggggtcccgcctggccaatgggctgggccgtgaggaggccgtggctgagggggcgcgaagggccttgcttggctccatgcctggcttgatgccccctgggctgctggcagctgcagtgtctggcctgggaagccgaggcctgacgctggcacccggcttgagtcctgcccgtcccctcttcggctccgatttcgagaaagagaagcagcagaggaatgcggactgtctggcagaactgaacgaggccatgcgaggccgggcagaggaatggcacgggcgccccaaagcagtgcgggaacagctactggcgctgtccgcctgcgccccgttcaatgtgcgcttcaagaaggatcacgggctggtggggcgagtgttcgccttcgatgctactgcccgtcctccaggatacgagttcgagctgaagctcttcaccgaatacccctgtggttccggcaatgtgtacgccggcgtcctggcagtggctcgccagatgttccacgatgctctgcgggagccgggcaaggcactggcttcttcgggcttcaagtacctcgaatatgaacgccggcatggatcaggagaatggcggcagctgggcgagctgcttaccgacggcgtccgcagcttccgcgagccagctcccgcggaggccctgccccagcagtacccagagccggcccctgcggctctctgtggcccacccccgcgagccccatcccggaacctggcgcccacgccgcgccgtcgcaaggcatcccccgagccggagggcgaggcggctgggaagatgaccaccgaggagcagcagcaacggcactgggtggcacccggcggcccgtactccgctgagacccctggtgtgccctcgcccattgccgccctgaagaatgtggccgaagccctgggccactcacccaaggaccctggcggaggcggggggcctgtgcgtgcagggggcgccagccctgcagcctcctccacggcccagccgccaacccagcatcgccttgtggcccgcaacggcgaagcagaagtcagtcccacagcgggggccgaagctgtcagcgggggtggcagcggcactggggcgacccctggggcccccctgtgctgtaccctgtgcagggagcggctagaagacacccacttcgtccagtgcccctcggtgcccggacacaagttctgctttccctgctcccgggagttcatcaaggcgcagggcccggccggggaggtgtactgcccgagcggagacaagtgcccgctggtcggctcctccgtgccctgggccttcatgcagggcgagatcgccaccatccttgctggagacatcaaagttaagaaagaacgggacccctaggctaccactgcctccaggctactgccctctgcccctttgccacccaccgctgccgcggataaattattccctccccgacccagcccagtgccacctctatctgtgtacatactcccttcttccacccagatgggtcccctggggtagatgcattgtgggtggggggagaaagcttgtggctcctgtccgagggggtgtttggggtcccttggcccctccagtttccctctgtcctccttggcttggctttgctgctgcttgtagttgggggagaggtgcccccctcctccttgagaagggacctcctgaaaactcgctctttataaacgaggcaaaagcatttaattcccacccccccaccccccgctcccttctgctccttcaataaaccgaaagatgggttttttttttcaaacttg

SEQ ID NO: 64877 - DNA, 292 bp, Homo sapiens
ttggctatacactcttcaaagtcagaacttgcaatttcaaattcagtgcaattaaatgtaaattatagtcactgaagacccactgtattccagacaccatggaacgtgttaagagcaagagagatgagtaaggcataacccttaccctgaaagatatcatagtccagaaaaggagacaaagacctaacaaacaatcctgattcaaggcactacatgaagatgcaggaatacacacaacatacagcggtagcacagaagagggggcaggctctacctatgcaggcggggctgt

SEQ ID NO: 64878 - DNA, 427 bp, Homo sapiens
acagtttgtgctaacctgatagtgggaccaggcaggcacatccagtagtcttggaatatggccacagtagaaagaccaaccatgtgattaggaagttgaagctttgggtcacatgatattgcctcacctctggagagagggacctggagattttattcaatcacactgacaatgaatcaatcaatcgtgtttgtatagggaagcctcaataaaactctagacactaaagctttggtgagagttgcaggttggcaatacctctagtgcattgtcatgtaatgtatgtaatgtcagaagggtaacacgttctgaggatgtggaaaattcccgttaagaaccctcccagactcttccctatatgttttttttcccttgagtgcttttaatgcataatttctctataataaacataaatctgagtataata

SEQ ID NO: 64879 - DNA, 886 bp, Homo sapiens
tgccactggagagctttgaggagaggatcagtctggctactgggttgagaattaatcatagcaggcaaaggcaaaagaagtgaggttagttaggaggctttacaacaacccagatgagagatgggaggttttagccagggagatggagatgttgagagagtagctggactcaggattgtgacagtggactgaaggaaaagcaggttttgggggaagattgcatttctcccttcaacttcagttacgtagatcacccatatgccacacaactgcaactctgtaacagccaatttttagcttcttccttatctaagccatcctgtaggccataggaattaaaactaggttggatcaaggaaaagtgaatgctagatccatacaaaactatttggatatttgcctttgtattttattgttttgaaattatttttaatggttcaataaactcttactagaactacaagcaatataattatttcctctgctttattagaaatgtttttgtaatcatgttaattatattacttttaactatataaggcttgtgtctcttttttataaattgatgtttatatcctctgtaagataaatataaaggctttttgttcatatgaggatgtgctgtaagattgcagggagtataaaaattggcaatggagtaggtgacttgtattattagtctgatcttaatgttgtaacatactgatcatgcaaaatatataattagtttgtttttgctatttaatatgtgtaggactgtaacaaacagactagagaagatggccttaagttacaagaaagcaagtaaattactatctaattaaaagtatttgattctaatactagcagagttctgtctagaaaataaattaactttctgtatgct

SEQ ID NO: 64880 - DNA, 709 bp, Homo sapiens
agcggggagggctcgccagagcgctcgcatggcgggccggtgattgtagtcaatctggccgtattctcaggcagggtcgcccggggcggactacatctcccgggatgctgcgcggccgccccgcggaagattgtgaatatgtatcagaatgttaatgattagctgctgctaaatttggtcaaagaagtcacctacacagagcgtgttgttagagctgtgctgagcgggtgtttgggttgttggctgctttcttccccctttctcacacacttgtatattattttgaggtggtgttcgcagagtttgaaaggagagagaattaaaaaaaaaagccgcaagcgtttcactcttttatttttataatccccttcaatttggggttaaaaaaaagacaagaaaacaggaaggaagagaaataaggaaatgagatgtggtaaaagaagctaaaaggtgccttttaaaagatcgttgctgtgaagtgaaaaaaatctccagagaaaccaaaaagcaccgccgagacctcttccgaaccaaaggagtttgtgtttgcttttagggaagaagaaagatcattcattcggaggaataacaaccaattaaaagacaaataaaaaaagtttggagtgggacgcagagcgagcgagaggagctgccggcgggcggtggggcgcggagcccgcactttcccggccgggtgagcggcggccgc

SEQ ID NO: 64881 - DNA, 723 bp, Homo sapiens
gcccacagtgcccagggagggatacatggcagccccagggtgtggggcaggtgggcagggcactaatgaggggcctcgagtcccaggccaagggctcagacttcctcctggggataatgggaaggagaacctcatggccaggtttgtgcccttagtgaggtccccaagggggaacctggaaggaccactgtcttcttatagcccttcagacccccccagaggctctgcctccccacaccctggcctccctccccaggctctgggaggccaggcctcgccccctctcctgtgctgctccttctcccagaggactgcatccgccctcagcacttcaaggccctgcatgtgcccgcacctctccactcccctggctcagcttggacctctcttctgaactccagacttgcggatcctgctccccttcccacttctgcacttgggggtctaatgaggcctcagtggaacatagaattcctcccgccctgacaacatagctcccgcctgggaggcctcctggatgactcctttcgcctcctcccttccctgagagcagcccctggctcaacctccacctccgtgctgcctcggaccacctgcccagtcgagctgccatcacctgccaggtgaccacagcagccctcactcatcccctgctcctctgccttccactcccgcgaccatcagcctccccaagccagaaaggtccttctggagggtgacgca

SEQ ID NO: 64882 - DNA, 417 bp, Homo sapiens
aaattctaacccttgtgcattgctgctgggactataaaatggtgtggtcactgtggaaaacagtatgatgattccttaaaaaattaaaaacagaattaccatatgattcagcaattccatgcctgggtatatacccaaaatgaaagcaggcactggaacatagaattcctcccgccctgacaacatagctcccgcctgggaggcctcctggatgactcctttcgcctcctcccttccctgagagcagcccctggctcaacctccacctccgtgctgcctcggaccacctgcccagtcgagctgccatcacctgccaggtgaccacagcagccctcactcatcccctgctcctctgccttccactcccgcgaccatcagcctccccaagccagaaaggtccttctggagggtgacgca

SEQ ID NO: 64883 - DNA, 326 bp, Homo sapiens
gcttgctgccgtgtaagacatgcctttgctcctcttttgccttccaccatgattgtgaggcctccccagccatgtggaactgtgagtccattaaatttctttttctttataaattagccagtcttgggtatttcttcatagcagcatgaaaatggactgatacaacaatttatggaattatctttctattgatatctgttatgaaactatgtatttatacacctaaaatgtgataaaagtcacactcgagaatggaagagaatagggttaatgacaaacaaaagaaaaagacgcaggcattggctttaaccactgtgagtacaaga

SEQ ID NO: 64884 - DNA, 184 bp, Homo sapiens
ggacttgtggtggtggagccgagcccaggtctccctaaaccctgcctcctgtctctgctgtccaccccaagagacctccgtgcttctgtttcagctttcccgaaagccgtgctggccccatctgccatcctgcaaccccggcaacacccgtccaagatgcttctgttgcttcctgaggccggcc

SEQ ID NO: 64885 - DNA, 435 bp, Homo sapiens
tctgattagaaaccagagtcctgctatttttaaatgaaagggaaaaaaagaaatcaagaaatagcaaggaaaacctaaagaaagtacaaaaaagaaaagggaagaagcagcggcaaatgaaggggtaggcaacaattttgcagctgagcttttggagcgtgccagtatgaataccaactgccagcgtgcagaatcccagaggctgcaaatcaagcttagcatcagcctgctgcctggaaaagcagggaaagggcagggccccaacaagacagagagggcctcctaggtgccaagcactgtgtcaggtgctttacagcatctcaatgagcaagacactagcactttaaaaccaaatccagcgctgaattaataacacagccaagagctctgaaagacaccctgaaagcaaagctgtttatgattgtggggccaagg

SEQ ID NO: 64886 - DNA, 363 bp, Homo sapiens
  misc_feature (56)..(56): n is a, c, g, or t
  misc_feature (205)..(205): n is a, c, g, or t
  misc_feature (249)..(249): n is a, c, g, or t
gagacacttattaaataatatgtaatatggtttggctctgtgtccccacccaagtntcatcttgaattgtactcccataattcccacgtgttgtgggagggaccagatggcagataatttgaatcacgggggcggtttcctccatactgttctcgtgatagtgagtaagtctcacgacatctgatgggcttatcaggggtttctncttttacgtcttcctcattttctcttgtcaccaccacataagangtgccaacctccccagtaccaggcactgttctaggcacttgacataagtaatgaacacagtcgacttggccctgagccttaggacagttgcaaaaccttgctactcacagtgag

SEQ ID NO: 64887 - DNA, 421 bp, Homo sapiens
aacggagtgggtttggttaccagttggccatttgcagcgagctcccccctccgcccaactccaccccataccttagagctgtgggcatcgcgggcaaaaataggactcagtgctgccactgggagtggctccctggctctgcccctgggttctctgggtagggagttggcagctggactctctgttatccaccggtgatatctgggccttgtgatgggtgctgggaaccctgaggatgtacttgggacatagcttatattctgggggagccagagagactccagtcatttccctatggcacgatggggtaggggccatatgaactatggcaacccagcacaatgccaggagagcttcccggaggaggtgatacctggcctggatcttaaaggatgagcaggagctcatgagaaaaaaaaaa

SEQ ID NO: 64888 - DNA, 397 bp, Homo sapiens
ttttaaagacatcttaactacgaaaaagagattgctgatctaaattgatgatatactgttaatacaaagcttttggtgtatcttacatgacataacattatgaaaaatacaatagagtatgtcatatagatgttactctaaactttaaaaaaagactacaaagtgttctatgcataattacattatttaaggggaaaaaggtgttggctgacactattccagctagacagtactgaattgcaaattcatcatttgggcacagatattaatacagcttcctctttattcctatagcattcatttgaaatccctgtactccatgtcatttgctacatatgaaacaaattgtcaagtttttaaccacttgtgtagtttaataaaagagattaaaatcatt

SEQ ID NO: 64889 - DNA, 1113 bp, Homo sapiens
tgcagagttggggcaatgtgcccttgaaggagactagagcagcttgcccaaggacagaggtggaaagtgacctgctctggacttgtgaggccaaggtcatggggaacattcacagttggcctgtgcacacttgcagccccactcagataagacagtggggcggacctcctggggccaacagcaaggaccttctgaacctcgctcggtcaggatcagggtgtggtcagcaagcattcttctgtctccttttccttcacttatttcttctgataatatggcctttatggctacgttagccagaaattgagcttcagaaaactaacttgaaaaacagcttttcagcagctttctcccctgggatgtgcgtgccctcctgttcatgggtcagcaatatctctttcctttgccggtgtctgcaaaccatagagaagacagtatgaaaaagggccaggccaggccatgactcttctgggagcatctagaaagtcgtgggatggatgagaacactttggtctgatctgtcagctgtgtgtgataaagtcagatggcttgttccaaaggaatatcactcttgaagaaagcttcacctcaccccctcaagaataccagtggttctcaacgcatggtcttcagacctgcagcatcagcattacctgagaacttttgagaaatacaaattctggagcccatcctggacatctggaatcagaaaccctgggatgggacctgacacctgtgtttataacgagcccttcagatgctccagaggacactcgggcttgagaaccactggcctgtacgcctcaaaccagggcagatgaaggcacttctaaaacagaattgggattagtgtcctggccttggccctattaaacaaacagcaagcaaatgatgggctgtggatggcgcaacacagtttcgtggctccaggtgtctttagaatcatgactcgggttgatttcttgctttccctgtactgtactttgcatgtttcctcatctgtaaaacaagggccgtatgtaactgaattctgtcctagttactattgatgtacatcaaaccacccctaagtttagtgacacaagataacaacaattttatattcctcgcaaa

SEQ ID NO: 64890 - DNA, 651 bp, Homo sapiens
tgaagcgataagacgcacggtgttctgggaggagttacgcaggcagggttgtggttgctggctgttaccaggacaaccggaggcgattgaccgttatctgcggtttggagccgttagcgggagaggcagagatattcagaggtcttttaggatgcgctaaagggtcgtgagggctctcttaaaattttcttcacaagcggttatccagtcgtgccccgcggccctgctgctggccccggggatctgagtcgtaccctcttgtttttctctgagtcagtcttaaggtgaaatgaagtgtggcccagtggctcctcactgtcgcttctctagttttctgcctccttttagaaaattgaattgaaaagacaggatgaagtggacacagcatgtgaagacaattctttcaagaagtttggctgtcaaggaaaacagagaatgtgctaaagaacatacagacacagagcagacaggccacctttgcaaccacatggaggtttgtctgatattgaagctaaagaagctaagctggaagacagagagaccaagtcctgatgacattgtttgaacccagagatccagacatgcctgaaaactagttttaccactggacttatccgttgaatgagccaataaactctcttttatacttaa

SEQ ID NO: 64891 - DNA, 661 bp, Homo sapiens
tcctggctaacatggtgaaactccgtctctactaaaaatacaaaaattagctgggtttggtggctcgcgcctgtaatcccagctactcggaggcgattgaccgttatctgcggtttggagccgttagcgggagaggcagagatattcagaggtcttttaggatgcgctaaagggtcgtgagggctctcttaaaattttcttcacaagcggttatccagtcgtgccccgcggccctgctgctggccccggggatctgagtcgtaccctcttgtttttctctgagtcagtcttaaggtgaaatgaagtgtggcccagtggctcctcactgtcgcttctctagttttctgcctccttttagaaaattgaattgaaaagacaggatgaagtggacacagcatgtgaagacaattctttcaagaagtttggctgtcaaggaaaacagagaatgtgctaaagaacatacagacacagagcagacaggccacctttgcaaccacatggaggtttgtctgatattgaagctaaagaagctaagctggaagacagagagaccaagtcctgatgacattgtttgaacccagagatccagacatgcctgaaaactagttttaccactggacttatccgttgaatgagccaataaactctcttttatacttaa

SEQ ID NO: 64892 - DNA, 616 bp, Homo sapiens
cacacccacctcaccccccccccccgccacctccaaggcccgccactatacggctaggtacgaggctggggtgtgccgttagcgggagaggcagagatattcagaggtcttttaggatgcgctaaagggtcgtgagggctctcttaaaattttcttcacaagcggttatccagtcgtgccccgcggccctgctgctggccccggggatctgagtcgtaccctcttgtttttctctgagtcagtcttaaggtgaaatgaagtgtggcccagtggctcctcactgtcgcttctctagttttctgcctccttttagaaaattgaattgaaaagacaggatgaagtggacacagcatgtgaagacaattctttcaagaagtttggctgtcaaggaaaacagagaatgtgctaaagaacatacagacacagagcagacaggccacctttgcaaccacatggaggtttgtctgatattgaagctaaagaagctaagctggaagacagagagaccaagtcctgatgacattgtttgaacccagagatccagacatgcctgaaaactagttttaccactggacttatccgttgaatgagccaataaactctcttttatacttaa

SEQ ID NO: 64893 - DNA, 1003 bp, Homo sapiens
tgaagcgataagacgcacggtgttctgggaggagttacgcaggcagggttgtggttgctggctgttaccaggacaaccggaggcgattgaccgttatctgcggtttggagccgttagcgggagaggcagagatattcagaggtcttttaggatgcgctaaagggtcgtgagggctctcttaaaattttcttcacaagcggttatccagtcgtgccccgcggccctgctgctggccccggggatctgagtcgtaccctcttgtttttctctgagtcagtcttaaggtgaaatgaagtgtggcccagtggctcctcactgtcgcttctctagttttctgcctccttttagaaaattgaattgaaaagacaggatgaagtggacacagcatgtgaagacaattctttcaagaagtttggctgtcaaggaaaacagagaatgtgctaaagaacatacagacacagagcagacaggccacctttgcaaccacatggaggtttgtctgatattgaagctaaagaagctaagctggaagacagagagaccaagtcctgatgacattgtttgaacccagagatccagacatgcctgaaaactagttttaccactggacttatccgttgaatgagccaataaactctcttttatacttaaaaaaaaaaaaaaaaaaaaaaaaaaaaaaaaaaaaaaaaaaaaaaaaaaaaaaaaaaaaacaaaaaaaaaaaaaaaaaaaaaaaaaaaggggggggggggggcggcccgaaaaaaaatttcttcgaacacacggtgtggggggggggcgagcgccagatagtgtgaggagagcaacggtggccaacaagcgtggtcctcccagagaaaaactcgcgcgagaagagaggcgggggggggctccccaccaaaaaaaaaagcgcgggggggacacggcgtcgctctgacacacacaccgaggggttgtgggacaacaggggaggtacaacggggacgcacggagggctgaaatagc

SEQ ID NO: 64894 - DNA, 1027 bp, Homo sapiens
tgaagcgataagacgcacggtgttctgggaggagttacgcaggcagggttgtggttgctggctgttaccaggacaaccggaggcgattgaccgttatctgcggtttggagccgttagcgggagaggcagagatattcagaggtcttttaggatgcgctaaagggtcgtgagggctctcttaaaattttcttcacaagcggttatccagtcgtgccccgcggccctgctgctggccccggggatctgagtcgtaccctcttgtttttctctgagtcagtcttaaggtgaaatgaagtgtggcccagtggctcctcactgtcgcttctctagttttctgcctccttttagaaaattgaattgaaaagacaggatgaagtggacacagcatgtgaagacaattctttcaagaagtttggctgtcaaggaaaacagagaatgtgctaaagaacatacagacacagagcagacaggccacctttgcaaccacatggaggtttgtctgatattgaagctaaagaagctaagctggaagacagagagaccaagtcctgatgacattgtttgaacccagagatccagacatgcctgaaaactagttttaccactggacttatccgttgaatgagccaataaactctcttttatacttaaccttgggttttacctggatttttgtcattgacagctcaaaatattctaatatagaagtatacatcattaaatcaaaaaaaaaacaaaaaaaaaaaaaaaaaaaaaaaaaaaggggggggggggggcggcccgaaaaaaaatttcttcgaacacacggtgtggggggggggcgagcgccagatagtgtgaggagagcaacggtggccaacaagcgtggtcctcccagagaaaaactcgcgcgagaagagaggcgggggggggctccccaccaaaaaaaaaagcgcgggggggacacggcgtcgctctgacacacacaccgaggggttgtgggacaacaggggaggtacaacggggacgcacggagggctgaaatagc

SEQ ID NO: 64895 - DNA, 424 bp, Homo sapiens
gccatcagcagggccgcggggcacgactggataaccgcttgtgaagaaaatcttaaggtgaaatgaagtgtggcccagtggctcctcactgtcgcttctctagttttctgcctccttttagaaaattgaattgaaaagacaggatgaagtggacacagcatgtgaagacaattctttcaagaagtttggctgtcaaggaaaacagagaatgtgctaaagaacatacagacacagagcagacaggccacctttgcaaccacatggaggtttgtctgatattgaagctaaagaagctaagctggaagacagagagaccaagtcctgatgacattgtttgaacccagagatccagacatgcctgaaaactagttttaccactggacttatccgttgaatgagccaataaactctcttttatacttaa

SEQ ID NO: 64896 - DNA, 577 bp, Homo sapiens
tcctggctaacatggtgaaactccgtctctactaaaaatacaaaaattagctgggtttggtggctcgcgcctgtaatcccagctactcggaggcgattgaccgttatctgcggtttggagccgttagcgggagaggcagagatattcagaggtcttttaggatgcgctaaagggtcgtgagggctctcttaaaattttcttcacaagcggttatccagtcgtgccccgcggccctgctgctggccccggggatctgagtcgtaccctcttgtttttctctgagtcagtcttaaggtgaaatgaagtgtggcccagtggctcctcactgtcgcttctctagttttctgcctccttttagaaaatgtgctaaagaacatacagacacagagcagacaggccacctttgcaaccacatggaggtttgtctgatattgaagctaaagaagctaagctggaagacagagagaccaagtcctgatgacattgtttgaacccagagatccagacatgcctgaaaactagttttaccactggacttatccgttgaatgagccaataaactctcttttatacttaa

SEQ ID NO: 64897 - DNA, 936 bp, Homo sapiens
tgaagcgataagacgcacggtgttctgggaggagttacgcaggcagggttgtggttgctggctgttaccaggacaaccggaggcgattgaccgttatctgcggtttggagccgttagcgggagaggcagagatattcagaggtcttttaggatgcgctaaagggtcgtgagggctctcttaaaattttcttcacaagcggttatccagtcgtgccccgcggccctgctgctggccccggggatctgagtcgtaccctcttgtttttctctgagtcagtcttaaggtgaaatgaagtgtggcccagtggctcctcactgtcgcttctctagttttctgcctccttttagaaaatgtaagttgagaatttctaatttacatcgggatgtgttctaatgcgcttgtttttaaaactgtggaaaatttttaaaagaaaataaatctcaccagtcatccagctacccagaagtaacattttcatgcattacctattaatttttttctctgcatattttttcatagttgagataatttagggaaaaccattttgtgtccttcatatatggatgaatacaatataattttggtattaatatcatagcaacaaagaaggcattgaaggctttaaatctgtttacagtgaattgaaaagacaggatgaagtggacacagcatgtgaagacaattctttcaagaagtttggctgtcaaggaaaacagagaatgtgctaaagaacatacagacacagagcagacaggccacctttgcaaccacatggaggtttgtctgatattgaagctaaagaagctaagctggaagacagagagaccaagtcctgatgacattgtttgaacccagagatccagacatgcctgaaaactagttttaccactggacttatccgttgaatgagccaataaactctcttttatacttaa

SEQ ID NO: 64898 - DNA, 661 bp, Homo sapiens
tgaagcgataagacgcacggtgttctgggaggagttacgcaggcagggttgtggttgctggctgttaccaggacaaccggaggcgattgaccgttatctgcggtttggagccgttagcgggagaggcagagatattcagaggtcttttaggatgcgctaaagggtcgtgagggctctcttaaaattttcttcacaagcggttatccagtcgtgccccgcggccctgctgctggccccggggatctgagtcgtaccctcttgtttttctctgagtcagtcttaaggtgaaatgaagtgtggcccagtggctcctcactgtcgcttctctagttttctgcctccttttagaaaattgaattgaaaagacaggatgaagtggacacagcatgtgaagacaattctttcaagaagtttggctgtcaaggaaaacagagaatgtgagtagccaaagcagaatgacagtgaaagaaagaaattgggagccagacaatacagcccgacagtttacgcctgtacggatgtacctctttcacaaaagattgagtatgcttggggaaaaaaaatacacactataataggagaaaatgatgaagagaaactgaggtaaaggtaattggaaaacaaaataaagccaggggtatattaataccccaaaacttca

SEQ ID NO: 64899 - DNA, 946 bp, Homo sapiens
tgaagcgataagacgcacggtgttctgggaggagttacgcaggcagggttgtggttgctggctgttaccaggacaaccggaggcgattgaccgttatctgcggtttggagccgttagcgggagaggcagagatattcagaggtcttttaggatgcgctaaagggtcgtgagggctctcttaaaattttcttcacaagcggttatccagtcgtgccccgcggccctgctgctggccccggggatctgagtcgtaccctcttgtttttctctgagtcagtcttaaggtgaaatgaagtgtggcccagtggctcctcactgtcgcttctctagttttctgcctccttttagaaaatgtaagttgagaatttctaatttacatcgggatgtgttctaatgcgcttgtttttaaaactgtggaaaatttttaaaagaaaataaatctcaccagtcatccagctacccagaagtaacattttcatgcattacctattaatttttttctctgcatattttttcatagttgagataatttagggaaaaccattttgtgtccttcatatatggatgaatacaatataattttggtattaatatcatagcaacaaagaaggcattgaaggctttaaatctgtttacagtgaattgaaaagacaggatgaagtggacacagcatgtgaagacaattctttcaagaagtttggctgtcaaggaaaacagagaatgtgagtagccaaagcagaatgacagtgaaagaaagaaattgggagccagacaatacagcccgacagtttacgcctgtacggatgtacctctttcacaaaagattgagtatgcttggggaaaaaaaatacacactataataggagaaaatgatgaagagaaactgaggtaaaggtaattggaaaacaaaataaagccaggggtatattaataccccaaaacttca

SEQ ID NO: 64900 - DNA, 384 bp, Homo sapiens
ataaacaaagagaactctaaagacaagcatttagcaacttcttgtggcttagggacaaactcaacccattctctacattcacagtttggggttcttaagaccacaataaaaagttgtaaggggaagaaataaattttggaaggctttatgctagtttttcctctggagcctgctactgtctgactgggctagtcctggaagaataactattttcaagcacctccaagaattcttctttactctaaggaaatattaattaaattactacagttgctacagccaccttgacccatgagcattcacacttgttcatttctttggcaacagctctcctggccagaccatttttcaatggtctggagctgatgctaggggttcctatgt

SEQ ID NO: 64901 - DNA, 411 bp, Homo sapiens
gtttgaaaagaaacattcacatagctgatgatgtggtaggtctcaggttctgtctcatgtgtgataaaccaaaccagccagtatttcaagaagcctagggctattggtaggttaacaccgtgaagatcttcagtgaattcagcttttaacataaagagccaccgcacggtgtttcaattacagaaagaacaactttttaaaaccagagaatgttttcagagctttgctaattcattgtattttatttttgaagtttaaaaacttaatgtgagagttaatccagttcaacaaggtggctctggaagtaccaagggtgaataatagccaagacgcttaggaaaaatagcacttgctctagcagctgtcaaggcctaactacttaatacaaagctaaagttagttaaccctgtt

SEQ ID NO: 64902 - DNA, 809 bp, Homo sapiens
atgcttagtagatgcattgcagaggggaatcaaacctaggcctggtaataacaatagtaaccaatctgtatttcccacttatgagcctgggggcattacctgtgttatctcactcaattccaagattgggtattattttattcccattttgcagatgaagaaacaggagtagagaagttaagtaagatcacacatttgaaccctggtagtcttggccccagaggctaaaaatcttaacaactatactgataacactcaatgcttcaaacatttgatatgtcaacaaacaaactagaaaacttgagcctgggaggttgaggctgccgtgagctgtgaccatgccactgtacttccgagcctaggtaacacagcaagaccctgcctccaaaaaaaaaaaaaaaaaaaaaaattagacgctatttgtaatgaaatttggtttcttgtatttttctgtctctgataaagctgggctgtaacgtgacacattgtcaatagatgccatttctaacaaataacaagtatcctgttttgagaatttgtttcaggctactaatgacttcaagaacatcagaataatacaatagaaagaatttggaatttggaatcaaaagactgattcttctgaaccagctctactacttgttggctttgtgacatttggtaaattactcaacctgcctgagcctcaatttcttaatttgtaaaaagaatgtcctcctagggttcccccctttttccttctttctttcatctcttcaatgagatagtgtgaaagtagtttgtaaatgattaaaggctatgtgacagta

SEQ ID NO: 64903 - DNA, 898 bp, Homo sapiens
tgccatcgatatttatttgtttgtttgtttgtttctaaatagagatggggtatcgccaggctttccaggctgttctccaactccaggactcaagtgattctcccacctcagcctcccaaaatactgggattataggtgtgagccattatgcctggtcccaaggtgccagttctatgccttccagccttggttctctgagaaccgaattaatgaaagatgcagggctctttcccagaggcccaagaaaagaaagatgcaactaggaaagaaggaaggcaaggaggtcattttcttttgacccatgttggacatttaagaaggggatctaggagggaaaattcaacagggggtgattctaactcatatcctttaaagaaacaattatttctccacccagttttttgagggcaggacatggagggtcaggcccagctggaggcgcaccaaagcccagagaaaattcagaaccacgtgaacttgttggatttcagccccttgaagcacatgttgctattgcagctgccttgataactggggggacaggaggagcacggctttcccatcttgtacggggactcgccaatccagttgcccctggaagagaaaaggacccagggagacagaggagcattaggctactaatgacttcaagaacatcagaataatacaatagaaagaatttggaatttggaatcaaaagactgattcttctgaaccagctctactacttgttggctttgtgacatttggtaaattactcaacctgcctgagcctcaatttcttaatttgtaaaaagaatgtcctcctagggttcccccctttttccttctttctttcatctcttcaatgagatagtgtgaaagtagtttgtaaatgattaaaggctatgtgacagta

SEQ ID NO: 64904 - DNA, 751 bp, Homo sapiens
tcttcctttcatctaacatatttattgagcacctactatgtaccaggccttgtgctagactctggggatatggaaatgagcaaagtagatgtacccccgaaacttgtggactaatggaggagacggaccttaatcagatcgtcattcaaagatactattacaaactgttctgagagccgaggaagcaggaaggagctgtgagagactgagctctaaccttggccatcaaagacaagctgtgcagctctggttttttgagggcaggacatggagggtcaggcccagctggaggcgcaccaaagcccagagaaaattcagaaccacgtgaacttgttggatttcagccccttgaagcacatgttgctattgcagctgccttgataactggggggacaggaggagcacggctttcccatcttgtacggggactcgccaatccagttgcccctggaagagaaaaggacccagggagacagaggagcattaggctactaatgacttcaagaacatcagaataatacaatagaaagaatttggaatttggaatcaaaagactgattcttctgaaccagctctactacttgttggctttgtgacatttggtaaattactcaacctgcctgagcctcaatttcttaatttgtaaaaagaatgtcctcctagggttcccccctttttccttctttctttcatctcttcaatgagatagtgtgaaagtagtttgtaaatgattaaaggctatgtgacagta

SEQ ID NO: 64905 - DNA, 754 bp, Homo sapiens
atgagagtaagattatatgggagaaaaagaatcagagatgcagagaccaaaacaaaaacaggcagagatagaacggacagtagacaaaagagagagagaccgaggcagagatagagaaaaaaaggcccagagagagtcccctcaggccaactttggttttcacttctcagttctgagagccgaggaagcaggaaggagctgtgagagactgagctctaaccttggccatcaaagacaagctgtgcagctctggttttttgagggcaggacatggagggtcaggcccagctggaggcgcaccaaagcccagagaaaattcagaaccacgtgaacttgttggatttcagccccttgaagcacatgttgctattgcagctgccttgataactggggggacaggaggagcacggctttcccatcttgtacggggactcgccaatccagttgcccctggaagagaaaaggacccagggagacagaggagcattaggctactaatgacttcaagaacatcagaataatacaatagaaagaatttggaatttggaatcaaaagactgattcttctgaaccagctctactacttgttggctttgtgacatttggtaaattactcaacctgcctgagcctcaatttcttaatttgtaaaaagaatgtcctcctagggttcccccctttttccttctttctttcatctcttcaatgagatagtgtgaaagtagtttgtaaatgattaaaggctatgtgacagta

SEQ ID NO: 64906 - DNA, 457 bp, Homo sapiens
tcatcctgactgggattttggccattctttctcttattttgggttttctgttatcctatggtttctttgcctagttcttgtttttatttgttgttcgaatttttccatcctcctgcaaccacccagtgctattcctatatcactgtgagtataaacaccctttaaccttataggcttcttgaagtataattcccaagaccatgttgcagtggtccttaaagaaccaataaggcagagagaaacaaacatgttccaaattttgttctcaggagtaaaccttactcaattgttaaaggctgtagctagctcaaaagaagtttccttgactctgaaaaacaaaacaaggatcagcaatgttccaagcaaaagtcaaaaagattatttcagtttttctattagttcagcctattctgttaactcttgttctgcttgatatttataaacattttagcttttc

SEQ ID NO: 64907 - DNA, 515 bp, Homo sapiens
tatatcacaacctaatacatatacacacacacacaaacaaagccaatatcaaaaaaagatacttttaccatgtgatatgtcattttctaaaggctcattatagccattaaattgacttctcaatacactaatgggtttcaatccccagtttgaaaaaaaaaatgcagttatctaggggcatagcatcagcaataaacaaggaaaagttggacacatccacatcttccatttaagatgaaaggtaatcaattagaaacatgactcagctcagactgggacagatacatgacaactatcatggcctggagcaggcatactgaaattgggacttcacaggtgaatttcagacagttgtgaagctcctaaaatattaaaggtatgtaaatttttcaaagtaatttattactcataaaattaaaacaaatgaacattaggtaagaagaaaacttacttaaatagtttagaataccaaaggaaccaaagtaaccagctatgttagcaccattaaaaaaaaa

SEQ ID NO: 64908 - DNA, 558 bp, Homo sapiens
cactgactccatcactggtgtctccatctggaatctgttttaagtaggagcatgtggattttcctattttagtgtcagttcaagttgctgtcacctgaccacccacccccagcccccgaccccagaccccactaccagattcagggcaggtacttttgtatgtgctctgttgaccttggatggaggtgataaggaccttatgacagtcatccatttggagacaggcttgtgtatcacttgagcttagtacaaaacacaatcaatcatgttccctagggggacttcttgagactcttggactaatgcggttgcctggtctgaaaacacttaagctgaagaaaaactgctgagactagatgcattctcaggaagtgaaagaaaattccagggggagtgccaaggtgaaagggaatgactaaagaccttcctgcttcctcatcaaaaggactgctctatgtcttcgaccgtcagcacacctgttttcctctctgctctggcttcagctcttctcacaggctttgaagatgttctcaagaatcacccacctttaaaatgaaa

SEQ ID NO: 64909 - DNA, 325 bp, Homo sapiens
agttggatttcagctactcagagtaattggaaaaggccacagcctggtgggcttcacagctttcagagacctggtaggggatggctaacaggttcttctgccaggagacaagtggcagacccaggtgtgaaacttttacaggtcccaccaagcctttcttatggagcacagagcataaggacaacttctgcagaaatggaatggggtacttggaaccaaaaatacatacacctcctttcccacctgcctccagcttagtagcccatagtcctctttgtccctcacactgagccaggcctgacttagatgatgaaatgcatggcct

SEQ ID NO: 64910 - DNA, 795 bp, Homo sapiens
tgcggaagtttcgttttttagctcgttgcaataaatcttgctgctgctaattcgttgggtctgtgctgcctttatgagcggtagcgctcaccgcaaaggtctgcagtttcacttctgaagtcagtgagactatgaacccaccagaagaaagaaacttagcgagactatgaacccaccagaaggaagaaactccggacacatctgaacatctgaaggaaaaaactgcggacacagcatctttaagaactgtaacagtcaccgcgagggtccgcggcttctttcttgaagtcagcgagacgaagaacccatcaattccggacacaccagtacctatgagtataatcttacttggaaataagagttttttgcagatgtaataaaattaaaatgaggtcatactggatgatggactgtaatccaataactattcttgtaagaagcgagaacattggacacagaaagaaggcggtcatgtgaagacagaagcagaaattggtttatgctgccacaaaccagggaatgctggggagtgcgaacaaccacagaaggcagaaaagacaagggaagatttcttcactggagaatttggagggagcatgatactgctgacaccttgaatcggcttgaatacattcaccagctgaaaaactagataagggggagaggtttaaattctccggaatcttcctgccttcaaggttcagccctgcgaaagataactaggaatttgtattttgggcgataacactttctctacttctaaaagacagaaactttttccacttttgtgagaaa

SEQ ID NO: 64911 - DNA, 498 bp, Homo sapiens
cttattacattcctcttgtggctggacacataggtcccattgcacaatatgactgttgaaaatgcttgtgaaatactgtttagtaaaattgcctaagatatttttcatatcagttcagtgaaaattattgtgaagtgtttatttacataatataatttatcattatctaattgttatatataataaataggactctactagaagagcatttttccaaaagctacagaaatgtcatttttgattatggtattaagcaaaatgttctctggttctttaattgtaataaaattattttttgtttttgtacacaattttaaaaagtttccttttccatatgttgcagtctacattctatgtttcatgcatttcttccctttgttactatagtgaaaagtttagggggcacataaatgaagctgttatttggagaaaaaaaatatgcatgagtatgcacataagatcacggcaggtataaactaggtttattgtaaatatgaa

SEQ ID NO: 64912 - DNA, 1862 bp, Homo sapiens
  misc_feature (371)..(371): n is a, c, g, or t
  misc_feature (522)..(522): n is a, c, g, or t
  misc_feature (525)..(525): n is a, c, g, or t
  misc_feature (533)..(533): n is a, c, g, or t
  misc_feature (710)..(710): n is a, c, g, or t
  misc_feature (1397)..(1397): n is a, c, g, or t
cacacacctccacacgcgcacatacacacacatgctgacaggtgtgcacatatgcgcacgtgcacacacaaatacgcacgcacagcacacacagacacataagtgtccataaacaacacagatctggcctcagagccaccctccaggtgcggctgccccgggccccaggtgcggctgcaccgtgctgtggtgacagccacagcaggatcagagcagcctcaaggcccttcaggagccggcagagctggccccaggctgagcttggggaggtgagcccaggcctgggaccgacgcttcctaattggcgggcagagtccatgcagcccctcccagtctacacggaagcccacgtgtccacctcctgcttctgntgtccccaggacagtgaaatttactaatgtggattaagaacatttttaaataaaaaaacattttacacattgaggacggaagagagaaattacggccaaccaaccccgtgcacttccccgcccaggttcatggagtctgagccctctggcntcntgagcctntgggctctgtcaccaggtgggcgccttccccagcccgtgaggctcgctgctcacgggggccccgatgcctgagtgatgtcatggatttaggtttcagtgctggcacatgtggcccgcagagctcagctcctctgtgagggacgtttcggctcctgtgggctttgctgtcccccatgntgactctgcctcacttggttgtcctcaggtcactctgtgcggtgtgcactgaccccagccagtggatgttccccgtccaagagcaaagctacagtcggctgcaggtgcagtgacttttgcacagtggaagaatttctccagaagatattcctgcaggtggaatcactggatcgtaggcccagatgtcttccacttacttgattttgcctgatgccttccaaggaggctgtgcacagcaggtgtgagatgccccatctcaccaaccggccaacatcccgatgggagatgttgagttttcaccacgctgctgagtgtgacgtggaatcttcttattttagcttgcatttccctgattacaagtcaggtggaacatctcgaatatgtttctgggccatttgattttcctgcaagtcacctgttccagttctttgcccatttcctgttgggttggtcaatattttttgtgattacacgttggatacgtggctggcctttggcttgcctttgacttcgtttgttctatcgaagcatgtgcagaattgttaaattttaatgtattcaaatgcattaatctcatttcttatttttgttgttttattttttgttttttgtttttttgagacagagtctcgctctgtctcccaggctggaatacagtgacacgatcttggctcactgcaacctctncctccccacttcaagcaatcctcctgcctcagcttcctgagaagctgggaccacaggcatgtgccatcatgtccggctaattttctttttaaaatgttgtagcaatggagcctgggctcaagccatcttcccacctcagcctgccaagtagctgggaccacagacatgtgccactgctgcgcccagctagcctttaatatttttaaatgctgtaagatctgcaggtttttttccaaccaagtttatagcttttcaccccacggatccccgaggccatgacaggcagtgacctccttggggcacccgcagagtcctcccccccatcttgggagggcttgtccagtttcagttttgtttgtttactaggctttgttttacagtcactagttaaatttactaagatttttcaacttcttgtctcaagggacttcattttaataaacaatatcttttctcttttctttc

SEQ ID NO: 64913 - DNA, 491 bp, Homo sapiens
tgagctcaatgctttggtgttgcccttttcagtcaagtacaattgtggctttaagatagcaggagaaattagacagagaataaaagaaaaaagaaaacaaaaaaaagaaaggaggaaaaggatgacatctcactcctgcctttgaagtggttacatatttaccagatgaattttgaaagaacaaattatgggtagtccaaaagccaaaggcaatgtgaggaaggacactccccagataagaacaaaaacagaaatctgtatgtgctatgtgttacacacagttgcgaataatcagatgtacacacatgatgcaaaggcacgccgctacacatttatgtgatattcagacatatgttcaaatagaggaggtgaatatctttttataaatacaatttagcaagtacaagaatgctgatcagctgcagctcaagaagaaagggggaaaaaatcttatggaaattattaatactccaagaacctctaagactcaa

SEQ ID NO: 64914 - DNA, 887 bp, Homo sapiens
  misc_feature (811)..(811): n is a, c, g, or t
ggattcctgtctcaggactcactgtcaacaacatcccatcctgaagacttgcttaccacaactgagagtggggagtcagtttgaggcctagcatcacttaaacttcctccaaaggcacaaaagccagaagagaaaaatgaagacgggacattttgaaatagtcaccatgctgctggcaaccatgattctagtggacattttccaggtgaaggctgaagtgttagacatggcagataatgcatttgatgatgaatacctgaaatgtacggacaggatggaaattaaatacgttccccaactgctaaaggaggaaaaagcaagccaccagcaattagatactgtgtgggaaaatgcaaaagccaaatgggcagcccgaaagactcaaatctttctccctatgaattttaaggataaccatggaatagccctgatggcatatatttccgaagctcaagagcaaactcccttttaccatctgttcagtgaagctgtgaagatggctggccaatctcgagaagattatatctatggcttccagttcaaagctttccacttttacctcacaagagccctgcagttgctgagaaaaccttgtgaggccagttccaaaactgtggtatatagaacaagccagggcacttcatttacatttggagggctaaaccaagccaggtttggccattttaccttggcatattcagccaaacctcaggctgctaatgaccagctcactgtgttatccatctacctgctgggtgcatggaatttggtagaaggaagatttatcctgagggttcaggccggggggganactttcagaaaaacgcgctggggtttgggcaccgagttgcaatcccttccggaaatagagggcgaccagggtccca

SEQ ID NO: 64915 - DNA, 1528 bp, Homo sapiens
ggattcctgtctcaggactcactgtcaacaacatcccatcctgaagacttgcttaccacaactgagagtggggagtcagtttgaggcctagcatcacttaaacttcctccaaaggcacaaaagccagaagagaaaaatgaagacgggacattttgaaatagtcaccatgctgctggcaaccatgattctagtggacattttccaggtgaaggctgaagtgttagacatggcagataatgcatttgatgatgaatacctgaaatgtacggacaggatggaaattaaatacgttccccaactgctaaaggaggaaaaagcaagccaccagcaattagatactgtgtgggaaaatgcaaaagccaaatgggcagcccgaaagactcaaatctttctccctatgaattttaaggataaccatggaatagccctgatggcatatatttccgaagctcaagagcaaactcccttttaccatctgttcagtgaagctgtgaagatggctggccaatctcgagaagattatatctatggcttccagttcaaagctttccacttttacctcacaagagccctgcagttgctgagaaaaccttgtgaggccagttccaaaactgtggtatatagaacaagccagggcacttcatttacatttggagggctaaaccaagccaggtttggccattttaccttggcatattcagccaaacctcaggctgctaatgaccagctcactgtgttatccatctacacatgccttggagttgacattgaaaattttcttgataaagaaagtgaaagaattactttaatacctctgaatgaggtttttcaagtgtcacaggagggggctggcaataaccttatccttcaaagcataaacaagacctgcagccattatgagtgtgcatttctaggtggactaaaaaccgaaaactgtattgagaacctagaatattttcaacccatctatgtctacaaccctggtgagaaaaaccagaagcttgaagaccatagtgagaaaaactggaagcttgaagaccatggtgagaaaaaccagaagcttgaagaccatggtgtgaaaatccttgaacccacccaaatacctgctccaggtccagttcctgttccaggtcccaaaagccatccttctgcatcctcgggcaaactgctgcttccacagtttgggatggtcatcattttaatcagtgtttctgctataaatctctttgttgctctgtagtttgatgcattgtttatctttcttattctttacttgaaataactatagggatccacaggagatcaaaaggaatgatgtattttttacgtgttggccaaagtcactggataaaatgagaattgtatatttgttattcattttgcaaattcagaaagttggtccagatatatgtcacagaacttttcacttgtatactactcttacaatggaaaaaaatcccgaaaactgtatacttctgattaaattcaataaaagattttgattagatatttaaaaaaaaccagtatg

SEQ ID NO: 64916 - DNA, 1640 bp, Homo sapiens
ttcagtgaggaggttatacccggaggtctcgacgctcgctcgtgctgctcgtgttgccgctgggtacgtttgctgccagtgctgatccagccggaggcgaagagaagcactttgggggcaaaagaatcttctgatggcatgctaacaattgtagatggcaactgtgttggaaactaggggatcccatctgagttggtcaaagtctgccaaaaagaaaaaagaaaaccaatatttaagagaagagaaaaatgaagacgggacattttgaaatagtcaccatgctgctggcaaccatgattctagtggacattttccaggtgaaggctgaagtgttagacatggcagataatgcatttgatgatgaatacctgaaatgtacggacaggatggaaattaaatacgttccccaactgctaaaggaggaaaaagcaagccaccagcaattagatactgtgtgggaaaatgcaaaagccaaatgggcagcccgaaagactcaaatctttctccctatgaattttaaggataaccatggaatagccctgatggcatatatttccgaagctcaagagcaaactcccttttaccatctgttcagtgaagctgtgaagatggctggccaatctcgagaagattatatctatggcttccagttcaaagctttccacttttacctcacaagagccctgcagttgctgagaaaaccttgtgaggccagttccaaaactgtggtatatagaacaagccagggcacttcatttacatttggagggctaaaccaagccaggtttggccattttaccttggcatattcagccaaacctcaggctgctaatgaccagctcactgtgttatccatctacacatgccttggagttgacattgaaaattttcttgataaagaaagtgaaagaattactttaatacctctgaatgaggtttttcaagtgtcacaggagggggctggcaataaccttatccttcaaagcataaacaagacctgcagccattatgagtgtgcatttctaggtggactaaaaaccgaaaactgtattgagaacctagaatattttcaacccatctatgtctacaaccctggtgagaaaaaccagaagcttgaagaccatagtgagaaaaactggaagcttgaagaccatggtgagaaaaaccagaagcttgaagaccatggtgtgaaaatccttgaacccacccaaatacctgctccaggtccagttcctgttccaggtcccaaaagccatccttctgcatcctcgggcaaactgctgcttccacagtttgggatggtcatcattttaatcagtgtttctgctataaatctctttgttgctctgtagtttgatgcattgtttatctttcttattctttacttgaaataactatagggatccacaggagatcaaaaggaatgatgtattttttacgtgttggccaaagtcactggataaaatgagaattgtatatttgttattcattttgcaaattcagaaagttggtccagatatatgtcacagaacttttcacttgtatactactcttacaatggaaaaaaatcccgaaaactgtatacttctgattaaattcaataaaagattttgattagatatttaaaaaaaaccagtatg

SEQ ID NO: 64917 - DNA, 1527 bp, Homo sapiens
ggattcctgtctcaggactcactgtcaacaacatcccatcctgaagacttgcttaccacaactgagagtggggagtcagtttgaggcctagcatcacttaaacttcctccaaaggcacaaaagccagaagagaaaaatgaagacgggacattttgaaatagtcaccatgctgctggcaaccatgattctagtggacattttccaggtgaaggctgaagtgttagacatggcagataatgcatttgatgatgaatacctgaaatgtacggacaggatggaaattaaatacgttccccaactgctaaaggaggaaaaagcaagccaccagcaattagatactgtgtgggaaaatgcaaaagccaaatgggcagcccgaaagactcaaatctttctccctatgaattttaaggataaccatggaatagccctgatggcatatatttccgaagctcaagagcaaactcccttttaccatctgttcagtgaagctgtgaagatggctggccaatctcgagaagattatatctatggcttccagttcaaagctttccacttttacctcacaagagccctgcagttgctgagaaaaccttgtgaggccagttccaaaactgtggtatatagaacaagccagggcacttcatttacatttggagggctaaaccaagccaggtttggccattttaccttggcatattcagccaaacctcaggctgctaatgaccagctcactgtgttatccatctacacatgccttggagttgacattgaaaattttcttgataaagaaagtgaaagaattactttaatacctctgaatgaggtttttcaagtgtcacaggagggggctggcaataaccttatccttcaaagcataaacaagacctgcagccattatgagtgtgcatttctaggtgactaaaaaccgaaaactgtattgagaacctagaatattttcaacccatctatgtctacaaccctggtgagaaaaaccagaagcttgaagaccatagtgagaaaaactggaagcttgaagaccatggtgagaaaaaccagaagcttgaagaccatggtgtgaaaatccttgaacccacccaaatacctgctccaggtccagttcctgttccaggtcccaaaagccatccttctgcatcctcgggcaaactgctgcttccacagtttgggatggtcatcattttaatcagtgtttctgctataaatctctttgttgctctgtagtttgatgcattgtttatctttcttattctttacttgaaataactatagggatccacaggagatcaaaaggaatgatgtattttttacgtgttggccaaagtcactggataaaatgagaattgtatatttgttattcattttgcaaattcagaaagttggtccagatatatgtcacagaacttttcacttgtatactactcttacaatggaaaaaaatcccgaaaactgtatacttctgattaaattcaataaaagattttgattagatatttaaaaaaaaccagtatg

SEQ ID NO: 64918 - DNA, 1525 bp, Homo sapiens
ttcagtgaggaggttatacccggaggtctcgacgctcgctcgtgctgctcgtgttgccgctgggtacgtttgctgccagtgctgatccagccggaggcgaagagaagcactttgggggcaaaagaagagaaaaatgaagacgggacattttgaaatagtcaccatgctgctggcaaccatgattctagtggacattttccaggtgaaggctgaagtgttagacatggcagataatgcatttgatgatgaatacctgaaatgtacggacaggatggaaattaaatacgttccccaactgctaaaggaggaaaaagcaagccaccagcaattagatactgtgtgggaaaatgcaaaagccaaatgggcagcccgaaagactcaaatctttctccctatgaattttaaggataaccatggaatagccctgatggcatatatttccgaagctcaagagcaaactcccttttaccatctgttcagtgaagctgtgaagatggctggccaatctcgagaagattatatctatggcttccagttcaaagctttccacttttacctcacaagagccctgcagttgctgagaaaaccttgtgaggccagttccaaaactgtggtatatagaacaagccagggcacttcatttacatttggagggctaaaccaagccaggtttggccattttaccttggcatattcagccaaacctcaggctgctaatgaccagctcactgtgttatccatctacacatgccttggagttgacattgaaaattttcttgataaagaaagtgaaagaattactttaatacctctgaatgaggtttttcaagtgtcacaggagggggctggcaataaccttatccttcaaagcataaacaagacctgcagccattatgagtgtgcatttctaggtggactaaaaaccgaaaactgtattgagaacctagaatattttcaacccatctatgtctacaaccctggtgagaaaaaccagaagcttgaagaccatagtgagaaaaactggaagcttgaagaccatggtgagaaaaaccagaagcttgaagaccatggtgtgaaaatccttgaacccacccaaatacctgctccaggtccagttcctgttccaggtcccaaaagccatccttctgcatcctcgggcaaactgctgcttccacagtttgggatggtcatcattttaatcagtgtttctgctataaatctctttgttgctctgtagtttgatgcattgtttatctttcttattctttacttgaaataactatagggatccacaggagatcaaaaggaatgatgtattttttacgtgttggccaaagtcactggataaaatgagaattgtatatttgttattcattttgcaaattcagaaagttggtccagatatatgtcacagaacttttcacttgtatactactcttacaatggaaaaaaatcccgaaaactgtatacttctgattaaattcaataaaagattttgattagatatttaaaaaaaaccagtatg

SEQ ID NO: 64919 - DNA, 720 bp, Homo sapiens
ggattcctgtctcaggactcactgtcaacaacatcccatcctgaagacttgcttaccacaactgagagtggggagtcagtttgaggcctagcatcacttaaacttcctccaaaggcacaaaagccagaagagaaaaatgaagacgggacattttgaaatagtcaccatgctgctggcaaccatgattctagtggacattttccaggtgagaaaaactggaagcttgaagaccatggtgagaaaaaccagaagcttgaagaccatggtgtgaaaatccttgaacccacccaaatacctgctccaggtccagttcctgttccaggtcccaaaagccatccttctgcatcctcgggcaaactgctgcttccacagtttgggatggtcatcattttaatcagtgtttctgctataaatctctttgttgctctgtagtttgatgcattgtttatctttcttattctttacttgaaataactatagggatccacaggagatcaaaaggaatgatgtattttttacgtgttggccaaagtcactggataaaatgagaattgtatatttgttattcattttgcaaattcagaaagttggtccagatatatgtcacagaacttttcacttgtatactactcttacaatggaaaaaaatcccgaaaactgtatacttctgattaaattcaataaaagattttgattagatatttaaaaaaaaccagtatg

SEQ ID NO: 64920 - DNA, 1000 bp, Homo sapiens
cacaaccccatcataagtcgagaagcatctgtatagcatagtaattcagagcaaatttgaaattagatatttctagcaccagttacccccgtgattttatgcatggcattcctcaaaacatttcataaatgttttaaggaatatctgtgaaatatggataattatacctggctaataagactaagaagtaaaggtgacagtgtacataaagcatttgcacaatgcatggcacatagtgaacactcaatagtaggtattaatgtacttgggaatctaagttcaatatgtagaaaatactttttgtgaataaaattttaacttttatttttatgtaaacacatattgatgggaaaaaaaattcaaagagcacagatgagaacaaattaaacccttcccctaaccccacacatacccgtaaacctattaccctgcccctcagacccactcacagagataaccaagtttgcttaatttttaatcagatctttcttttctggataaacagatatacaatataactaactcaaaatctctttatattttagaagataaaagtcaaggaaatatcaacaatcctactccaggtccagttcctgttccaggtcccaaaagccatccttctgcatcctcgggcaaactgctgcttccacagtttgggatggtcatcattttaatcagtgtttctgctataaatctctttgttgctctgtagtttgatgcattgtttatctttcttattctttacttgaaataactatagggatccacaggagatcaaaaggaatgatgtattttttacgtgttggccaaagtcactggataaaatgagaattgtatatttgttattcattttgcaaattcagaaagttggtccagatatatgtcacagaacttttcacttgtatactactcttacaatggaaaaaaatcccgaaaactgtatacttctgattaaattcaataaaagattttgattagatatttaaaaaaaaccagtatg

SEQ ID NO: 64921 - DNA, 539 bp, Homo sapiens
cctggaagcttgaagaccatggtgagaaaaaccagaagcttgaagaccatggaatgaaaattccagaaccttttccactacctgaagataaaagtcaaggaaatatcaacaatcctactccaggtccagttcctgttccaggtcccaaaagccatccttctgcatcctcgggcaaactgctgcttccacagtttgggatggtcatcattttaatcagtgtttctgctataaatctctttgttgctctgtagtttgatgcattgtttatctttcttattctttacttgaaataactatagggatccacaggagatcaaaaggaatgatgtattttttacgtgttggccaaagtcactggataaaatgagaattgtatatttgttattcattttgcaaattcagaaagttggtccagatatatgtcacagaacttttcacttgtatactactcttacaatggaaaaaaatcccgaaaactgtatacttctgattaaattcaataaaagattttgattagatatttaaaaaaaaccagtatg

SEQ ID NO: 64922 - DNA, 510 bp, Homo sapiens
tagtaactgccaattcttttgttccttcgttaaaactgatgagcttctttttgtgactcaggtgagaaaaactggaagcttgaagaccatggtaagacattttttataaattctgggggcttacattttacaagatacctccctttacaggtgggaatattttcatatttactgaaaataattttgctgtagctatagtaactgccaattcttttgttccattgttaaaactgataagcttctttttgtaactcaggtgagaaaaaccagaagcttgaagaccatggtaagacatttatgtaaattctgggggcttacattttgcaatatatctccctttacatgtgggaacagggaagaatgtcgtggtaagaaaagtgggaggaaggcagagctcaccttagcttactggtttggtatattagagactctcctgggtttcaggtagaattctttagaaaaatgacatagcagctctgtttctcctgtctaacaatctttaggtcatcc

SEQ ID NO: 64923 - DNA, 1593 bp, Homo sapiens
ggattcctgtctcaggactcactgtcaacaacatcccatcctgaagacttgcttaccacaactgagagtggggagtcagtttgaggcctagcatcacttaaacttcctccaaaggcacaaaagccagaagagaaaaatgaagacgggacattttgaaatagtcaccatgctgctggcaaccatgattctagtggacattttccaggtgaaggctgaagtgttagacatggcagataatgcatttgatgatgaatacctgaaatgtacggacaggatggaaattaaatacgttccccaactgctaaaggaggaaaaagcaagccaccagcaattagatactgtgtgggaaaatgcaaaagccaaatgggcagcccgaaagactcaaatctttctccctatgaattttaaggataaccatggaatagccctgatggcatatatttccgaagctcaagagcaaactcccttttaccatctgttcagtgaagctgtgaagatggctggccaatctcgagaagattatatctatggcttccagttcaaagctttccacttttacctcacaagagccctgcagttgctgagaaaaccttgtgaggccagttccaaaactgtggtatatagaacaagccagggcacttcatttacatttggagggctaaaccaagccaggtttggccattttaccttggcatattcagccaaacctcaggctgctaatgaccagctcactgtgttatccatctacacatgccttggagttgacattgaaaattttcttgataaagaaagtgaaagaattactttaatacctctgaatgaggtttttcaagtgtcacaggagggggctggcaataaccttatccttcaaagcataaacaagacctgcagccattatgagtgtgcatttctaggtgactaaaaaccgaaaactgtattgagaacctagaatattttcaacccatctatgtctacaaccctggtgagaaaaaccagaagcttgaagaccatagtgagaaaaactggaagcttgaagaccatggtgagaaaaaccagaagcttgaagaccatggtgtgaaaatccttgaacccacccaaatacctggaatgaaaattccagaaccttttccactacctgaagataaaagtcaaggaaatatcaacaatcctactccaggtccagttcctgttccaggtcccaaaagccatccttctgcatcctcgggcaaactgctgcttccacagtttgggatggtcatcattttaatcagtgtttctgctataaatctctttgttgctctgtagtttgatgcattgtttatctttcttattctttacttgaaataactatagggatccacaggagatcaaaaggaatgatgtattttttacgtgttggccaaagtcactggataaaatgagaattgtatatttgttattcattttgcaaattcagaaagttggtccagatatatgtcacagaacttttcacttgtatactactcttacaatggaaaaaaatcccgaaaactgtatacttctgattaaattcaataaaagattttgattagatatttaaaaaaaaccagtatg

SEQ ID NO: 64924 - DNA, 1553 bp, Homo sapiens
tcatcgctgtctggaacagcgatgactcgagagcgggtgctgctcgtgttgccgctgggtacgtttgctgccagtgctgatccagccggaggcgaagagaagcactttgggggcaaaagccaaaaagaaaaaagaaaaccaatatttaagagaagagaaaaatgaagacgggacattttgaaatagtcaccatgctgctggcaaccatgattctagtggacattttccaggtgaaggctgaagtgttagacatggcagataatgcatttgatgatgaatacctgaaatgtacggacaggatggaaattaaatacgttccccaactgctaaaggaggaaaaagcaagccaccagcaattagatactgtgtgggaaaatgcaaaagccaaatgggcagcccgaaagactcaaatctttctccctatgaattttaaggataaccatggaatagccctgatggcatatatttccgaagctcaagagcaaactcccttttaccatctgttcagtgaagctgtgaagatggctggccaatctcgagaagattatatctatggcttccagttcaaagctttccacttttacctcacaagagccctgcagttgctgagaaaaccttgtgaggccagttccaaaactgtggtatatagaacaagccagggcacttcatttacatttggagggctaaaccaagccaggtttggccattttaccttggcatattcagccaaacctcaggctgctaatgaccagctcactgtgttatccatctacacatgccttggagttgacattgaaaattttcttgataaagaaagtgaaagaattactttaatacctctgaatgaggtttttcaagtgtcacaggagggggctggcaataaccttatccttcaaagcataaacaagacctgcagccattatgagtgtgcatttctaggtggactaaaaaccgaaaactgtattgagaacctagaatattttcaacccatctatgtctacaaccctggtgagaaaaaccagaagcttgaagaccatagtgagaaaaactggaagcttgaagaccatggtgagaaaaaccagaagcttgaagaccatggtgtgaaaatccttgaacccacccaaatacctgctccaggtccagttcctgttccaggtcccaaaagccatccttctgcatcctcgggcaaactgctgcttccacagtttgggatggtcatcattttaatcagtgtttctgctataaatctctttgttgctctgtagtttgatgcattgtttatctttcttattctttacttgaaataactatagggatccacaggagatcaaaaggaatgatgtattttttacgtgttggccaaagtcactggataaaatgagaattgtatatttgttattcattttgcaaattcagaaagttggtccagatatatgtcacagaacttttcacttgtatactactcttacaatggaaaaaaatcccgaaaactgtatacttctgattaaattcaataaaagattttgattagatatttaaaaaaaaccagtatg

SEQ ID NO: 64925 - DNA, 1520 bp, Homo sapiens
tcatcgctgtctggaacagcgatgactcgagagcgggtgctgctcgtgttgccgctgggtacgtttgctgccagtgctgatccagccggaggcgaagagaagcactttgggggcaaaagaagagaaaaatgaagacgggacattttgaaatagtcaccatgctgctggcaaccatgattctagtggacattttccaggtgaaggctgaagtgttagacatggcagataatgcatttgatgatgaatacctgaaatgtacggacaggatggaaattaaatacgttccccaactgctaaaggaggaaaaagcaagccaccagcaattagatactgtgtgggaaaatgcaaaagccaaatgggcagcccgaaagactcaaatctttctccctatgaattttaaggataaccatggaatagccctgatggcatatatttccgaagctcaagagcaaactcccttttaccatctgttcagtgaagctgtgaagatggctggccaatctcgagaagattatatctatggcttccagttcaaagctttccacttttacctcacaagagccctgcagttgctgagaaaaccttgtgaggccagttccaaaactgtggtatatagaacaagccagggcacttcatttacatttggagggctaaaccaagccaggtttggccattttaccttggcatattcagccaaacctcaggctgctaatgaccagctcactgtgttatccatctacacatgccttggagttgacattgaaaattttcttgataaagaaagtgaaagaattactttaatacctctgaatgaggtttttcaagtgtcacaggagggggctggcaataaccttatccttcaaagcataaacaagacctgcagccattatgagtgtgcatttctaggtggactaaaaaccgaaaactgtattgagaacctagaatattttcaacccatctatgtctacaaccctggtgagaaaaaccagaagcttgaagaccatagtgagaaaaactggaagcttgaagaccatggtgagaaaaaccagaagcttgaagaccatggtgtgaaaatccttgaacccacccaaatacctgctccaggtccagttcctgttccaggtcccaaaagccatccttctgcatcctcgggcaaactgctgcttccacagtttgggatggtcatcattttaatcagtgtttctgctataaatctctttgttgctctgtagtttgatgcattgtttatctttcttattctttacttgaaataactatagggatccacaggagatcaaaaggaatgatgtattttttacgtgttggccaaagtcactggataaaatgagaattgtatatttgttattcattttgcaaattcagaaagttggtccagatatatgtcacagaacttttcacttgtatactactcttacaatggaaaaaaatcccgaaaactgtatacttctgattaaattcaataaaagattttgattagatatttaaaaaaaaccagtatg

SEQ ID NO: 64926 - DNA, 1026 bp, Homo sapiens
tccatcagtcactatatgttaacgatctctgcctcctgcataacacgtcttggaagctcttctttgtctttctttcatcttgtctcctggggctcatttagagagtttgaggtaatacgggataccatatttggctctctgtctcccattaaattcattgtgtcaagagacgggaaatttctaacctgagtcctctatatgattatacacaaaaaggacacctagtttctgggcatggaccccaatatcgattattaaaaactcatttcttacagaacaggattttcaaactctttattcaaactttacatgactttcctcaaattggtccagtctattatgtagcaaaggggatgaggaggtagagcatgacccatgagtgcccttctacatgtcccacttgattcagtcatgacttgtttcatctctcccagcagcgatagtactaatgagtacatggacatgaaacctggagtttcttatgttgtcccaaccaaggccgacaaaaggagatctgtgagaataggctcatacatagaaagagatgtgactcccgccatcatggaggatgacgagttggccctagacttagaagacttgctgagcttttcttaccaggtggcaaagggcatggctttcctcgcctccaagaattgtattcacagagacttggcagccagaaatatcctccttactcatggtcggatcacaaagatttgtgattttggtctagccagagacatcaagaatgattctaattatgtggttaaaggaaacgctcgactacctgtgaagtggatggcacctgaaagcattttcaactgtgtatacacgtttgaaagtgacgtctggtcctatgggatttttctttgggagctgttctctttaggaagcagcccctatcctggaatgccggtcgattctaagttctacaagatgatcaaggaaggcttccggatgctcagccctgaacacgcacctgctgaaatgtatgacataatgaagacttgctgggatgcagatccc

SEQ ID NO: 64927 - DNA, 866 bp, Homo sapiens
gggccagtgaagctgaattcttgtttgacgttacttctagccctaaaaactgggctcaaagatctggtggccctggtaaggacatgaatatggtgaaactacttggagcctgcaccattggagggcccaccctggtcattacagaatattgttgctatggtgatcttttgaattttttgagaagaaaacgtgattcatttatttgttcaaagcaggaagatcatgcagaagctgcactttataagaatcttctgcattcaaaggagtcttcctgcagcgatagtactaatgagtacatggacatgaaacctggagtttcttatgttgtcccaaccaaggccgacaaaaggagatctgtgagaataggctcatacatagaaagagatgtgactcccgccatcatggaggatgacgagttggccctagacttagaagacttgctgagcttttcttaccaggtggcaaagggcatggctttcctcgcctccaagaattgtattcacagagacttggcagccagaaatatcctccttactcatggtcggatcacaaagatttgtgattttggtctagccagagacatcaagaatgattctaattatgtggttaaaggaaacgctcgactacctgtgaagtggatggcacctgaaagcattttcaactgtgtatacacgtttgaaagtgacgtctggtcctatgggatttttctttgggagctgttctctttaggaagcagcccctatcctggaatgccggtcgattctaagttctacaagatgatcaaggaaggcttccggatgctcagccctgaacacgcacctgctgaaatgtatgacataatgaagacttgctgggatgcagatccc

SEQ ID NO: 64928 - DNA, 367 bp, Homo sapiens
ataaataaataaaatatgaggacccaatttttttcccttgataagtgtgactttagctaattgatttcattcgatatatacctgtagcaatggtttccaaacctctctgatcataaaccacaataagaaatacattttacatggtgacttaacacacacacacacacacacacacacacacacacgcacacaggcacacacacacagagttatgtttttaaaaactgaaacagaagctaacaaaacgacaattgcactttccaaggatgcaatagttttcaattttatttgatttaaaaacaagtgctagctgagtgatgcgtgcttgtagtatgagctacttgggaggctaagatgggaggatcac

SEQ ID NO: 64929 - DNA, 2372 bp, Homo sapiens
  misc_feature (1)..(1): n is a, c, g, or t
  misc_feature (5)..(5): n is a, c, g, or t
  misc_feature (10)..(10): n is a, c, g, or t
  misc_feature (13)..(14): n is a, c, g, or t
  misc_feature (16)..(16): n is a, c, g, or t
  misc_feature (19)..(20): n is a, c, g, or t
  misc_feature (22)..(23): n is a, c, g, or t
  misc_feature (26)..(26): n is a, c, g, or t
  misc_feature (28)..(28): n is a, c, g, or t
  misc_feature (34)..(34): n is a, c, g, or t
  misc_feature (37)..(37): n is a, c, g, or t
  misc_feature (55)..(55): n is a, c, g, or t
  misc_feature (68)..(68): n is a, c, g, or t
nttcngggcngcnncncgnngnnggngngggcgnctngggctcggggggcgcggncccccaacccganccggcgggcccggggggcgtcccggcgctggcggccgccgtcctgggcgcctgcgagccccgctgcgccgcgccctgtcccctgcccgcgctcagccgctgtcggggcgcggggtcgcgggggtcgcggggcgggcggggggcggcggggtccggggacgccgccgccgccgccgagtggatccggaagggcagcttcatccacaaacccgcgcacggctggctacaccccgacgccagggtcctggggcccggggtctcctacgtcgtgcggtacatgggctgcatcgaggttctccgctctatgcgctccctggactttaacacgcgcacgcaggtgaccagggaagccatcaaccggctccatgaggccgtgcctggcgtccggggatcctggaagaaaaaggcccccaacaaggccctggcgtccgtcctgggcaagagcaaccttcgctttgccggcatgagcatctccatccacatctccactgatggcctcagcctctccgtgcctgccacgcgccaggtcatcgccaaccaccacatgccgtccatctccttcgcgtcaggcggagacacggacatgacggattacgtggcctacgtcgccaaggaccccatcaaccagagagcctgccacatcctggagtgctgtgagggcctggcacagagcatcatcagcaccgtgggccaagctttcgagctgcgcttcaagcagtacctgcacagcccgcccaaggtggcgctgcccccagaaaggctggcagggccggaggagtcggcctggggggacgaggaggactctttggagcacaattactacaacagcatcccggggaaggagccgccgctgggcgggctagtggactccaggctggccctgacacagccctgcgccctcacggccctcgaccagggcccatctccttctctaagagatgcctgcagcctgccatgggacgtggggtccaccggtacagctccaccgggggacggctacgtgcaggcggacgcccggggccccccggaccacgaggagcacctgtatgtcaacacccagggtctggacgcccccgagccggaggacagccccaaaaaggatctgtttgacatgcgaccctttgaggatgccctgaagttgcatgagtgctcagtggcggcaggcgtgacagcagcccctcttcccttggaggaccagtggcccagcccccctacccgccgggcccctgtggcccccacggaggaacagctgcgtcaggagccctggtaccacggccggatgagccgccgggcggcagagaggatgcttcgagctgacggggacttccttgtgcgagacagcgtcaccaaccccgggcagtatgtcctcaccggcatgcacgccgggcagcccaagcacctgctgctcgtggaccccgagggcgtggtacggacgaaggacgtgctgtttgagagcatcagccacctgatcgaccaccacctgcagaacgggcagcccatcgtggccgccgagagtgagctgcacctgcgtggcgtggtctcacgggagccctgagccaggtgaccgttctcagccctggctcctgcctgttctcagccccggctcctgcctgtcatggccttggggctctcagccctcctcctggatcctggtcaggccgaaccaccgctgcctctccttcctccgcatgagcctctggcatggtccttcctccagctggccccgggctgggcagagcctcctcctgccggggcccctgcccaccccctcctttgcctggagtgagggtgttcataccaaagacggaaccatttcgcctttaaagaaaatatatccagaagcagccgctgcctcggagccctggcccgtgggtccccctctcgcctggctggttcggtctaacgccccggagagtcagggctcccaggaccctggggaggaggcggattccgggcctggctgggcttcctcttcccacctgaggactgggtgcacagttgtctttgaggggggacgcttaaggtgctttggggttctcaggccaggatacatgctggcgctgaagtgcaggcagccttgaggtcacctgggatctcggggtagccaggctgctccaagacagtggatatcgaggcagtcgtgaggcccctactccacctgggagcaggggaaggacgtggttgcctggcctgggctgcgcccagcagcttccccccaatcctgccctcccagctgtcgacccagatgggatgttcggatcggtttgtaattaaacctgggaatggccacaagaaaaaaaaaaaa

SEQ ID NO: 64930 - DNA, 379 bp, Homo sapiens
ggtggcttctgcgaagtgtgcaagaagctggtgggttatttggatcgcaacctggactttaacacgcgcacgcaggtgggaagccatcaaccggctccatgaggccgtgcctggcgtccggggatcctggaagaaaaaggcccccaacaaggccctggcgtccgtcctgggcaagagcaaccttcgctttgccggcatgagcatctccatccacatctccactgatggcctcagcctctccgtgcctgccacgcgccaggtcatcgccaaccaccacatgccgtccatctccttcgcgtcaggcggagacacggtgaggccagggatgggggtggacctgcagccctgccgcccccctccggccgcgagaccctctcat

SEQ ID NO: 64931 - DNA, 1758 bp, Homo sapiens
atgctgctttctgcctggggacacgcccacccctgtttgacaatgaggggactgacactcagaggagagccttagagtggcctgtcggatgttggcattgttggaagccgttagaaaacccagggcagaacattttaacgctaggggcaagagaggggtgccggctgtcgtcttgagtatttagggcacattggaggccccgcggccaatgcagtaagaccagacaaggaaacgagaggcgtacgctttgggaaggaagcccacctgacaaggcaggaaaaagaaataggagttaacctctgaaagaaagagctgctgttaccctttgtacatgcttagtacgtgcctagaaaacccaacctggggagtccaggttgctacacatgtgagcccaccgcacgcacggggctgggcagagtgcgagtctgatacactgtgggtgctcggtcagcgcaggccgacgggtgcatgagggactccctggggaacccgtttctcccagctctggtcccggcaggagtagctgcttgccccctgcctgcccagcactcctgtccctggcctgcaggaccctttgaggatgccctgaagttgcatgagtgctcagtggcggcaggcgtgacagcagcccctcttcccttggaggaccagtggcccagcccccctacccgccgggcccctgtggcccccacggaggaacagctgcgtcaggagccctggtaccacggccggatgagccgccgggcggcagagaggatgcttcgagctgacggggacttccttgtgcgagacagcgtcaccaaccccgggcagtatgtcctcaccggcatgcacgccgggcagcccaagcacctgctgctcgtggaccccgagggcgtggtacggacgaaggacgtgctgtttgagagcatcagccacctgatcgaccaccacctgcagaacgggcagcccatcgtggccgccgagagtgagctgcacctgcgtggcgtggtctcacgggagccctgagccaggtgaccgttctcagccctggctcctgcctgttctcagccccggctcctgcctgtcatggccttggggctctcagccctcctcctggatcctggtcaggccgaaccaccgctgcctctccttcctccgcatgagcctctggcatggtccttcctccagctggccccgggctgggcagagcctcctcctgccggggcccctgcccaccccctcctttgcctggagtgagggtgttcataccaaagacggaaccatttcgcctttaaagaaaatatatccagaagcagccgctgcctcggagccctggcccgtgggtccccctctcgcctggctggttcggtctaacgccccggagagtcagggctcccaggaccctggggaggaggcggattccgggcctggctgggcttcctcttcccacctgaggactgggtgcacagttgtctttgaggggggacgcttaaggtgctttggggttctcaggccaggatacatgctggcgctgaagtgcaggcagccttgaggtcacctgggatctcggggtagccaggctgctccaagacagtggatatcgaggcagtcgtgaggcccctactccacctgggagcaggggaaggacgtggttgcctggcctgggctgcgcccagcagcttccccccaatcctgccctcccagctgtcgacccagatgggatgttcggatcggtttgtaattaaacctgggaatggccacaagaaaaaaaaaaaa

SEQ ID NO: 64932 - DNA, 991 bp, Homo sapiens
  misc_feature (1)..(1): n is a, c, g, or t
  misc_feature (5)..(5): n is a, c, g, or t
  misc_feature (10)..(10): n is a, c, g, or t
  misc_feature (13)..(14): n is a, c, g, or t
  misc_feature (16)..(16): n is a, c, g, or t
  misc_feature (19)..(20): n is a, c, g, or t
  misc_feature (22)..(23): n is a, c, g, or t
  misc_feature (26)..(26): n is a, c, g, or t
  misc_feature (28)..(28): n is a, c, g, or t
  misc_feature (34)..(34): n is a, c, g, or t
  misc_feature (37)..(37): n is a, c, g, or t
  misc_feature (55)..(55): n is a, c, g, or t
  misc_feature (68)..(68): n is a, c, g, or t
nttcngggcngcnncncgnngnnggngngggcgnctngggctcggggggcgcggncccccaacccganccggcgggcccggggggcgtcccggcgctggcggccgccgtcctgggcgcctgcgagccccgctgcgccgcgccctgtcccctgcccgcgctcagccgctgtcggggcgcggggtcgcgggggtcgcggggcgggcggggggcggcggggtccggggacgccgccgccgccgccgagtggatccggaagggcagcttcatccacaaacccgcgcacggctggctacaccccgacgccagggtcctggggcccggggtctcctacgtcgtgcggtacatgggctgcatcgaggttctccgctctatgcgctccctggactttaacacgcgcacgcaggtgaccagggaagccatcaaccggctccatgaggccgtgcctggcgtccggggatcctggaagaaaaaggcccccaacaaggccctggcgtccgtcctgggcaagagcaaccttcgctttgccggcatgagcatctccatccacatctccactgatggcctcagcctctccgtgcctgccacgcgccaggtcatcgccaaccaccacatgccgtccatctccttcgcgtcaggcggagacacggacatgacggattacgtggcctacgtcgccaaggaccccatcaaccagagagcctgccacatcctggagtgctgtgagggcctggcacagagcatcatcagcaccgtgggccaagctttcgagctgcgcttcaagcagtacctgcacagcccgcccaaggtggcgctgcccccagaaaggctggcagggccggaggagtcggcctggggggacgaggaggactctttggagcacaattactacaacacttccccccaatcctgccctcccagctgtcgacccagatgggatgttcggatcggtttgtaattaaacctgggaatggccacaagaaaaaaaaaaaa

SEQ ID NO: 64933 - DNA, 477 bp, Homo sapiens
accctgtgcccacatccactgccccatctctctgcattgctggggtgggcagctgggaatcccggtggggggcccaggcaggtccagctggcccctccccgcccccaggacatgacggattacgtggcctacgtcgccaaggaccccatcaaccagagagcctgccacatcctggagtgctgtgagggcctggcacagagcatcatcagcaccgtgggccaagctttcgagctgcgcttcaagcagtacctgcacagcccgcccaaggtggcgctgcccccagaaaggattggggaggactaagcaagctgactccccggtgtgcctgaggctgtcagccctgctgctacaaccaatatccctcctccagacgcgcggccggctcccgcaatgggcagaaaacggcctccgtctcaccgcagaacatgtgtaaagggggggacgtgtctgtgtgctggtaacacgttttttatagac

SEQ ID NO: 64934 - DNA, 2631 bp, Homo sapiens
  misc_feature (1)..(1): n is a, c, g, or t
  misc_feature (5)..(5): n is a, c, g, or t
  misc_feature (10)..(10): n is a, c, g, or t
  misc_feature (13)..(14): n is a, c, g, or t
  misc_feature (16)..(16): n is a, c, g, or t
  misc_feature (19)..(20): n is a, c, g, or t
  misc_feature (22)..(23): n is a, c, g, or t
  misc_feature (26)..(26): n is a, c, g, or t
  misc_feature (28)..(28): n is a, c, g, or t
  misc_feature (34)..(34): n is a, c, g, or t
  misc_feature (37)..(37): n is a, c, g, or t
  misc_feature (55)..(55): n is a, c, g, or t
  misc_feature (68)..(68): n is a, c, g, or t
nttcngggcngcnncncgnngnnggngngggcgnctngggctcggggggcgcggncccccaacccganccggcgggcccggggggcgtcccggcgctggcggccgccgtcctgggcgcctgcgagccccgctgcgccgcgccctgtcccctgcccgcgctcagccgctgtcggggcgcggggtcgcgggggtcgcggggcgggcggggggcggcggggtccggggacgccgccgccgccgccgagtggatccggaagggcagcttcatccacaaacccgcgcacggctggctacaccccgacgccagggtcctggggcccggggtctcctacgtcgtgcggtacatgggctgcatcgaggttctccgctctatgcgctccctggactttaacacgcgcacgcaggtgaccagctcctgccaccactcaggctgcagacaggatctcgacacggaccccgcgtcaggctcagggcctcctgctcgctgctccaacccccacatctgatgccgagccttccttgtgggccgaggccagggacacactggtccctgggaaagagggtggtagaggggccagagctgggggccgggcctctgccggatgcaaggacgcacgtggagtgggctggtgcccaagctgcacctgtcctgtggggcactcctcccccagggaagccatcaaccggctccatgaggccgtgcctggcgtccggggatcctggaagaaaaaggcccccaacaaggccctggcgtccgtcctgggcaagagcaaccttcgctttgccggcatgagcatctccatccacatctccactgatggcctcagcctctccgtgcctgccacgcgccaggtcatcgccaaccaccacatgccgtccatctccttcgcgtcaggcggagacacggacatgacggattacgtggcctacgtcgccaaggaccccatcaaccagagagcctgccacatcctggagtgctgtgagggcctggcacagagcatcatcagcaccgtgggccaagctttcgagctgcgcttcaagcagtacctgcacagcccgcccaaggtggcgctgcccccagaaaggctggcagggccggaggagtcggcctggggggacgaggaggactctttggagcacaattactacaacagcatcccggggaaggagccgccgctgggcgggctagtggactccaggctggccctgacacagccctgcgccctcacggccctcgaccagggcccatctccttctctaagagatgcctgcagcctgccatgggacgtggggtccaccggtacagctccaccgggggacggctacgtgcaggcggacgcccggggccccccggaccacgaggagcacctgtatgtcaacacccagggtctggacgcccccgagccggaggacagccccaaaaaggatctgtttgacatgcgaccctttgaggatgccctgaagttgcatgagtgctcagtggcggcaggcgtgacagcagcccctcttcccttggaggaccagtggcccagcccccctacccgccgggcccctgtggcccccacggaggaacagctgcgtcaggagccctggtaccacggccggatgagccgccgggcggcagagaggatgcttcgagctgacggggacttccttgtgcgagacagcgtcaccaaccccgggcagtatgtcctcaccggcatgcacgccgggcagcccaagcacctgctgctcgtggaccccgagggcgtggtacggacgaaggacgtgctgtttgagagcatcagccacctgatcgaccaccacctgcagaacgggcagcccatcgtggccgccgagagtgagctgcacctgcgtggcgtggtctcacgggagccctgagccaggtgaccgttctcagccctggctcctgcctgttctcagccccggctcctgcctgtcatggccttggggctctcagccctcctcctggatcctggtcaggccgaaccaccgctgcctctccttcctccgcatgagcctctggcatggtccttcctccagctggccccgggctgggcagagcctcctcctgccggggcccctgcccaccccctcctttgcctggagtgagggtgttcataccaaagacggaaccatttcgcctttaaagaaaatatatccagaagcagccgctgcctcggagccctggcccgtgggtccccctctcgcctggctggttcggtctaacgccccggagagtcagggctcccaggaccctggggaggaggcggattccgggcctggctgggcttcctcttcccacctgaggactgggtgcacagttgtctttgaggggggacgcttaaggtgctttggggttctcaggccaggatacatgctggcgctgaagtgcaggcagccttgaggtcacctgggatctcggggtagccaggctgctccaagacagtggatatcgaggcagtcgtgaggcccctactccacctgggagcaggggaaggacgtggttgcctggcctgggctgcgcccagcagcttccccccaatcctgccctcccagctgtcgacccagatgggatgttcggatcggtttgtaattaaacctgggaatggccacaagaaaaaaaaaaaa

SEQ ID NO: 64935 - DNA, 1942 bp, Homo sapiens
  misc_feature (1)..(1): n is a, c, g, or t
  misc_feature (5)..(5): n is a, c, g, or t
  misc_feature (10)..(10): n is a, c, g, or t
  misc_feature (13)..(14): n is a, c, g, or t
  misc_feature (16)..(16): n is a, c, g, or t
  misc_feature (19)..(20): n is a, c, g, or t
  misc_feature (22)..(23): n is a, c, g, or t
  misc_feature (26)..(26): n is a, c, g, or t
  misc_feature (28)..(28): n is a, c, g, or t
  misc_feature (34)..(34): n is a, c, g, or t
  misc_feature (37)..(37): n is a, c, g, or t
  misc_feature (55)..(55): n is a, c, g, or t
  misc_feature (68)..(68): n is a, c, g, or t
nttcngggcngcnncncgnngnnggngngggcgnctngggctcggggggcgcggncccccaacccganccggcgggcccggggggcgtcccggcgctggcggccgccgtcctgggcgcctgcgagccccgctgcgccgcgccctgtcccctgcccgcgctcagccgctgtcggggcgcggggtcgcgggggtcgcggggcgggcggggggcggcggggtccggggacgccgccgccgccgccgagtggatccggaagggcagcttcatccacaaacccgcgcacggctggctacaccccgacgccagggtcctggggcccggggtctcctacgtcgtgcggtacatgggctgcatcgaggttctccgctctatgcgctccctggactttaacacgcgcacgcaggtgaccagggaagccatcaaccggctccatgaggccgtgcctggcgtccggggatcctggaagaaaaaggcccccaacaaggccctggcgtccgtcctgggcaagagcaaccttcgctttgccggcatgagcatctccatccacatctccactgatggcctcagcctctccgtgcctgccacgcgccaggtcatcgccaaccaccacatgccgtccatctccttcgcgtcaggcggagacacggacatgacggattacgtggcctacgtcgccaaggaccccatcaaccagagagcctgccacatcctggagtgctgtgagggcctggcacagagcatcatcagcaccgtgggccaagctttcgagctgcgcttcaagcagtacctgcacagcccgcccaaggtggcgctgcccccagaaaggctggcagggccggaggagtcggcctggggggacgaggaggactctttggagcacaattactacaacagcatcccggggaaggagccgccgctgggcgggctagtggactccaggctggccctgacacagccctgcgccctcacggccctcgaccagggcccatctccttctctaagagatgcctgcagcctgccatgggacgtggggtccaccggtacagctccaccgggggacggctacgtgcaggcggacgcccggggccccccggaccacgaggagcacctgtatgtcaacacccagggtctggacgcccccgagccggaggacagccccaaaaaggatctgtttgacatgcgaccctttgaggatgccctgaagttgcatgagtgctcagtggcggcaggcgtgacagcagcccctcttcccttggaggaccagtggcccagcccccctacccgccgggcccctgtggcccccacggaggaacagctgcgtcaggagccctggtaccacggccggatgagccgccgggcggcagagaggatgcttcgagctgacggggacttccttgtgcgagacagcgtcaccaaccccgggcagtatgtcctcaccggcatgcacgccgggcagcccaagcacctgctgctcgtggaccccgagggcgtggtacggacgaaggacgtgctgtttgagagcatcagccacctgatcgaccaccacctgcagaacgggcagcccatcgtggccgccgagagtgagctgcacctgcgtggcgtggtctcacgggagccctgagccaggtgaccgttctcagccctggctcctgcctgttctcagccccggctcctgcctgtcatggccttggggctctcagccctcctcctggatcctggtcaggccgaaccaccgctgcctctccttcctccgcatgagcctctggcatggtccttcctccagctggccccgggctgggcagagcctcctcctgccggggcccctgcccaccccctcctttgcctggagtgagggtgttcctcacttaggcaaatgcaattcggcgttcagttacatgtttgcataagcacccgcagacagtgttctgggaatccgggtct

SEQ ID NO: 64936 - DNA, 265 bp, Homo sapiens
cacatttcaaagggtcatttattattcaatggatttattttcacgagttattttctgaatttcctagccgcactcaaaacataattaaacttacaaaaatgctgtatgcacacaatttatcaggaatatctactctctgaaataagtacagcacaaatgagttttcttaagtcaagaaaactgtatcattgtatttacatatatattcaccactaaggaaaattaaattaattgcctggatacttcacagcagggcagccactag

SEQ ID NO: 64937 - DNA, 2639 bp, Homo sapiens
  misc_feature (1)..(1): n is a, c, g, or t
  misc_feature (5)..(7): n is a, c, g, or t
ngccnnngcgctgtcctgggtgcgcctcgggccgctgcgctcctggccagctccccccagcgcctgggaggcgacccccagtgcgcccgggttcaaaggcccggcgaggcagttccagcccctctggggggcggggaggcgacgggggtggtgcagaagccagaaaagcccgagccacagccggccagctccgcgcagggatgggcagcgcgctctgaaagtttatgaccgccgcagccaactcctggccggagctggagacgcagcgagcgatcggccggcctcgaacccccacagctggagggcgaggccagctgtacccggccccagtgccctttcgcggccacaagcggccgtcctcctggtccggtgctccggcgcctgatctaggttcatggagccggggctgtggctccttttcgggctcacagtgacctccgccgcaggattcgtgccttgctcccagtctggggatgctggcaggcgcggcgtgtcccaggcccccactgcagccagatctgagggggactgtgaagagactgtggctggccctggcgaggagactgtggctggccctggcgaggggactgtggccccgacagcactgcagggtccaagccctggaagccctgggcaggagcaggcggccgagggggcccctgagcaccaccgatccaggcgctgcacgtgcttcacctacaaggacaaggagtgtgtctactattgccacctggacatcatttggatcaacactcccgaacagacggtgccctatggactgtccaactacagaggaagcttccggggcaagaggtctgcggggccacttccagggaatctgcagctctcacatcggccacacttgcgctgcgcttgtgtggggagatatgacaaggcctgcctgcacttttgcacccaaactctggacgtcagcagtaattcaaggacggcagaaaaaacagacaaagaagaggaagggaaggttgaagtcaaggaccaacaaagcaagcaggctttagacctccaccatccaaagctcatgcccggcagtggactcgccctcgctccatctacctgcccccgctgcctctttcaggaaggagccccttaggaggacaggcctgcagcatcctggtctcgggaggcttctgtcattgctcacacacagttcagatttccacctctttatagacaagaagtgaatttgcctggggcagaacacccacccaaagagtccccacttaacaataccccccccccacggcaagaatgcccaaatccgaatgaccccagttttcctaatgagtaaaatgatcccagatgtgccccagagcatgacgcctgcagctccggtttcatgcaggaaattggttttggagagttttggcaagttggaaagccacttactggcttttgacatgacttctcttggagaataagtggactccaagctaactctttgcaaatgtaaacacatgtccatcttgtaataaatgcaaaatgcccgtgcagcagaagcatgcgactttcatatccttgcctagaataggctgcatggtgtatgtcagtgagggccacgaggcgtcggctttagacacagatcatagctctacaggagtttatgaatttgaagcttatgggattttggcagagaaattttcagctgtgcttgatacccaccaaaagaatgtatctcgaaagaatgaaggaagaagaaaaaaggatccttgatgtttgtgacaagaaaatgagaaagttagtatctgcaatacagagcttgttcctgttcagtgactgaccctctgtattctgtatagacaccaggccgatacacagtggagttcccaggccttgtttgcaggaagccgactgtaaagacagccccagctcaaggctattaggttgaatatttgctttcatgagtaaatgtggatctttggggaatggcttcaaaataagtcacgaacacaaattctttgtaaattatgtaaattcctgtttatataaattggcaacaacttataccgtctgacagttcaaaatctctttcagctgcgctcttcccaccgagccgagcttactgtgagtgtggagatgttatcccaccatgtaaagtcgcctgcgcaggggagggctgcccatctccccaacccagtcacagagagataggaaacggcatttgagtgggtgtccagggccccgtagagagacatttaagatggtgtatgacagagcattggccttgaccaaatgttaaatcctctgtgtgtatttcataagttattacaggtataaaagtgatgacctatcatgaggaaatgaaagtggctgatttgctggtaggattttgtacagtttagagaagcgattatttattgtgaaactgttctccactccaactcctttatgtggatctgttcaaagtagtcactgtatatacgtatagagaggtagataggtaggtagattttaaattgcattctgaatacaaactcatactccttagagcttgaattacatttttaaaatgcatatgtgctgtttggcaccgtggcaagatggtatcagagagaaacccatcaattgctcaaatactcagaaagtactgtcaaaagcctaataaaaaacctaaagtttgc

SEQ ID NO: 64938 - DNA, 2674 bp, Homo sapiens
  misc_feature (1)..(1): n is a, c, g, or t
  misc_feature (5)..(7): n is a, c, g, or t
ngccnnngcgctgtcctgggtgcgcctcgggccgctgcgctcctggccagctccccccagcgcctgggaggcgacccccagtgcgcccgggttcaaaggcccggcgaggcagttccagcccctctggggggcggggaggcgacgggggtggtgcagaagccagaaaagcccgagccacagccggccagctccgcgcagggatgggcagcgcgctctgaaagtttatgaccgccgcagccaactcctggccggagctggagacgcagcgagcgatcggccggcctcgaacccccacagctggagggcgaggccagctgtacccggccccagtgccctttcgcggccacaagcggccgtcctcctggtccggtgctccggcgcctgatctaggttcatggagccggggctgtggctccttttcgggctcacagtgacctccgccgcaggattcgtgccttgctcccagtctggggatgctggcaggcgcggcgtgtcccaggcccccactgcagccagatctgagggggactgtgaagagactgtggctggccctggcgaggagactgtggctggccctggcgaggggactgtggccccgacagcactgcagggtccaagccctggaagccctgggcaggagcaggcggccgagggggcccctgagcaccaccgatccaggcgctgcacgtgcttcacctacaaggacaaggagtgtgtctactattgccacctggacatcatttggatcaacactcccgaacagacggtgccctatggactgtccaactacagaggaagcttccggggcaagaggtctgcggggccacttccagggaatctgcagctctcacatcggccacacttgcgctgcgcttgtgtggggagatatgacaaggcctgcctgcacttttgcacccaaactctggacgtcagcagtaattcaaggacggcagaaaaaacagacaaagaagaggaagggaaggtgagaggtgccaacagaggcctgtgtcaaaggaggttgaagtcaaggaccaacaaagcaagcaggctttagacctccaccatccaaagctcatgcccggcagtggactcgccctcgctccatctacctgcccccgctgcctctttcaggaaggagccccttaggaggacaggcctgcagcatcctggtctcgggaggcttctgtcattgctcacacacagttcagatttccacctctttatagacaagaagtgaatttgcctggggcagaacacccacccaaagagtccccacttaacaataccccccccccacggcaagaatgcccaaatccgaatgaccccagttttcctaatgagtaaaatgatcccagatgtgccccagagcatgacgcctgcagctccggtttcatgcaggaaattggttttggagagttttggcaagttggaaagccacttactggcttttgacatgacttctcttggagaataagtggactccaagctaactctttgcaaatgtaaacacatgtccatcttgtaataaatgcaaaatgcccgtgcagcagaagcatgcgactttcatatccttgcctagaataggctgcatggtgtatgtcagtgagggccacgaggcgtcggctttagacacagatcatagctctacaggagtttatgaatttgaagcttatgggattttggcagagaaattttcagctgtgcttgatacccaccaaaagaatgtatctcgaaagaatgaaggaagaagaaaaaaggatccttgatgtttgtgacaagaaaatgagaaagttagtatctgcaatacagagcttgttcctgttcagtgactgaccctctgtattctgtatagacaccaggccgatacacagtggagttcccaggccttgtttgcaggaagccgactgtaaagacagccccagctcaaggctattaggttgaatatttgctttcatgagtaaatgtggatctttggggaatggcttcaaaataagtcacgaacacaaattctttgtaaattatgtaaattcctgtttatataaattggcaacaacttataccgtctgacagttcaaaatctctttcagctgcgctcttcccaccgagccgagcttactgtgagtgtggagatgttatcccaccatgtaaagtcgcctgcgcaggggagggctgcccatctccccaacccagtcacagagagataggaaacggcatttgagtgggtgtccagggccccgtagagagacatttaagatggtgtatgacagagcattggccttgaccaaatgttaaatcctctgtgtgtatttcataagttattacaggtataaaagtgatgacctatcatgaggaaatgaaagtggctgatttgctggtaggattttgtacagtttagagaagcgattatttattgtgaaactgttctccactccaactcctttatgtggatctgttcaaagtagtcactgtatatacgtatagagaggtagataggtaggtagattttaaattgcattctgaatacaaactcatactccttagagcttgaattacatttttaaaatgcatatgtgctgtttggcaccgtggcaagatggtatcagagagaaacccatcaattgctcaaatactcagaaagtactgtcaaaagcctaataaaaaacctaaagtttgc

SEQ ID NO: 64939 - DNA, 2419 bp, Homo sapiens
  misc_feature (1)..(1): n is a, c, g, or t
  misc_feature (5)..(7): n is a, c, g, or t
ngccnnngcgctgtcctgggtgcgcctcgggccgctgcgctcctggccagctccccccagcgcctgggaggcgacccccagtgcgcccgggttcaaaggcccggcgaggcagttccagcccctctggggggcggggaggcgacgggggtggtgcagaagccagaaaagcccgagccacagccggccagctccgcgcagggatgggcagcgcgctctgaaagtttatgaccgccgcagccaactcctggccggagctggagacgcagcgagcgatcggccggcctcgaacccccacagctggagggcgaggccagctgtacccggccccagtgccctttcgcggccacaagcggccgtcctcctggtccggtgctccggcgcctgatctaggttcatggagccggggctgtggctccttttcgggctcacagtgacctccgccgcaggattcgtgccttgctcccagtctggggatgctggcaggcgcggcgtgtcccaggcccccactgcagccagatctgagggggactgtgaagagactgtggctggccctggcgaggagactgtggctggccctggcgaggggactgtggccccgacagcactgcagggtccaagccctggaagccctgggcaggagcaggcggccgagggggcccctgagcaccaccgatccaggcgctgcacgtgcttcacctacaaggacaaggagtgtgtctactattgccacctggacatcatttggatcaacactcccgaacagacggtgccctatggactgtccaactacagaggaagcttccggggcaagaggtctgcggggccacttccagggaatctgcagctctcacatcggccacacttgcgctgcgcttgtgtggggagatatgacaaggcctgcctgcacttttgcacccaaactctggacgtcagcagtaattcaaggacggcagaaaaaacagacaaagaagaggaagggaaggttgaagtcaaggaccaacaaagcaagcaggctttagacctccaccatccaaagctcatgcccggcagtggactcgccctcgctccatctacctgcccccgctgcctctttcaggaaggagccccttaggaggacaggcctgcagctccggtttcatgcaggaaattggttttggagagttttggcaagttggaaagccacttactggcttttgacatgacttctcttggagaataagtggactccaagctaactctttgcaaatgtaaacacatgtccatcttgtaataaatgcaaaatgcccgtgcagcagaagcatgcgactttcatatccttgcctagaataggctgcatggtgtatgtcagtgagggccacgaggcgtcggctttagacacagatcatagctctacaggagtttatgaatttgaagcttatgggattttggcagagaaattttcagctgtgcttgatacccaccaaaagaatgtatctcgaaagaatgaaggaagaagaaaaaaggatccttgatgtttgtgacaagaaaatgagaaagttagtatctgcaatacagagcttgttcctgttcagtgactgaccctctgtattctgtatagacaccaggccgatacacagtggagttcccaggccttgtttgcaggaagccgactgtaaagacagccccagctcaaggctattaggttgaatatttgctttcatgagtaaatgtggatctttggggaatggcttcaaaataagtcacgaacacaaattctttgtaaattatgtaaattcctgtttatataaattggcaacaacttataccgtctgacagttcaaaatctctttcagctgcgctcttcccaccgagccgagcttactgtgagtgtggagatgttatcccaccatgtaaagtcgcctgcgcaggggagggctgcccatctccccaacccagtcacagagagataggaaacggcatttgagtgggtgtccagggccccgtagagagacatttaagatggtgtatgacagagcattggccttgaccaaatgttaaatcctctgtgtgtatttcataagttattacaggtataaaagtgatgacctatcatgaggaaatgaaagtggctgatttgctggtaggattttgtacagtttagagaagcgattatttattgtgaaactgttctccactccaactcctttatgtggatctgttcaaagtagtcactgtatatacgtatagagaggtagataggtaggtagattttaaattgcattctgaatacaaactcatactccttagagcttgaattacatttttaaaatgcatatgtgctgtttggcaccgtggcaagatggtatcagagagaaacccatcaattgctcaaatactcagaaagtactgtcaaaagcctaataaaaaacctaaagtttgc

SEQ ID NO: 64940 - DNA, 2593 bp, Homo sapiens
  misc_feature (1)..(1): n is a, c, g, or t
  misc_feature (5)..(7): n is a, c, g, or t
ngccnnngcgctgtcctgggtgcgcctcgggccgctgcgctcctggccagctccccccagcgcctgggaggcgacccccagtgcgcccgggttcaaaggcccggcgaggcagttccagcccctctggggggcggggaggcgacgggggtggtgcagaagccagaaaagcccgagccacagccggccagctccgcgcagggatgggcagcgcgctctgaaagtttatgaccgccgcagccaactcctggccggagctggagacgcagcgagcgatcggccggcctcgaacccccacagctggagggcgaggccagctgtacccggccccagtgccctttcgcggccacaagcggccgtcctcctggtccggtgctccggcgcctgatctaggttcatggagccggggctgtggctccttttcgggctcacagtgacctccgccgcaggattcgtgccttgctcccagtctggggatgctggcaggcgcggcgtgtcccaggcccccactgcagccagatctgagggggactgtgaagagactgtggctggccctggcgaggagactgtggctggccctggcgaggggactgtggccccgacagcactgcagggtccaagccctggaagccctgggcaggagcaggcggccgagggggcccctgagcaccaccgatccaggcgctgcacgtgcttcacctacaaggacaaggagtgtgtctactattgccacctggacatcatttggatcaacactcccgaacagacggtgccctatggactgtccaactacagaggaagcttccggggcaagaggtctgcggggccacttccagggaatctgcagctctcacatcggccacacttgcgctgcgcttgtgtggggagatatgacaaggcctgcctgcacttttgcacccaaactctggacgtcagcaggttgaagtcaaggaccaacaaagcaagcaggctttagacctccaccatccaaagctcatgcccggcagtggactcgccctcgctccatctacctgcccccgctgcctctttcaggaaggagccccttaggaggacaggcctgcagcatcctggtctcgggaggcttctgtcattgctcacacacagttcagatttccacctctttatagacaagaagtgaatttgcctggggcagaacacccacccaaagagtccccacttaacaataccccccccccacggcaagaatgcccaaatccgaatgaccccagttttcctaatgagtaaaatgatcccagatgtgccccagagcatgacgcctgcagctccggtttcatgcaggaaattggttttggagagttttggcaagttggaaagccacttactggcttttgacatgacttctcttggagaataagtggactccaagctaactctttgcaaatgtaaacacatgtccatcttgtaataaatgcaaaatgcccgtgcagcagaagcatgcgactttcatatccttgcctagaataggctgcatggtgtatgtcagtgagggccacgaggcgtcggctttagacacagatcatagctctacaggagtttatgaatttgaagcttatgggattttggcagagaaattttcagctgtgcttgatacccaccaaaagaatgtatctcgaaagaatgaaggaagaagaaaaaaggatccttgatgtttgtgacaagaaaatgagaaagttagtatctgcaatacagagcttgttcctgttcagtgactgaccctctgtattctgtatagacaccaggccgatacacagtggagttcccaggccttgtttgcaggaagccgactgtaaagacagccccagctcaaggctattaggttgaatatttgctttcatgagtaaatgtggatctttggggaatggcttcaaaataagtcacgaacacaaattctttgtaaattatgtaaattcctgtttatataaattggcaacaacttataccgtctgacagttcaaaatctctttcagctgcgctcttcccaccgagccgagcttactgtgagtgtggagatgttatcccaccatgtaaagtcgcctgcgcaggggagggctgcccatctccccaacccagtcacagagagataggaaacggcatttgagtgggtgtccagggccccgtagagagacatttaagatggtgtatgacagagcattggccttgaccaaatgttaaatcctctgtgtgtatttcataagttattacaggtataaaagtgatgacctatcatgaggaaatgaaagtggctgatttgctggtaggattttgtacagtttagagaagcgattatttattgtgaaactgttctccactccaactcctttatgtggatctgttcaaagtagtcactgtatatacgtatagagaggtagataggtaggtagattttaaattgcattctgaatacaaactcatactccttagagcttgaattacatttttaaaatgcatatgtgctgtttggcaccgtggcaagatggtatcagagagaaacccatcaattgctcaaatactcagaaagtactgtcaaaagcctaataaaaaacctaaagtttgc

SEQ ID NO: 64941 - DNA, 2668 bp, Homo sapiens
  misc_feature (323)..(323): n is a, c, g, or t
  misc_feature (724)..(724): n is a, c, g, or t
  misc_feature (2022)..(2022): n is a, c, g, or t
aagttttgttcttttgctctttgcaaaagctcttgctactgctcattctttgggttcatactgcctttatgagcagtaacactgatcacgaaggtctgtagcttcactgctgaagccagcaagaccacaaacccactgggaggaatgaacaactccagacctgctgccttaggagttctaatgctcaccgtggaggtttgcagcttcactcctgaggccagcaagaccacgaacccaccagaaggaagaaactctgaacacatctgaacatcagaaggaacaaactctgaacacgctgcctttaagaactgtaacactcaccncgagggtccaaggcttcattgttgaagaaagaaacataattacgtgtggaaaagcaggaactcaggtggggtaagaaaccaatcgtgatgaatgagggcttgaactctcattgtctgagacgggatttcaccgtgttagccgggatggtctcgatctcctgacctcgtgatccacccgcctcggcctcccaaagtgctgggattacaggcgtgagccactgcgcgcgcgcccggccccttaccgttcttggaatagtgaggaaatcaagagatggagaaattggcccaccaaccactttggtggtaaaagaggagagtttcctttgtgattggcccgcgctcctaaatttgcccaagtaaaatctacatgagtgtttcccacgacttggaggtggattgcntatgaggcatttagggcataccccataactccaattgcctcactagtagacatttcccagtcaaataagatatggcctgaggaaacggcccaacagtctcactctgtcacccagactggagtgcattggcatcatcatggcttactgcagcctcaacctcctgggctcaggtgatcttcccaccacagcctcacaggcagcttagactacaagtgtgtgccatcatgcccagctaatttgttgtgttttttgtagagacagggttttgccatgtcaccaggctggtctcaaactcctggactcaagagaccaacctgccttggcctcccaaagtgctgggattacagctgtgagccactatgcctggcctcttatttttgtttcttattcatattatctaagaattttaatttactgtcagtggttattgctttatgaaatctcagtaacaagaagcaaagaaaatgagatcagtaagtgagaatcctgaatacattacgaacttttctgctcataagtcctcttgtttgaacaaacaggaagcattatcatgaaagtctcttctgataattccactgccattcttacatctatcaatgattgaaataaagtataaaaaatgagactaaccgatgactaataggatagtagaagacccttaaaatagttttattcctctagtacaggtggtcttaaatgggggtcttaaaaaaatgattctaattctcaagatttctagaaatgcttcctaaaaagtaacctttacattatatccttcaaattaaaagcaaagtgccttaacagcgaagtaaaatcatgttccataggaataaatttcctccactcattatgaatacaggtatcagaaagattaaaatttacttctttctgtcattgacacaactactctgcttattcttgcttagttatttcagtacccatgacagtgttccagcacatagctgagtatgtgggacaaattcagaacacagaaattattatattaatgcatgaataaatgaatgaatagttgaagtgtaagttcctaggaagaaaggcaatgagataaatccactttttttccctcacataggccttgtttgaagacaataattacatggcctgaggccctctctttgagaatacttcatttttactcaaagaggtcttacctagtatgtaaacctcatttgtttgatccatttaacttcatcatttgggagatataatggttctcagacttgtaatattttgacggcatgaaacaaataatatttgatttgttacatctgaaggantataaggctaatgagtaagaataactcgatgctccacttcaggtgattcgtatgctataggagttagcaatctagttcttgtctttcgtttgaataaattaacaaatattcctagagtatctactgattacaaggcctgagccagacggaccttgttagggactcttgaacaagcagaactaaaagcatgatagacaaaaggtagaaatctaattaaaagcagttgagatgatgacacaagatcaattgaaataatctgcaaagcccagaatgaagttagacacttttcattttagtctgctgacaaaattaagcaatataacatcacaaaatattagatttgttaattatatatttgtctattttatgcttaagtgtatctacattaaatgttagattaaatgcaatgtggtgttagtattagaccctggagtaaagtcataggtgaaaaaccagtgaaagcaaatagtctgtagtttagttaataatattctagcaatattaatttttttagttttgaaaaatggttataaaagatgttaacattcgggcaaactggataaagattacatggaatctcttttggctatttttgtaacttctgtaaattaaaaagtacttcaaaataaaattatttaaaattgta

SEQ ID NO: 64942 - DNA, 300 bp, Homo sapiens
taacttaaccactcagtcattgctgaaacagttgtcatggaggcctgcctgttcagctgttagtgagacctggcctgccacaccttctcactgaagtctttcttaaacatgcactttaaaatttcaccctcttattttgctatataatgttctccttctctgttatattttctttttcttcttacaattatcactgtttaacttacagtatattttatttggttatattatttattgtctgaatctcccagcagaaggtaagttccgtgagggcaggggattttgtctgttttatcctct

SEQ ID NO: 64943 - DNA, 348 bp, Homo sapiens
  misc_feature (322)..(322): n is a, c, g, or t
aaacaaaatgtgcaattcctttgatgatacagggtagaagactacagctggagtaacttgagttttgtacctactctgctggcgaaaacattaagttaaagaagggagaagagagaaacagactggttctgcctctttctgtgtttcttaaggggtcttttgagaaggatgatgaaatgaatatgggtatatagaaatattaaaggaggtggtaattaagaggatcaatttatgtaagaaggatcctaataaagataagaaaatagctgataaaatattgatacgggcaaggcattctacttcattacatttaatgttgggngtttcaatatagcttaatggttcaga

SEQ ID NO: 64944 - DNA, 439 bp, Homo sapiens
acggaggctgagaagggaggatccactgagcccaggagtttgagaccagcccacagagaaacctcatcttaaaaacaaaacaaaaaaagaaaaaaaaaaccagcaatttttgaaaacattattgtggaaatcagatactcttgctagcaggtttaggtttgttttggtctgaaaaaggaaaatatgaagacacaagaaaggcttagtttggattcctttaaacattcttatctttttaaaaggagaattgtccaattaaagttggaaaaattacaaggtacaattatatatccttctgctgagcgtgagacctccttctgtccgctgcggatttcccctagatgctgtcatccctgattgtggatcacaagtcctagcggttcactttgattcagagcctcaactcaccaggcgttgaaatctgccaccatccagctct

SEQ ID NO: 64945 - DNA, 694 bp, Homo sapiens
  misc_feature (218)..(218): n is a, c, g, or t
tttccttaacatttatcttgcaaatcacagcttagatatcttcctgtttgttattattacctgtcacgttatatcgtgaacacaaacacacatgaatttacttgagagtaaagtttgtgtcttatttttttctgtaactgggcttcttaccacaaggccttggcatgtaacaggtactcaaaggtatgttgaattgaattgaagcatagcttataagnatgaaggtaagggctgtaacaagcaatttaaatagtccaggtcttagaaaacagtcttttttttttaatgtttaccagtttattataagggatatgtttttattgccatcatctctggaaaaccaaccttcttaggagagcttaatatcctttccctaccctagtttctatttgtgttagtaatcgtgctctgggaaggggaaattgccaacagtctggcaagcctccctagagagccctttcaagtactctggagaaaacagcgatgccatgtgctgctgctggggaagggaagcagcagcactggggagcaagaaaccctagagctcttctccttggccttgttaaatgtgcttgtttgttgggatgatgcactggctttagagagaagatcaatggcctgaggcagctctagaggcttatttctgttaaactgcttttattctttaatcttacatatagtcacagtatccttt

SEQ ID NO: 64946 - DNA, 1448 bp, Homo sapiens
cggggaggggcggcgcgcaggcgcggctgggggtgcgaggctgcgcaggcgcggacggcgttggtttgaagaccttcagcgttgccctggcggagcagagacaggccctcggggtggaggtctttggtttcataagagcctgagagagatttttctaagatatgtgtaacacaccaacgtactgtgacctaggaaaggctgctaaggatgtcttcaacaaaggatatggctttggcatggtcaagatagacctgaaaaccaagtcttgtagtggagtggaattttctacttctggtcatgcttacactgatacagggaaagcatcaggcaacctagaaaccaaatataaggtctgtaactatggacttaccttcacccagaaatggaacacagacaatactctagggacagaaatctcttgggagaataagttggctgaagggttgaaactgactcttgataccatatttgtaccgaacacaggaaagaagagtgggaaattgaaggcctcctataaacgggattgttttagtgttggcagtaatgttgatatagatttttctggaccaaccatctatggctgggctgtgttggccttcgaagggtggcttgctggctatcagatgagttttgacacagccaaatccaaactgtcacagaataatttcgccctgggttacaaggctgcggacttccagctgcacacacatgtgaacgatggcactgaatttggaggttctatctaccagaaggtgaatgagaagattgaaacatccataaaccttgcttggacagctgggagtaacaacacccgttttggcattgctgctaagtacatgctggattgtagaacttctctctctgctaaagtaaataatgccagcctgattggactgggttatactcagacccttcgaccaggagtcaaattgactttatcagctttaatcgatgggaagaacttcagtgcaggaggtcacaaggttggcttgggatttgaactggaagcttaatgtggtttgaggaaagcatcagatttgtccctggaagtgaagagaaatgaacccactatgttttggccttaaaattcttctgtgaaatttcaaaagtgtgaactttttattcttccaaagaattgtaatcctccccacactgaagtctaggggttgcgaatccctcctgagggagatgcttgaaggcatgcctggaagttgtcatgtttgtgccacgtttcagttcagttctgaagtgttattaaatgtgttcctcagcgacagtgtagcgtcatgttagaggagacgatctgacccaccagtttgtacatcacgtcctgcatgtcccacaccattttttcatgaccttgtaatatactggtctctgtgctatagtggaatctttggttttgcatcatagtaaaataaaataaacccatcacatttggaacataa

SEQ ID NO: 64947 - DNA, 597 bp, Homo sapiens
aggaggaaagaagttgctctagagtagggctgtggcaagcagtaaatggtattgtttttgatacattgaacactgctttccaaagtgaatattttctatttgatgagctaattttaaagtaattattttttcttgcttaccaggaattttctacttctggtcatgcttacactgatacagggaaagcatcaggcaacctagaaaccaaatataaggtctgtaactatggacttaccttcacccagaaaatttcaaaagtgtgaactttttattcttccaaagaattgtaatcctccccacactgaagtctaggggttgcgaatccctcctgagggagatgcttgaaggcatgcctggaagttgtcatgtttgtgccacgtttcagttcagttctgaagtgttattaaatgtgttcctcagcgacagtgtagcgtcatgttagaggagacgatctgacccaccagtttgtacatcacgtcctgcatgtcccacaccattttttcatgaccttgtaatatactggtctctgtgctatagtggaatctttggttttgcatcatagtaaaataaaataaacccatcacatttggaacataa

SEQ ID NO: 64948 - DNA, 1009 bp, Homo sapiens
cggggaggggcggcgcgcaggcgcggctgggggtgcgaggctgcgcaggcgcggacggcgttggtttgaagaccttcagcgttgccctggcggagcagagacaggccctcggggtggaggtctttggtttcataagagcctgagagagatttttctaagatatgtgtaacacaccaacgtactgtgacctaggaaaggctgctaaggatgtcttcaacaaaggatatggctttggcatggtcaagatagacctgaaaaccaagtcttgtagtggagtggaattttctacttctggtcatgcttacactgatacagggaaagcatcaggcaacctagaaaccaaatataaggtctgtaactatggacttaccttcacccagaaatggaacacagacaatactctagggacagaaatctcttgggagaataagttggctgaagggttgaaactgactcttgataccatatttgtaccgaacacaggaaagaagagtgggaaattgaaggcctcctataaacgggattgttttagtgttggcagtaatgttgatatagatttttctggaccaaccatctatggctgggctgtgttggccttcgaagggtggcttgctggctatcagatgagttttgacacagccaaatccaaactgtcacagaataatttcgccctgggttacaaggctgcggacttccagctgcacacacatgtgaaacagatgccaattatggttacacattaagtaatcaataaagaaaacttccatagctaacacacaacacaggaaaccagcaaagcaccacacaacaccaaacaccacagacaccacgccacaaccagaagacgaaacagcaagagcgaaaataacagagagagggagaagaaaaagcgagagacaagagacgcacgaccaactctcgctcgggcgcaacagctctcgaacaacagggagaaacagagcgcacccaacggagggggcaaaaagacaaagccggaccgacacccccc

SEQ ID NO: 64949 - DNA, 595 bp, Homo sapiens
gtatataatttttttattatacccttactgcaccatcaacaaacttcaggagtcaaattgactttatcagctttaatcgatgggaagaacttcagtgcaggaggtcacaaggttggcttgggatttgaactggaagcttaatgtggtttgaggaaagcatcagatttgtccctggaagtgaagagaaatgaacccactatgttttggccttaaaattcttctgtgaaatttcaaaagtgtgaactttttattcttccaaagaattgtaatcctccccacactgaagtctaggggttgcgaatccctcctgagggagatgcttgaaggcatgcctggaagttgtcatgtttgtgccacgtttcagttcagttctgaagtgttattaaatgtgttcctcagcgacagtgtagcgtcatgttagaggagacgatctgacccaccagtttgtacatcacgtcctgcatgtcccacaccattttttcatgaccttgtaatatactggtctctgtgctatagtggaatctttggttttgcatcatagtaaaataaaataaacccatcacatttggaacataagaacataactgctcatgtg

SEQ ID NO: 64950 - DNA, 1362 bp, Homo sapiens
ctgaaagagtcctgggattcagttatgtaggctgcaccatgttggtgggatgaatcagaacttttacgtagtattttatgttgagcctactggacactgctactataccaggaagaaaaagcaaagggcaaactatgtgtttttaaactgttgcagattcctctctgctagatgctctaatttacttatgatggctaaaacaaaggcaagcagtggtatagacagttactgaaattgatgaaacagtattatcaggaaaaccatgtgaaaacccaaggactcacctctggcatgcttggaagcaataactaaggtggttttctggagcagtgcaccctaggtatcgtaggagggtgctttctaactgtaggattgtgttttaaaggaaatccagaattggttttattcctatacctctacctttttatttttttgcagaatctttattgaactctactttgaagtttctaagttctatgaacttctcagagacctatagattatacttacccgaggtgtctgcctttgtgcttaattgaattgtctaagaaactcacatcatgtggaggagccaagtaaatggatcaagtgttaacgttttaattaagcagtcattactggcatagctggatttagttctgtgttttgtttagtagtcatttatgctagaaatttgctgaaatctatagttacaaaatgggatccttgtttagatagtcttagaatttgttttcataccataataacaatggtacaaactagatatttatgacgttttcttatctatgaaaacaggaacgatggcactgaatttggaggttctatctaccagaaggtgaatgagaagattgaaacatccataaaccttgcttggacagctgggagtaacaacacccgttttggcattgctgctaagtacatgctggattgtagaacttctctctctgtaagaatgtgctgccagattggatctgctcttatgtttgtgtctaagttttcagagaatgttgtgatatgagtgtagtttgcttgttctttattaattttaataagccagctcattgtgtagtgaaaggaatataatgtggccaggctcacgcctgtattcccagcactttgggaggccaaggtgcatgaatcacctgaggtcaggagttcaagaccagcctagccaacaaggtgaaaccctgtctttactaaaaatacaaaaattaggtgggcgtggtaggtgacgcctgtagtcccagctactagggaggctgaggcaggagaattgcttgaaccctgcagatggagaggttgcagtgagccaagatcacaccattgcactccagcctgggtgacagagcgagagcctatctc

SEQ ID NO: 64951 - DNA, 1846 bp, Homo sapiens
cggggaggggcggcgcgcaggcgcggctgggggtgcgaggctgcgcaggcgcggacggcgttggtttgaagaccttcagcgttgccctggcggagcagagacaggccctcggggtggaggtctttggtttcataagagcctgagagagatttttctaagatatgtgtaacacaccaacgtactgtgacctaggaaaggctgctaaggatgtcttcaacaaaggatatggctttggcatggtcaagatagacctgaaaaccaagtcttgtagtggagtggaattttctacttctggtcatgcttacactgatacagggaaagcatcaggcaacctagaaaccaaatataaggtctgtaactatggacttaccttcacccagaaatggaacacagacaatactctagggacagaaatctcttgggagaataagttggctgaagggttgaaactgactcttgataccatatttgtaccgaacacaggaaagaagagtgggaaattgaaggcctcctataaacgggattgttttagtgttggcagtaatgttgatatagatttttctggaccaaccatctatggctgggctgtgttggccttcgaagggtggcttgctggctatcagatgagttttgacacagccaaatccaaactgtcacagaataatttcgccctgggttacaaggctgcggacttccagctgcacacacatgtgaacgatggcactgaatttggaggttctatctaccagaaggtgaatgagaagattgaaacatccataaaccttgcttggacagctgggagtaacaacacccgttttggcattgctgctaagtacatgctggattgtagaacttctctctctgctaaagtaaataatgccagcctgattggactgggttatactcagacccttcgaccaggagtcaaattgactttatcagctttaatcgatgggaagaacttcagtgcaggaggtcacaaggttggcttgggatttgaactggaagcttaatgtggtttgaggaaagcatcagatttgtccctggaagtgaagagaaatgaacccactatgttttggccttaaaattcttctgtgaaatttcaaaagtgtgaactttttattcttccaaagaattgtaatcctccccacactgaagtctaggggttgcgaatccctcctgagggagatgcttgaaggcatgcctggaagttgtcatgtttgtgccacgtttcagttcagttctgaagtgttattaaatgtgttcctcagcgacagtgtagcgtcatgttagaggagacgatctgacccaccagtttgtacatcacgtcctgcatgtcccacaccattttttcatgaccttgtaatatactggtctctgtgctatagtggaatctttggttttgcatcatagtaaaataaaataaacccatcacatttggaacataaaaaaaaaaaaaaaaaaaaaaaaaaaaaaaaacaaaaaaaaaaaaaaaaaaaaaaaaaaaaggggggggggggtaaaaaaaaatcgaggggggatagcccctttttttaagggggcccaaggggggtaaataagcaggccgccggggccctaaaaacactggtagaggaaaaccgaccacgtgggtatcggtgagaaccccctgcggggtggctaagtgggcacccaccccgcgataagaccgaagaaaaaaacaggagtggggggaaaccggtcttgcgtgcaaagtgtcgcttttgatacccgcctatccatcaacggcagcggcatgatacgactaatgcgcgaatgggaccagcagaacaggaccccgaccaacatcgtgcaccttctcttccca

SEQ ID NO: 64952 - DNA, 1313 bp, Homo sapiens
aggaggaaagaagttgctctagagtagggctgtggcaagcagtaaatggtattgtttttgatacattgaacactgctttccaaagtgaatattttctatttgatgagctaattttaaagtaattattttttcttgcttaccaggaattttctacttctggtcatgcttacactgatacagggaaagcatcaggcaacctagaaaccaaatataaggtctgtaactatggacttaccttcacccagaaatggaacacagacaatactctagggacagaaatctcttgggagaataagttggctgaagggttgaaactgactcttgataccatatttgtaccgaacacaggaaagaagagtgggaaattgaaggcctcctataaacgggattgttttagtgttggcagtaatgttgatatagatttttctggaccaaccatctatggctgggctgtgttggccttcgaagggtggcttgctggctatcagatgagttttgacacagccaaatccaaactgtcacagaataatttcgccctgggttacaaggctgcggacttccagctgcacacacatgtgaacgatggcactgaatttggaggttctatctaccagaaggtgaatgagaagattgaaacatccataaaccttgcttggacagctgggagtaacaacacccgttttggcattgctgctaagtacatgctggattgtagaacttctctctctgctaaagtaaataatgccagcctgattggactgggttatactcagacccttcgaccaggagtcaaattgactttatcagctttaatcgatgggaagaacttcagtgcaggaggtcacaaggttggcttgggatttgaactggaagcttaatgtggtttgaggaaagcatcagatttgtccctggaagtgaagagaaatgaacccactatgttttggccttaaaattcttctgtgaaatttcaaaagtgtgaactttttattcttccaaagaattgtaatcctccccacactgaagtctaggggttgcgaatccctcctgagggagatgcttgaaggcatgcctggaagttgtcatgtttgtgccacgtttcagttcagttctgaagtgttattaaatgtgttcctcagcgacagtgtagcgtcatgttagaggagacgatctgacccaccagtttgtacatcacgtcctgcatgtcccacaccattttttcatgaccttgtaatatactggtctctgtgctatagtggaatctttggttttgcatcatagtaaaataaaataaacccatcacatttggaacataa

SEQ ID NO: 64953 - DNA, 1483 bp, Homo sapiens
cggggaggggcggcgcgcaggcgcggctgggggtgcgaggctgcgcaggcgcggacggcgttggtttgaagaccttcagcgttgccctggcggagcagagacaggccctcggggtggaggtctttggtttcataagagcctgagagagatttttctaagatatgtgtaacacaccaacgtactgtgacctaggaaaggctgctaaggatgtcttcaacaaaggatatggctttggcatggtcaagatagacctgaaaaccaagtcttgtagtggagtggaattttctacttctggtcatgcttacactgatacagggaaagcatcaggcaacctagaaaccaaatataaggtctgtaactatggacttaccttcacccagaaatggaacacagacaatactctagggacagaaatctcttgggagaataagttggctgaagggttgaaactgactcttgataccatatttgtaccgaacacaggaaagaagagtgggaaattgaaggcctcctataaacgggattgttttagtgttggcagtaatgttgatatagatttttctggaccaaccatctatggctgggctgtgttggccttcgaagggtggcttgctggctatcagatgagttttgacacagccaaatccaaactgtcacagaataatttcgccctgggttacaaggctgcggacttccagctgcacacacatgtgaacgatggcactgaatttggaggttctatctaccagaaggtgaatgagaagattgaaacatccataaaccttgcttggacagctgggagtaacaacacccgttttggcattgctgctaagtacatgctggattgtagaacttctctctctgctaaagtaaataatgccagcctgattggactgggttatactcagacccttcgaccaggagtcaaattgactttatcagctttaatcgatgggaagaacttcagtgcaggaggtcacaaggttggcttgggatttgaactggaagcttaatgtggtttgaggaaagcatcagatttgtccctggaagtgaagagaaatgaacccactatgttttggccttaaaattcttctgtgaaatttcaaaagtgtgaactttttattcttccaaagaattgtaatcctccccacactgaagtctaggggttgcgaatccctcctgagggagatgcttgaaggcatgcctggaagttgtcatgtttgtgccacgtttcagttcagttctgaagtgttattaaatgtgttcctcagcgacagtgtagcgtcatgttagaggagacgatctgacccaccagtttgtacatcacgtcctgcatgtcccacaccattttttcatgaccttgtaatatactggtctctgtgctatagtggaatctttggttttgcatcatagtaaaataaaataaacccatcacatttggaacataaggcctcgttggcctcagcggtggagctctgtgccg

SEQ ID NO: 64954 - DNA, 1122 bp, Homo sapiens
tgtagggtcagatggagacagcccagaaggaaagccagctctatccacccctacagcttccccggcaaaccaggttcaaagcccatcagttatatctcactgtgccgctgtcaatgcatgttgtggctgctggcaaagagttggtttggcctccacagaaagaagagtgggaaattgaaggcctcctataaacgggattgttttagtgttggcagtaatgttgatatagatttttctggaccaaccatctatggctgggctgtgttggccttcgaagggtggcttgctggctatcagatgagttttgacacagccaaatccaaactgtcacagaataatttcgccctgggttacaaggctgcggacttccagctgcacacacatgtgaacgatggcactgaatttggaggttctatctaccagaaggtgaatgagaagattgaaacatccataaaccttgcttggacagctgggagtaacaacacccgttttggcattgctgctaagtacatgctggattgtagaacttctctctctgctaaagtaaataatgccagcctgattggactgggttatactcagacccttcgaccaggagtcaaattgactttatcagctttaatcgatgggaagaacttcagtgcaggaggtcacaaggttggcttgggatttgaactggaagcttaatgtggtttgaggaaagcatcagatttgtccctggaagtgaagagaaatgaacccactatgttttggccttaaaattcttctgtgaaatttcaaaagtgtgaactttttattcttccaaagaattgtaatcctccccacactgaagtctaggggttgcgaatccctcctgagggagatgcttgaaggcatgcctggaagttgtcatgtttgtgccacgtttcagttcagttctgaagtgttattaaatgtgttcctcagcgacagtgtagcgtcatgttagaggagacgatctgacccaccagtttgtacatcacgtcctgcatgtcccacaccattttttcatgaccttgtaatatactggtctctgtgctatagtggaatctttggttttgcatcatagtaaaataaaataaacccatcacatttggaacataa

SEQ ID NO: 64955 - DNA, 1531 bp, Homo sapiens
ctgaaagagtcctgggattcagttatgtaggctgcaccatgttggtgggatgaatcagaacttttacgtagtattttatgttgagcctactggacactgctactataccaggaagaaaaagcaaagggcaaactatgtgtttttaaactgttgcagattcctctctgctagatgctctaatttacttatgatggctaaaacaaaggcaagcagtggtatagacagttactgaaattgatgaaacagtattatcaggaaaaccatgtgaaaacccaaggactcacctctggcatgcttggaagcaataactaaggtggttttctggagcagtgcaccctaggtatcgtaggagggtgctttctaactgtaggattgtgttttaaaggaaatccagaattggttttattcctatacctctacctttttatttttttgcagaatctttattgaactctactttgaagtttctaagttctatgaacttctcagagacctatagattatacttacccgaggtgtctgcctttgtgcttaattgaattgtctaagaaactcacatcatgtggaggagccaagtaaatggatcaagtgttaacgttttaattaagcagtcattactggcatagctggatttagttctgtgttttgtttagtagtcatttatgctagaaatttgctgaaatctatagttacaaaatgggatccttgtttagatagtcttagaatttgttttcataccataataacaatggtacaaactagatatttatgacgttttcttatctatgaaaacaggaacgatggcactgaatttggaggttctatctaccagaaggtgaatgagaagattgaaacatccataaaccttgcttggacagctgggagtaacaacacccgttttggcattgctgctaagtacatgctggattgtagaacttctctctctgctaaagtaaataatgccagcctgattggactgggttatactcagacccttcgaccaggagtcaaattgactttatcagctttaatcgatgggaagaacttcagtgcaggaggtcacaaggttggcttgggatttgaactggaagcttaatgtggtttgaggaaagcatcagatttgtccctggaagtgaagagaaatgaacccactatgttttggccttaaaattcttctgtgaaatttcaaaagtgtgaactttttattcttccaaagaattgtaatcctccccacactgaagtctaggggttgcgaatccctcctgagggagatgcttgaaggcatgcctggaagttgtcatgtttgtgccacgtttcagttcagttctgaagtgttattaaatgtgttcctcagcgacagtgtagcgtcatgttagaggagacgatctgacccaccagtttgtacatcacgtcctgcatgtcccacaccattttttcatgaccttgtaatatactggtctctgtgctatagtggaatctttggttttgcatcatagtaaaataaaataaacccatcacatttggaacataa

SEQ ID NO: 64956 - DNA, 1389 bp, Homo sapiens
cggggaggggcggcgcgcaggcgcggctgggggtgcgaggctgcgcaggcgcggacggcgttggtttgaagaccttcagcgttgccctggcggagcagagacaggccctcggggtggaggtctttggtttcataagagcctgagagagatttttctaagatatgtgtaacacaccaacgtactgtgacctaggaaaggctgctaaggatgtcttcaacaaaggatatggctttggcatggtcaagatagacctgaaaaccaagtcttgtagtggagtggaattttctacttctggtcatgcttacactgatacagggaaagcatcaggcaacctagaaaccaaatataaggtctgtaactatggacttaccttcacccagaaatggaacacagacaatactctagggacagaaatctcttgggagaataagttggctgaagggttgaaactgactcttgataccatatttgtaccgaacacaggaaagaagagtgggaaattgaaggcctcctataaacgggattgttttagtgttggcagtaatgttgatatagatttttctggaccaaccatctatggctgggctgtgttggccttcgaagggtggcttgctggctatcagatgagttttgacacagccaaatccaaactgtcacagaataatttcgccctgggttacaaggctgcggacttccagctgcacacacatgtgaacgatggcactgaatttggaggttctatctaccagaaggtgaatgagaagattgaaacatccataaaccttgcttggacagctgggagtaacaacacccgttttggcattgctgctaagtacatgctggattgtagaacttctctctctgctaaagtaaataatgccagcctgattggactgggttatactcagacccttcgaccaggagtcaaattgactttatcagctttaatcgatgggaagaacttcagtgcaggaggtcacaaggttggcttgggatttgaactggaagcttaatgtggtttgaggaaagcatcagatttgtccctggaagtgaagagaaatgaacccactatgttttggccttaaaattcttctgtgaatctaggggttgcgaatccctcctgagggagatgcttgaaggcatgcctggaagttgtcatgtttgtgccacgtttcagttcagttctgaagtgttattaaatgtgttcctcagcgacagtgtagcgtcatgttagaggagacgatctgacccaccagtttgtacatcacgtcctgcatgtcccacaccattttttcatgaccttgtaatatactggtctctgtgctatagtggaatctttggttttgcatcatagtaaaataaaataaacccatcacatttggaacataa

SEQ ID NO: 64957 - DNA, 1642 bp, Homo sapiens
cggggaggggcggcgcgcaggcgcggctgggggtgcgaggctgcgcaggcgcggacggcgttggtttgaagaccttcagcgttgccctggcggagcagagacaggccctcggggtggaggtctttggtttcataagagcctgagagagatttttctaagatatgtgtaacacaccaacgtactgtgacctaggaaaggctgctaaggatgtcttcaacaaaggatatggctttggcatggtcaagatagacctgaaaaccaagtcttgtagtggagtggaattttctacttctggtcatgcttacactgatacagggaaagcatcaggcaacctagaaaccaaatataaggtctgtaactatggacttaccttcacccagaaatggaacacagacaatactctagggacagaaatctcttgggagaataagttggctgaagggttgaaactgactcttgataccatatttgtaccgaacacaggaaagaagagtgggaaattgaaggcctcctataaacgggattgttttagtgttggcagtaatgttgatatagatttttctggaccaaccatctatggctgggctgtgttggccttcgaagggtggcttgctggctatcagatgagttttgacacagccaaatccaaactgtcacagaataatttcgccctgggttacaaggctgcggacttccagctgcacacacatgtgaacgatggcactgaatttggaggttctatctaccagaaggtgaatgagaagattgaaacatccataaaccttgcttggacagctgggagtaacaacacccgttttggcattgctgctaagtacatgctggattgtagaacttctctctctgctaaagtaaataatgccagcctgattggactgggttatactcagacccttcgaccaggtaagtaaaggaattagtaacagaggggttgaggtggaaggtgatagagaaaacaatgaaaataacctgcagaacaacctgtagtcactgtaagttgatttggaccattctgtaacatttggttgttcagacagaaaacaatacagatcaaatacttttgcattaaaaaagtatgtatttctgactataatgtggtcactttggcctttgagtttggttgatcactcattgcccttaaccctgaacttcagagaaagtttgccatgatcatgctttcctcattacacatcagatagttataaataaccgattgagtaatagctgtttgcttatagctcgtatacccagctacaatccacaccattgattccatctgttgtttctagaaagttcagatctaattgtaatacttgtttcaagtgattgtggtgttttcttcttcctaggagtcaaattgactttatcagctttaatcgatgggaagttgtcatgtttgtgccacgtttcagttcagttctgaagtgttattaaatgtgttcctcagcgacagtgtagcgtcatgttagaggagacgatctgacccaccagtttgtacatcacgtcctgcatgtcccacaccattttttcatgaccttgtaatatactggtctctgtgctatagtggaatctttggttttgcatcatagtaaaataaaataaacccatcacatttggaacataa

SEQ ID NO: 64958 - DNA, 1590 bp, Homo sapiens
tcagctggtatctcagagaattcagggtgtttggttgtgtagtgtttaaaaattttgcttgaggccttgaagcatgcattctcagggtacgtcctacccctacaagtcctactgacttcttaatcagtaattccggctgggcacggtgggtcacgcctgtaatcccagcactttgggaggctgaggcaggggatcacctgaggtcaggagtttgagaccagcctggccaacatggtgaaaccccgtctctactaaaaatacaaaattagccgggcatgggggcgcatgcctgtaatcccagctacttgggaggctgaggcaggagaatggcttggacccgggaagcggaggttgcagtgagccgagatcgtgccatcgcactgcagcctgggtgacaagaacaaaacttcatctcaaaaaaaaaaaaaaaaaaaatcagtaattctagattggccctagggtgcttttagcattggaaacctaatgcacaaagtgatggttatattggactgatctgtaattcactgttttctgttattattctatctcttaatcttaggctaaagtaaataatgccagcctgattggactgggttatactcagacccttcgaccaggtaagtaaaggaattagtaacagaggggttgaggtggaaggtgatagagaaaacaatgaaaataacctgcagaacaacctgtagtcactgtaagttgatttggaccattctgtaacatttggttgttcagacagaaaacaatacagatcaaatacttttgcattaaaaaagtatgtatttctgactataatgtggtcactttggcctttgagtttggttgatcactcattgcccttaaccctgaacttcagagaaagtttgccatgatcatgctttcctcattacacatcagatagttataaataaccgattgagtaatagctgtttgcttatagctcgtatacccagctacaatccacaccattgattccatctgttgtttctagaaagttcagatctaattgtaatacttgtttcaagtgattgtggtgttttcttcttcctaggagtcaaattgactttatcagctttaatcgatgggaagaacttcagtgcaggaggtcacaaggttggcttgggatttgaactggaagcttaatgtggtttgaggaaagcatcagatttgtccctggaagtgaagagaaatgaacccactatgttttggccttaaaattcttctgtgaaatttcaaaagtgtgaactttttattcttccaaagaattgtaatcctccccacactgaagtctaggggttgcgaatccctcctgagggagatgcttgaaggcatgcctggaagttgtcatgtttgtgccacgtttcagttcagttctgaagtgttattaaatgtgttcctcagcgacagtgtagcgtcatgttagaggagacgatctgacccaccagtttgtacatcacgtcctgcatgtcccacaccattttttcatgaccttgtaatatactggtctctgtgctatagtggaatctttggttttgcatcatagtaaaataaaataaacccatcacatttggaacataa

SEQ ID NO: 64959 - DNA, 1279 bp, Homo sapiens
cggggaggggcggcgcgcaggcgcggctgggggtgcgaggctgcgcaggcgcggacggcgttggtttgaagaccttcagcgttgccctggcggagcagagacaggccctcggggtggaggtctttggtttcataagagcctgagagagatttttctaagatatgtgtaacacaccaacgtactgtgacctaggaaaggctgctaaggatgtcttcaacaaaggatatggctttggcatggtcaagatagacctgaaaaccaagtcttgtagtggagtggaattttctacttctggtcatgcttacactgatacagggaaagcatcaggcaacctagaaaccaaatataaggtctgtaactatggacttaccttcacccagaaatggaacacagacaatactctagggacagaaatctcttgggagaataagttggctgaagggttgaaactgactcttgataccatatttgtaccgaacacaggaaagaagagtgggaaattgaaggcctcctataaacgggattgttttagtgttggcagtaatgttgatatagatttttctggaccaaccatctatggctgggctgtgttggccttcgaagggtggcttgctggctatcagatgagttttgacacagccaaatccaaactgtcacagaataatttcgccctgggttacaaggctgcggacttccagctgcacacacatgtgaacgatggcactgaatttggaggttctatctaccagaaggtgaatgagaagattgaaacatccataaaccttgcttggacagctgggagtaacaacacccgttttggcattgctgctaagtacatgctggattgtagaacttctctctctgtaagaatgtgctgccagattggatctgctcttatgtttgtgtctaagttttcagagaatgttgtgatatgagtgtagtttgcttgttctttattaattttaataagccagctcattgtgtagtgaaaggaatataatgtggccaggctcacgcctgtattcccagcactttgggaggccaaggtgcatgaatcacctgaggtcaggagttcaagaccagcctagccaacaaggtgaaaccctgtctttactaaaaatacaaaaattaggtgggcgtggtaggtgacgcctgtagtcccagctactagggaggctgaggcaggagaattgcttgaaccctgcagatggagaggttgcagtgagccaagatcacaccattgcactccagcctgggtgacagagcgagagcctatctc

SEQ ID NO: 64960 - DNA, 806 bp, Homo sapiens
cggcgagaagacaggccctcggggtggaggtctttggtttcataagagcctgagagagatttttctaagatatgtgtaacacaccaacgtactgtgacctaggaaaggctgctaaggatgtcttcaacaaaggatatggctttggcatggtcaagatagacctgaaaaccaagtcttgtagtggagtggaattttctacttctggtcatgcttacactgatacagggaaagcatcaggcaacctagaaaccaaatataaggtctgtaactatggacttaccttcacccagaaatggaacacagacaatactctagggacagaaatctcttgggagaataaggttggcttgggatttgaactggaagcttaatgtggtttgaggaaagcatcagatttgtccctggaagtgaagagaaatgaacccactatgttttggccttaaaattcttctgtgaaatttcaaaagtgtgaactttttattcttccaaagaattgtaatcctccccacactgaagtctaggggttgcgaatccctcctgagggagatgcttgaaggcatgcctggaagttgtcatgtttgtgccacgtttcagttcagttctgaagtgttattaaatgtgttcctcagcgacagtgtagcgtcatgttagaggagacgatctgacccaccagtttgtacatcacgtcctgcatgtcccacaccattttttcatgaccttgtaatatactggtctctgtgctatagtggaatctttggttttgcatcatagtaaaataaaataaacccatcacatttggaacataa

SEQ ID NO: 64961 - DNA, 562 bp, Homo sapiens
cggggaggggcggcgcgcaggcgcggctgggggtgcgaggctgcgcaggcgcggacggcgttggtttgaagaccttcagcgttgccctggcggagcagagacaggccctcggggtggaggtctttggtttcataagagcctgagagagatttttctaagatatgtgtaacacaccaacgtactgtgacctaggaaaggctgctaaggatgtcttcaacaaaggatatggctttggcatggtcaagatagacctgaaaaccaagtcttgtagtggagtggaattttctacttctggtcatgcttacactgatacagggaaagcatcaggcaacctagaaaccaaatataaggtctgtaactatggacttaccttcacccagaaatggaacacagacaatactctagggacagaaatctcttgggagaataagttggctgaagggttgaaactgactcttgataccatatttgtaccgaacacaggaaagaagagtgggaaattgaaggcctcctataaacggaagtcgagagtacggaagtcgagagtacggaagtcgagagt

SEQ ID NO: 64962 - DNA, 695 bp, Homo sapiens
cggggaggggcggcgcgcaggcgcggctgggggtgcgaggctgcgcaggcgcggacggcgttggtttgaagaccttcagcgttgccctggcggagcagagacaggccctcggggtggaggtctttggtttcataagagcctgagagagatttttctaagatatgtgtaacacaccaacgtactgtgacctaggaaaggctgctaaggatgtcttcaacaaaggatatggctttggcatggtcaagatagacctgaaaaccaagtcttgtagtggagtggaattttctacttctggtcatgcttacactgatacagggaaagcatcaggcaacctagaaaccaaatataaggtctgtaactatggacttaccttcacccagaaatggaacacagacaatactctagggacagaaatctcttgggagaataagggagatgcttgaaggcatgcctggaagttgtcatgtttgtgccacgtttcagttcagttctgaagtgttattaaatgtgttcctcagcgacagtgtagcgtcatgttagaggagacgatctgacccaccagtttgtacatcacgtcctgcatgtcccacaccattttttcatgaccttgtaatatactggtctctgtgctatagtggaatctttggttttgcatcatagtaaaataaaataaacccatcacatttggaacataa

SEQ ID NO: 64963 - DNA, 531 bp, Homo sapiens
cggggaggggcggcgcgcaggcgcggctgggggtgcgaggctgcgcaggcgcggacggcgttggtttgaagaccttcagcgttgccctggcggagcagagacaggccctcggggtggaggtctttggtttcataagagcctgagagagatttttctaagatatgtgtaacacaccaacgtactgtgacctaggaaaggctgctaaggatgtcttcaacaaaggatatggctttggcatggtcaagatagacctgaaaaccaagtcttgtagtggagtggaattttctacttctggtcatgcttacactgatacagggaaagcatcaggcaacctagaaaccaaatataaggtctgtaactatggacttaccttcacccagaaatggaacacagacaatactctagggacagaaatctcttgggagaataagttggctgaagggttgaaactgactcttgataccatatttgtaccgaacacaggaaagcaagagtggaaaggaacgtgtcgacgcggccgcgaatttagta

SEQ ID NO: 64964 - DNA, 1240 bp, Homo sapiens
ttgtgtgtgtgtgtgtataggctttggcatggtcaagatagacctgaaaaccaagtcttgtagtggagtggaattttctacttctggtcatgcttacactgatacagggaaagcatcaggcaacctagaaaccaaatataaggtctgtaactatggacttaccttcacccagaaatggaacacagacaatactctagggacagaaatctcttgggagaataagttggctgaagggttgaaactgactcttgataccatatttgtaccgaacacaggaaagaagagtgggaaattgaaggcctcctataaacgggattgttttagtgttggcagtaatgttgatatagatttttctggaccaaccatctatggctgggctgtgttggccttcgaagggtggcttgctggctatcagatgagttttgacacagccaaatccaaactgtcacagaataatttcgccctgggttacaaggctgcggacttccagctgcacacacatgtgaacgatggcactgaatttggaggttctatctaccagaaggtgaatgagaagattgaaacatccataaaccttgcttggacagctgggagtaacaacacccgttttggcattgctgctaagtacatgctggattgtagaacttctctctctgctaaagtaaataatgccagcctgattggactgggttatactcagacccttcgaccaggagtcaaattgactttatcagctttaatcgatgggaagaacttcagtgcaggaggtcacaaggttggcttgggatttgaactggaagcttaatgtggtttgaggaaagcatcagatttgtccctggaagtgaagagaaatgaacccactatgttttggccttaaaattcttctgtgaaatttcaaaagtgtgaactttttattcttccaaagaattgtaatcctccccacactgaagtctaggggttgcgaatccctcctgagggagatgcttgaaggcatgcctggaagttgtcatgtttgtgccacgtttcagttcagttctgaagtgttattaaatgtgttcctcagcgacagtgtagcgtcatgttagaggagacgatctgacccaccagtttgtacatcacgtcctgcatgtcccacaccattttttcatgaccttgtaatatactggtctctgtgctatagtggaatctttggttttgcatcatagtaaaataaaataaacccatcacatttggaacataa

SEQ ID NO: 64965 - DNA, 1265 bp, Homo sapiens
taagagcctgagagagatttttctaagatatgtgtaacacaccaacgtactgtgacctaggaaaggctgctaaggatgtcttcaacaaaggatatggctttggcatggtcaagatagacctgactgatacagggaaagcatcaggcaacctagaaaccaaatataaggtctgtaactatggacttaccttcacccagaaatggaacacagacaatactctagggacagaaatctcttgggagaataagttggctgaagggttgaaactgactcttgataccatatttgtaccgaacacaggaaagaagagtgggaaattgaaggcctcctataaacgggattgttttagtgttggcagtaatgttgatatagatttttctggaccaaccatctatggctgggctgtgttggccttcgaagggtggcttgctggctatcagatgagttttgacacagccaaatccaaactgtcacagaataatttcgccctgggttacaaggctgcggacttccagctgcacacacatgtgaacgatggcactgaatttggaggttctatctaccagaaggtgaatgagaagattgaaacatccataaaccttgcttggacagctgggagtaacaacacccgttttggcattgctgctaagtacatgctggattgtagaacttctctctctgctaaagtaaataatgccagcctgattggactgggttatactcagacccttcgaccaggagtcaaattgactttatcagctttaatcgatgggaagaacttcagtgcaggaggtcacaaggttggcttgggatttgaactggaagcttaatgtggtttgaggaaagcatcagatttgtccctggaagtgaagagaaatgaacccactatgttttggccttaaaattcttctgtgaaatttcaaaagtgtgaactttttattcttccaaagaattgtaatcctccccacactgaagtctaggggttgcgaatccctcctgagggagatgcttgaaggcatgcctggaagttgtcatgtttgtgccacgtttcagttcagttctgaagtgttattaaatgtgttcctcagcgacagtgtagcgtcatgttagaggagacgatctgacccaccagtttgtacatcacgtcctgcatgtcccacaccattttttcatgaccttgtaatatactggtctctgtgctatagtggaatctttggttttgcatcatagtaaaataaaataaacccatcacatttggaacataa

SEQ ID NO: 64966 - DNA, 1894 bp, Homo sapiens
cggggaggggcggcgcgcaggcgcggctgggggtgcgaggctgcgcaggcgcggacggcgttggtttgaagaccttcagcgttgccctggcggagcagagacaggccctcggggtggaggtctttggtttcataagagcctgagagagatttttctaagatatgtgtaacacaccaacgtactgtgacctaggaaaggctgctaaggatgtcttcaacaaaggatatggctttggcatggtcaagatagacctgaaaaccaagtcttgtagtggagtggaattttctacttctggtcatgcttacactgatacagggaaagcatcaggcaacctagaaaccaaatataaggtctgtaactatggacttaccttcacccagaaatggaacacagacaatactctagggacagaaatctcttgggagaataagttggctgaagggttgaaactgactcttgataccatatttgtaccgaacacaggaaagaagagtgggaaattgaaggcctcctataaacgggattgttttagtgttggcagtaatgttgatatagatttttctggaccaaccatctatggctgggctgtgttggccttcgaagggtggcttgctggctatcagatgagttttgacacagccaaatccaaactgtcacagaataatttcgccctgggttacaaggctgcggacttccagctgcacacacatgtgaacgatggcactgaatttggaggttctatctaccagaaggtgaatgagaagattgaaacatccataaaccttgcttggacagctgggagtaacaacacccgttttggcattgctgctaagtacatgctggattgtagaacttctctctctgctaaagtaaataatgccagcctgattggactgggttatactcagacccttcgaccaggtaagtaaaggaattagtaacagaggggttgaggtggaaggtgatagagaaaacaatgaaaataacctgcagaacaacctgtagtcactgtaagttgatttggaccattctgtaacatttggttgttcagacagaaaacaatacagatcaaatacttttgcattaaaaaagtatgtatttctgactataatgtggtcactttggcctttgagtttggttgatcactcattgcccttaaccctgaacttcagagaaagtttgccatgatcatgctttcctcattacacatcagatagttataaataaccgattgagtaatagctgtttgcttatagctcgtatacccagctacaatccacaccattgattccatctgttgtttctagaaagttcagatctaattgtaatacttgtttcaagtgattgtggtgttttcttcttcctaggagtcaaattgactttatcagctttaatcgatgggaagaacttcagtgcaggaggtcacaaggttggcttgggatttgaactggaagcttaatgtggtttgaggaaagcatcagatttgtccctggaagtgaagagaaatgaacccactatgttttggccttaaaattcttctgtgaaatttcaaaagtgtgaactttttattcttccaaagaattgtaatcctccccacactgaagtctaggggttgcgaatccctcctgagggagatgcttgaaggcatgcctggaagttgtcatgtttgtgccacgtttcagttcagttctgaagtgttattaaatgtgttcctcagcgacagtgtagcgtcatgttagaggagacgatctgacccaccagtttgtacatcacgtcctgcatgtcccacaccattttttcatgaccttgtaatatactggtctctgtgctatagtggaatctttggttttgcatcatagtaaaataaaataaacccatcacatttggaacataa

SEQ ID NO: 64967 - DNA, 939 bp, Homo sapiens
aagcagtagaggcggtgtgaatcggcagagggtaatgttgatatagatttttctggaccaaccatctatggctgggctgtgttggccttcgaagggtggcttgctggctatcagatgagttttgacacagccaaatccaaactgtcacagaataatttcgccctgggttacaaggctgcggacttccagctgcacacacatgtgaacgatggcactgaatttggaggttctatctaccagaaggtgaatgagaagattgaaacatccataaaccttgcttggacagctgggagtaacaacacccgttttggcattgctgctaagtacatgctggattgtagaacttctctctctgctaaagtaaataatgccagcctgattggactgggttatactcagacccttcgaccaggagtcaaattgactttatcagctttaatcgatgggaagaacttcagtgcaggaggtcacaaggttggcttgggatttgaactggaagcttaatgtggtttgaggaaagcatcagatttgtccctggaagtgaagagaaatgaacccactatgttttggccttaaaattcttctgtgaaatttcaaaagtgtgaactttttattcttccaaagaattgtaatcctccccacactgaagtctaggggttgcgaatccctcctgagggagatgcttgaaggcatgcctggaagttgtcatgtttgtgccacgtttcagttcagttctgaagtgttattaaatgtgttcctcagcgacagtgtagcgtcatgttagaggagacgatctgacccaccagtttgtacatcacgtcctgcatgtcccacaccattttttcatgaccttgtaatatactggtctctgtgctatagtggaatctttggttttgcatcatagtaaaataaaataaacccatcacatttggaacataa

SEQ ID NO: 64968 - DNA, 1443 bp, Homo sapiens
cggggaggggcggcgcgcaggcgcggctgggggtgcgaggctgcgcaggcgcggacggcgttggtttgaagaccttcagcgttgccctggcggagcagagacaggccctcggggtggaggtctttggtttcataagagcctgagagagatttttctaagatatgtgtaacacaccaacgtactgtgacctaggaaaggctgctaaggatgtcttcaacaaaggatatggctttggcatggtcaagatagacctgaaaaccaagtcttgtagtggagtggaattttctacttctggtcatgcttacactgatacagggaaagcatcaggcaacctagaaaccaaatataaggtctgtaactatggacttaccttcacccagaaatggaacacagacaatactctagggacagaaatctcttgggagaataagttggctgaagggttgaaactgactcttgataccatatttgtaccgaacacaggaaagaagagtgggaaattgaaggcctcctataaacgggattgttttagtgttggcagtaatgttgatatagatttttctggaccaaccatctatggctgggctgtgttggccttcgaagggtggcttgctggctatcagatgagttttgacacagccaaatccaaactgtcacagaataatttcgccctgggttacaaggctgcggacttccagctgcacacacatgtgaacgatggcactgaatttggaggttctatctaccagaaggtgaatgagaagattgaaacatccataaaccttgcttggacagctgggagtaacaacacccgttttggcattgctgctaagtacatgctggattgtagaacttctctctctgctaaagtaaataatgccagcctgattggactgggttatactcagacccttcgaccaggagtcaaattgactttatcagctttaatcgatgggaagaacttcagtgcaggaggtcacaaggttggcttgggatttgaactggaagcttaatgtggtttgaggaaagcatcagatttgtccctgcactacattcacattgggtccctatgggccgacatgtgccttgatgtccaaaattagtggagtagggtccagttagtgttaaaagcacacgtaatcctccacgccctttagtgggtccctgccccatccgtaaagagggggacgcagggacccaccaggggaagggggcatgccggtttcccgaatcaatttggtttgggcgtgtgaataaaagagtccccagtccccagggtagccccttgtgggcctagccggtttgggtcccctggttgaagatgacgtcttgtatgtgcccccccccctttttgtaacggggtgggattttggttattgaggtatagtgcctttgggggttaaggtttttaataaaatccaattaccccttcacataagaaaa

SEQ ID NO: 64969 - DNA, 974 bp, Homo sapiens
cggggaggggcggcgcgcaggcgcggctgggggtgcgaggctgcgcaggcgcggacggcgttggtttgaagaccttcagcgttgccctggcggagcagagacaggccctcggggtggaggtctttggtttcataagagcctgagagagatttttctaagatatgtgtaacacaccaacgtactgtgacctaggaaaggctgctaaggatgtcttcaacaaaggatatggctttggcatggtcaagatagacctgaaaaccaagtcttgtagtggagtggaattttctacttctggtcatgcttacactgatacagggaaagcatcaggcaacctagaaaccaaatataaggtctgtaactatggacttaccttcacccagaaatggaacacagacaatactctagggacagaaatctcttgggagaataagttggctgaagggttgaaactgactcttgataccatatttgtaccgaacacaggaaagaagagtgggaaattgaaggcctcctataaacgggattgttttagtgttggcagtaatgttgatatagatttttctggaccaaccatctatggctgggctgtgttggccttcgaagggtggcttgctggctatcagatgagttttgacacagccaaatccaaactgtcacagaataatttcgccctgggttacaaggctgcggacttccagctgcacacacatgtgtgagtgtttataatttattccttagtatcagtgcagttgcccaaaatattgtagccattagcatgctgagaagtgatggtactcagatttagcatgccttggtgaatatccatccttgcggtgctatcctcatagcaaaaccttgccaggaggctggtgcacgtggtgtgcaggctgtgctgctggtggtcactggcccctcagcctgcaccccaaacttgaggaagctccagcctctgtagaagaaccactgggatagag

SEQ ID NO: 64970 - DNA, 910 bp, Homo sapiens
ggtgatttggaaaaccagaacaggaagtgtaacttacaggatttccaaaatcacctgtgaatgaagtggaaatcctgtaagttacacttcctgttctggttttgttttgttttttgtttcctttggctgattcctgctgagtgaggccagttcctcatcaggctcagggcaggtgccttttcaggcgtggcctcctttccatctagcacagcatctttgtctctgttctgtctcctccaaatccaagatgattttaattagtacagacatgtacagtctacaattaaagagtgatttgtactaatatgattttgattcttcctcctctttgctgtcctttcaagacacttgctggaaaaagctttaatgcacttagttttcctttaggttttctatgactcagatgtaaaggactttctctgtacagtatattatccaatgcatgtttgttctctctcctgatatattgaacaccacacagttgtgaagccgtgcagtggggatgccccacaccccacagaggcatctacccctgtgtataaggaaagacattttcctttgctgtacttgcttgagcagttttattgtctgtacatgtgagctgtgtgagatagatgtgaaaagttcaaatgaatgcattttcctgccccatgtatacagattgtcatctgtacaaggaactgtatgtatgaaagcaaatgtacttatttataaatggctaacacttggaaaaaaaacaaagaaaagaatagaaaaaaaaaaaaaagggggggggaaaaattccggggggcattcgacactttgaaaggggcataaggggtataaaaagggggggggaacaggggaaaggtggttgggaacattgggtgtggacccgaaaagggaaagatggggctggtgttagaaagac

SEQ ID NO: 64971 - DNA, 558 bp, Homo sapiens
gtgagtttgtttaaaggtgaattttcaatagatttattattattgtctccaaatattgtgaggcaatttaaatgtgtctttattcattatttttctttagaacttttctttatggaaaaggtggcaaaaatcattattcttagaagtaaagtagcaattacattaatgaaacacaaggatatgtcacgtttaacatggagcgctggagaggaccagaaccacctatcctcaatctttgttctctgcccttagccctaacagctgcagccggaaggggcaaactggaggtgtgccgtttgctcttggaacaaggggcggcagtggcccagccaaaccgccgaggagcagtgccactattcagcacagtgcgccagggccactggcaggtaagcagggcgaccacttccagtccctcaggcaggactgagttctaggtgaggacttctgatgcacagagcaaaatgatcacaagtaaagtttgggttacccagcagtgatcaggtttgaggacttggacctttgttatgagtattctggttaattgagaatacgacagtt

SEQ ID NO: 64972 - DNA, 675 bp, Homo sapiens
  misc_feature (166)..(166): n is a, c, g, or t
agggatttaggattgcgaaatgttgagaagctagataggtcggggttgttcggtattaagacaggtggagaaaggggaatgtggtgcaaggtgattagttgcggtaaggatacgggtttcataagtcacgaagttgtaaagggcgcgctagtgaattgtattttgnttttttaaaacgactggaatctgttttattgaaagcttataggatgaacttttaacagttgagatacaactggcataccagcatcagtcttaaaatggaaatagtccagaaacgagcagtgttctttgcaggagcatgccccttcagcgtacttcccctcctgctgtgtgattccatgtctcctcagccctgtgctatcacttgcctttgcaggtgcctccattgctcttatggacaaagaaggattgacagccctcagctgggcttgtttgaagggccatctctcagtagtacgttctctggtggataacggagctgccacagaccatgctgacaagaatggccgtaccccactggatctggcagctttctatggcgatgctgaggtggtaagtacctttaaacaagcctcaagagagcagagagaggggctattctccatccatactacctggggttgaaagtggagtgatgtattgatgattcctgatacagagctctcagatcta

SEQ ID NO: 64973 - DNA, 8893 bp, Homo sapiens
  misc_feature (772)..(772): n is a, c, g, or t
  misc_feature (872)..(872): n is a, c, g, or t
  misc_feature (911)..(911): n is a, c, g, or t
  misc_feature (917)..(917): n is a, c, g, or t
  misc_feature (3770)..(3770): n is a, c, g, or t
  misc_feature (3948)..(3948): n is a, c, g, or t
  misc_feature (4169)..(4169): n is a, c, g, or t
  misc_feature (4202)..(4202): n is a, c, g, or t
gtgagtttgtttaaaggtgaattttcaatagatttattattattgtctccaaatattgtgaggcaatttaaatgtgtctttattcattatttttctttagaacttttctttatggaaaaggtggcaaaaatcattattcttagaagtaaagtagcaattacattaatgaaacacaaggatatgtcacgtttaacatggagcgctggagaggaccagaaccacctatcctcaatctttgttctctgcccttagccctaacagctgcagccggaaggggcaaactggaggtgtgccgtttgctcttggaacaaggggcggcagtggcccagccaaaccgccgaggagcagtgccactattcagcacagtgcgccagggccactggcagattgttgatcttttactcacccatggagctgatgtcaacatggcagacaagcagggccgcactcccctgatgatggctgcttccgaaggccatctaggaaccgtggactttctgcttgcacaaggtgcctccattgctcttatggacaaagaaggattgacagccctcagctgggcttgtttgaagggccatctctcagtagtacgttctctggtggataacggagctgccacagaccatgctgacaagaatggccgtaccccactggatctggcagctttctatggcgatgctgaggtggtccagttcctggtagatcatggggccatgatcgagcacgttgactacagtggaatgcgccctttggatagggcagtggggtgccngaacacttctgttgttgtcactcttctgaagaaaggagccaagataggttgtcagacgttccgagtcgcccacgaggtccagccacatgggcgatggccncctccaagccagacatcatgatcatcctgttgagcaagntgatgnaagagggggacatgttttataagaaaggtaaagtaaaggaagctgcccagcgctaccagtacgccctgaagaagttccctagagaagggtttggtgaggacttgaaaactttccgggaactaaaggtgtctctcctcctcaacctctctcggtgtcgcaggaaaatgaacgattttggaatggcggaggaatttgctactaaggccctggagctgaaaccgaaatcttatgaagcttactatgcgagagcaagggcaaaacgcagcagcagacagttcgcagcagccttagaggacctgaacgaggccatcaagctgtgtcccaacaaccgtgagatccagagacttctgctgagagtggaagaagagtgtagacagatgcagcagccacagcagccaccgccgccaccgcagcctcagcagcagttgccggaagaagcagaacctgagccacagcatgaagacatatactctgtacaggatatattcgaggaggagtacctggaacaggatgttgaaaatgtttccattggcctccagacagaggcccggcccagccaggggctcccggtcatccagagcccaccctcctctcccccgcatcgggactcagcctacatctccagctcacctcttggctctcatcaggtttttgacttccggtccagtagttctgtaggctctcccactagacagacctatcagtccacctcacctgccctttctccaactcatcagaactcacattacaggcctagcccaccacacacttccccggctcatcagggaggatcttaccgtttcagcccccctcctgtgggaggacagggcaaagaatacccaagccctcccccttcccctctccggagaggccctcagtatcgggccagccctccagctgaaagtatgagtgtctatagatcccagtctggttcacccgtgcgctatcagcaggaaacaagcgtcagtcagcttcctggcagacccaaatctccattatccaaaatggcccagcggccctaccagatgcctcagctccctgtggcagttccccagcaagggctcaggctacagcctgccaaggcccagattgtgagaagtaaccagcccagcccagccgtccattcaagcaccgtcatccccacaggagcctatggccaagtagcccattcaatggccagtaaataccagtcttcacaaggagacataggagtcagccagagccggttggtttatcaagggtcaattgggggaatcgtaggggatggaaggccggtgcagcatgtccaagccagcctgagtgcaggcgccatctgtcagcatggaggattgaccaaagaggatcttccacagcgaccttcctcagcataccgaggtggcgtgagatacagccagacaccacagatcggacgcagccagtcagcatcctattacccagtctgtcactcaaaactagatctggagcgctcctccagccaactaggttcccctgatgtgtcgcatttaatcagaagacctatcagtgtcaaccctaacgaaatcaaaccgcacccgccaactcccaggccgttgctgcattcccaaagtgtaggccttcgcttctctccatctagcaatagtatctcctccacctccaacctaactccgaccttccggccatcttcttccatccagcaaatggagatcccactgaaacctgcatatgagaggtcatgtgacgagctgtcgccagtgtctccaactcaaggaggttaccccagtgagcccacccgatccaggaccacaccattcatggggatcatagataaaacagcacggactcagcagtacccccacctccaccagcagaatcggacctgggcagtgtcatctgtggacaccgtcctcagtcccacgtctccaggcaacctgcctcagcctgagtccttcagtccaccatcatccatcagcaacattgccttttataacaaaaccaacaatgcacagaatggccatttgctggaggacgattattacagcccccatgggatgctggctaacgggtctcgtggagacctcttggagcgagtcagccaggcctcctcctatcccgacgtgaaggtagctcggactctacctgtggctcaggcataccaggacaacctgtacaggcagctgtcccgagactctcggcaagggcagacatcccctatcaaaccaaagagaccgttcgtggagtctaatgtttaaaagacgttttgttggagtgagacccatatgttttcactgcacattttcaggcttggtttccacattcgaggtagttctctggcttaatttctcatgtagtttctgtgtggtgttcagaggtggcagcccacatgctgaaatcctttgcatgcagccgactgggaagcggcctcccgggagccaggacttcagtttctcttgtctgtgcccagccacatgctctctccctctcttcagatgccaacgaggagattttcgtgctgtgtgctttaacccagggagatcagacacactggtcagctttttccaggagacaatcgctttcactgatgttcttgttgtgtaattgtctttttccttttttaaaaaataaggtgttcttgttcgttttcttctagaaactttagaaagagtgcgatgcccctttgcctttgcatccttagccagtgtcacccacacagccagccgcagcgcattctcatgctgtggcccctccccagaccgccagcgccctgcagccaccaggtctgcagtgtgcattaggattattgctggtcttcctagggggtaaaaggatcagagagagaagaattaagtgctaaattggaagaaaaccccaatatanttatgtaaaatgtcactacattgattttccaagaggcattgtaggaacatgtcaaaaacagccagccctttaaatattgcagtcagccaaggaaattagatgagaattgtggctattaagagaattcactgagagttattctctagatttttagccgacaattaaccactaaaagctnctgcttttccagggtgggggagggaatgaatacatagaaaaacaaaaaagattgttctggattctcagtgaaaggctataggaagtctgttctggagacatctactttttagatcctgatacatcactgagtgtcatactccactaaaaggaaactctaaccgaaggctggctggtgtgacaatcccgttagttggatcttcacctacagccagattttgntctagtggccctcttcctgtaaacccagatggngtcatacagaaattgtttctttcagaagcagattggaatctcttgggaccatgagactgagtcccaatatttccacccagggtcatgcccgttgttgtctacttccattttgagatctatagtttgattatctattattacaggaactgtttcttttctttttctaggagtgtttatgagagtgtgatattttaaagtcagacgcagcaaaaactgtttcagggtgaagaaagacccctttcagccctgttttgcagccctgggtgggggcatgagatagacagcaagcttctgatcttgaagcttgtctagaagacacatcttctaggtctcgtggtcatttggtaggctgacctttgagtgagcgaggccactattgagtggatagcaagaacattggaaccaaagcctcggcacaggcctggcactggctgtacatcagctcttacaactaaacaactcaactaagcaactgaaacgaaacaaaggagcattcgttctctgttgttaggaatcattctgctctgttagggaagggctgcaggaagggcagtttcctgaataaaaatctggctgcgaccagtcccatgtgtctggtaagtaagtaagtaagtaagtgccctttgaagggatcattaagacacagggagcatgaacctgagatcagaagcatttctttactaatttagattctgcgaaatagacggacctctccacccccaaacctaaaacaggccaggacttgtctctgtgctgaaagcaaatagcaagactaactcaagccccagcctctttccacactccctgatacctaaggactgctttctcagctagaccagggtgggcatcagcgacgccttctcagctagaccagggtaggcatcagcgtcctctctccatctctatacccctctctctcacatcaggaagatgaaatgtgtagctctagcggcaacctctagccaggagcccagtggcctctcagattgctttttggccaggtctcagcactgctggcatctttacatcttactccttaaaaccgcctctcgctgaggagccactgcattttgaagaatttctcagtgtctgtcaggaaagtgctcctgctcatttggaacgccacacaccacccgcactcacctgtccaggcgaatgagcaggtcctgtagctttacaaatatgccgctgatgccgcttctccccagggtctctcagttttccaggacaaaaagatttagggcctataccctatgggcaaaacacctaaaatgtcaacagtcaaaatgccattctttttggccatcataagagggagtaggtatcactgctgcatgccagttgtttttgactagaatatgccaaccagagcttgttggggcaggagacgtttttccttacaagcagactgcctgtgccctgtgccctgtttgctacttcactgccatggaatgatccgagtactgtatttcagagctgccccttccccagcagcaaacactcgctgagtccatgtctggcttcaggtgggaggaaatgtttcagatgaaacttactcaattcataccaccctgaaatggaggacagaggtgacaaacttcagtttaataggtttctcaccaagttgtatgttccattggcccaggattcttgcactaatgggtttctatcacatcatgtctataaatgggtgcactttactgtttgaatttgtaactgaagtactggatatttaagtgtgagtaatgtcttcattagaaaatagcagaaccgctcttgtcttttagtgtatttttcaagaaaaaaggaaaggaaagacatcaagcagtggatcacaacatttatagcacaagaaataacttgtatataagcatcaaaaagattaagaattttttaatatgaaaaatatttgcagtgattttaaagtgcttttccagcaatgttcttagggactcctgagacacggttactttatctactggatcagtaaggcacacaattaacaattaacaattaatgtttatttacaaagtaaagggaaaacctgtgtaacatgagaatttggcatgacaaaatggagaccattttgtatctgctgttgtatcttgtccgggttgcagacgtgcactattaaagtcccaagttaatagagcacaaacccttctcgctcctcccccatgtgcccctctttttagatgtgtataacttaaactcgatggctcaggaaaattccactaattagaatcatgtacagtaccccaggtcgttgtccagatatacaagtttgctaatgtagttaagcctggattattaaacacttttcctaaattattgtaaacagaacagcttagagaaaggtattctcagtccttaatattgtatagtagtttatgagcccctctctaaatattggtatttttatattccagagatgtacccaatagaaaaaattaaaaattaatcagtatctaatttaatatccataagtatttttccttagattttagtcacgtacagtgggctatgtggatgtcacttgtgcttcaccatagtttaccactaggtgtcactgtggctctgcactgcgcttgttttgtagcaaagaacagcggcatcccctcgggagagaggagctgcttccaggcaacaggcaagcgggctcagaggttcaggagaaggcaacagaggcctggaaggggtcttcgtgcatctgtgccagttgtgcaagacgaactctttgaacactacatgctttggacttcagccaggcagaggctggaagaaggttgaccagagctcccttgctctggtagagggatgggtacatggagaagccccttcttccccatgagcctccctcctgtcagttcctctcagcctccagcttttataactccagaagcgtcacagttgggtggtttgattcagagagagttatttttctactgcagaaatgccttggacaaaaccagtgctcactgaatctttgccacaaaatggaataggctatcccagggggcaagaggtgcccgcccctgtgcccagcctcctcttgatgctcccagtgcccagcagcctcgcacaccctgcctgtctgttcctgggctgcccatttctcaagaaaccgacctgcaaaggcagccggctgctgcctccacaccgagggctgtgcggtcctgctgctcgctcactgggaggtgcagctctttctcctcttcctctaggaattccagaccgaccatctaccatgactaacaacaatgaacaaagggcttaggggcaagagctacctgcaaagacgtgtcatggaacccttcaccatgcaatgccttgaactcagctctggctgctcccaagaaaaggtggctggctgggggcctggacacaagcacaatggggctggtggagccactgtgcagagctacttgaataatcactgggttttcatcaactccttttgtcatacagaccactcaagggctgaagtgttggtaaccttcatttcggtgtccaaagcctcacagcaggtgagccaccctgagatgcttgtggccacatggtggccacagtcagagctttgaaagtcagtaccaaatgaacgcataattggacaccaaaaatcaagtgttactttcatgtttcctcaccccatcatctcattgcctcctgctgactctgataccgacgctgagctgacttgccaggctgccgctggacgcgtagagatcaggccagcgccgcgctcatttttccaggtagacctactctgtggaacggaagtgccctagctgctttgtttttgtagcacttgctggctgaatttttcttttgctaatcgctaaccagaaagtctggttagagggggctcaactcaatccctttggtccccagcgccagacaagagttaattctggaaaattcagtacttgaatgtacctgccttattgcataccaatttactggggggaaaaaaaaagttaagagatgccggctccagatctccacttcattcacaggtgattttggaaatcctgtaagttacacttcctgttctggttttgttttgttttttgtttcctttggctgattcctgctgagtgaggccagttcctcatcaggctcagggcaggtgccttttcaggcgtggcctcctttccatctagcacagcatctttgtctctgttctgtctcctccaaatccaagatgattttaattagtacagacatgtacagtctacaattaaagagtgatttgtactaatatgattttgattcttcctcctctttgctgtcctttcaagacacttgctggaaaaagctttaatgcacttagttttcctttaggttttctatgactcagatgtaaaggactttctctgtacagtatattatccaatgcatgtttgttctctctcctgatatattgaacaccacacagttgtgaagccgtgcagtggggatgccccacaccccacagaggcatctacccctgtgtataaggaaagacattttcctttgctgtacttgcttgagcagttttattgtctgtacatgtgagctgtgtgagatagatgtgaaaagttcaaatgaatgcattttcctgccccatgtatacagattgtcatctgtacaaggaactgtatgtatgaaagcaaatgtacttatttataaatggctaacacttggaaaaa

SEQ ID NO: 64974 - DNA, 9228 bp, Homo sapiens
  misc_feature (3746)..(3746): n is a, c, g, or t
  misc_feature (3846)..(3846): n is a, c, g, or t
  misc_feature (3885)..(3885): n is a, c, g, or t
  misc_feature (3891)..(3891): n is a, c, g, or t
  misc_feature (6744)..(6744): n is a, c, g, or t
  misc_feature (6922)..(6922): n is a, c, g, or t
  misc_feature (7143)..(7143): n is a, c, g, or t
  misc_feature (7176)..(7176): n is a, c, g, or t
gtaatttgctctaacagagggtgaactaaactgcgccacagagaaaaattgtgtaaaaatatttcttttatcctaatggaatcatacaacctatatttgctgcagtattctgaaaggacaagcttatgtcaaccaatctaatgaaaagaactcgtctgtgtaatctcttgaaatcattagttgttcaaaacagaataccacagtgcttctctggatacaaaaagaagcaggtgatgttgttaggggttctaaacccctttgggagcatctcttgtgctttgggaccataatcaacatctgctataagaagtatcacctgtaacgcacagtgatgctgaacaggagcttggcccccctccatctgtagatgaggcagcaaacacactcatgactcgtctgggtttcctccttggagagaaagtcacagaagttcagccaggtgaccaatacagcatggaagtacaggatgaaaatcagacctcagcaatcacccagcggataagtccttgttccactctgactagcagcactgcctctccaccagccagtagcccctgctctacactcccacccatcagtacaaatgcaactgccaaggactgcagctatggggctgttactagtccaacctctacccttgaaagcagagatagtggcatcattgctacattaacaagctattctgaaaatgtggaacgcacaaaatatgctggggaaagcagtaaagaattaggatctggaggaaacataaaaccttggcaatctcaaaaatccagcatggactcctgtttgtatcgagtagatgaaaacatgactgcttccacctatagtctgaataagatcccagagagaaatttggaaacagtgttatctcaatcagtacagtctattcctttgtatctcatgccacggccaaattcagtagcagccaccagctctgcccacttggaagaccttgcttacctggatgagcagagacatacacctttgagaacttctctacgaatgccaagacagagcatgggtggtgctcgcacacagcaggatttaagagttcgctttgcaccttataggcctccagatatctccttgaagcctctgctctttgaagtgcccagcatcactacagagtcagtgtttgttggccgagattgggttttccacgaaatagatgctcaacttcaaagttcaaatgccagcgtgaaccaaggagtagtgattgtgggaaacattggattcggcaaaactgccatcatctccagactggtggccctcagctgccatggtacaaggatgagacagatcgcctcagacagcccacatgcctcccccaaacatgtggatgccaacagagagctgccactcacacagccaccttcagcccactcatctatcaccagtggaagctgcccaggaactccggaaatgcgcaggcggcaggaggaggctatgcgaagactagcctcgcaggtggttgcctatcactattgtcaagcagataatgcctacacttgcttggtgccagaatttgtccacaatgttgctgccttgctctgccgctcacctcagctgacagcctatcgggagcagcttcttcgggaacctcacctgcagagcatgctgagccttcgttcctgtgttcaagaccccatggcctccttccggaggggagttctggagccactagaaaatctccataaagagagaaaaatcccagatgaagatttcatcattttaattgatggattaaatgaagcagaatttcacaaaccggattatggggatacaattgtatcgtttctgagtaaaatgatcggaaagtttccttcttggctcaaactaattgtaacagttaggaccagtttacaggaaattaccaagctgctgcctttccataggatttttttggatcgactagaagagaatgaagccatagaccaggacctgcaggcttacatcctgcaccggatacacagcagctcagagatccagaataacatttcacttaatggcaaaatggacaatactacatttggcaaactcagttctcatctcaagaccctcagtcaagggtcctatctatatctgaaacttacatttgacctcatagagaaaggctatctagtgttaaagagctctagctacaaagtagttcctgtttcgctctcagaggtttatttactccagtgcaatatgaagttcccaacccagtcttcctttgaccgggtgatgcctctcctgaatgtggcagtggcctctctccacccactgactgatgagcatatcttccaggccatcaatgctgggagcattgaaggcacactagaatgggaggattttcagcagagaatggagaacctctccatgttcctaatcaagcgcagagacatgactcgtatgtttgtacatccttcttttcgagaatggcttatctggagagaagaaggagagaaaaccaaatttctctgtgatccgaggagtggtcacacgttacttgccttctggttttcccgccaagagggaaaactaaaccgacagcagactattgaactgggacatcacatcctcaaagcacacatttttaagggtttgagtaaaaaagttggtgtatcatcctccatcctccaaggtctctggatctcttatagcacagaaggtctttccatggcactggcgtctttacgaaatctctacactccaaatataaaggtcagccgactgctgattttgggaggtgccaatattaattaccggacagaggttttaaataatgctccaattctatgtgttcagtcccatcttggttacacagaaatggtagccctgctgctggagttcggggccaacgtggatgcctcttctgaaagtggcctgactcccctgggatatgctgcagcagcagggtacctgagcattgtggtgctgctgtgcaagaaacgggccaaggtggatcatttggataagaacgggcagtgtgctttggttcatgctgcactccgaggtcatctggaggttgtcaagtttttgattcagtgtgactggacgatggccggccagcagcaaggagtatttaagaagagccatgccatccaacaggccctcattgctgcagccagcatgggttatactgagattgtctcctacctacttgatcttccagaaaaagatgaagaggaagtagagcgagcacagatcaacagctttgacagtctctggggagagacagccctaacagctgcagccggaaggggcaaactggaggtgtgccgtttgctcttggaacaaggggcggcagtggcccagccaaaccgccgaggagcagtgccactattcagcacagtgcgccagggccactggcagattgttgatcttttactcacccatggagctgatgtcaacatggcagacaagcagggccgcactcccctgatgatggctgcttccgaaggccatctaggaaccgtggactttctgcttgcacaaggtgcctccattgctcttatggacaaagaaggattgacagccctcagctgggcttgtttgaagggccatctctcagtagtacgttctctggtggataacggagctgccacagaccatgctgacaagaatggccgtaccccactggatctggcagctttctatggcgatgctgaggtggtccagttcctggtagatcatggggccatgatcgagcacgttgactacagtggaatgcgccctttggatagggcagtggggtgccngaacacttctgttgttgtcactcttctgaagaaaggagccaagataggttgtcagacgttccgagtcgcccacgaggtccagccacatgggcgatggccncctccaagccagacatcatgatcatcctgttgagcaagntgatgnaagagggggacatgttttataagaaaggtaaagtaaaggaagctgcccagcgctaccagtacgccctgaagaagttccctagagaagggtttggtgaggacttgaaaactttccgggaactaaaggtgtctctcctcctcaacctctctcggtgtcgcaggaaaatgaacgattttggaatggcggaggaatttgctactaaggccctggagctgaaaccgaaatcttatgaagcttactatgcgagagcaagggcaaaacgcagcagcagacagttcgcagcagccttagaggacctgaacgaggccatcaagctgtgtcccaacaaccgtgagatccagagacttctgctgagagtggaagaagagtgtagacagatgcagcagccacagcagccaccgccgccaccgcagcctcagcagcagttgccggaagaagcagaacctgagccacagcatgaagacatatactctgtacaggatatattcgaggaggagtacctggaacaggatgttgaaaatgtttccattggcctccagacagaggcccggcccagccaggggctcccggtcatccagagcccaccctcctctcccccgcatcgggactcagcctacatctccagctcacctcttggctctcatcaggtttttgacttccggtccagtagttctgtaggctctcccactagacagacctatcagtccacctcacctgccctttctccaactcatcagaactcacattacaggcctagcccaccacacacttccccggctcatcagggaggatcttaccgtttcagcccccctcctgtgggaggacagggcaaagaatacccaagccctcccccttcccctctccggagaggccctcagtatcgggccagccctccagctgaaagtatgagtgtctatagatcccagtctggttcacccgtgcgctatcagcaggaaacaagcgtcagtcagcttcctggcagacccaaatctccattatccaaaatggcccagcggccctaccagatgcctcagctccctgtggcagttccccagcaagggctcaggctacagcctgccaaggcccagattgtgagaagtaaccagcccagcccagccgtccattcaagcaccgtcatccccacaggagcctatggccaagtagcccattcaatggccagtaaataccagtcttcacaaggagacataggagtcagccagagccggttggtttatcaagggtcaattgggggaatcgtaggggatggaaggccggtgcagcatgtccaagccagcctgagtgcaggcgccatctgtcagcatggaggattgaccaaagaggatcttccacagcgaccttcctcagcataccgaggtggcgtgagatacagccagacaccacagatcggacgcagccagtcagcatcctattacccagtctgtcactcaaaactagatctggagcgctcctccagccaactaggttcccctgatgtgtcgcatttaatcagaagacctatcagtgtcaaccctaacgaaatcaaaccgcacccgccaactcccaggccgttgctgcattcccaaagtgtaggccttcgcttctctccatctagcaatagtatctcctccacctccaacctaactccgaccttccggccatcttcttccatccagcaaatggagatcccactgaaacctgcatatgagaggtcatgtgacgagctgtcgccagtgtctccaactcaaggaggttaccccagtgagcccacccgatccaggaccacaccattcatggggatcatagataaaacagcacggactcagcagtacccccacctccaccagcagaatcggacctgggcagtgtcatctgtggacaccgtcctcagtcccacgtctccaggcaacctgcctcagcctgagtccttcagtccaccatcatccatcagcaacattgccttttataacaaaaccaacaatgcacagaatggccatttgctggaggacgattattacagcccccatgggatgctggctaacgggtctcgtggagacctcttggagcgagtcagccaggcctcctcctatcccgacgtgaaggtagctcggactctacctgtggctcaggcataccaggacaacctgtacaggcagctgtcccgagactctcggcaagggcagacatcccctatcaaaccaaagagaccgttcgtggagtctaatgtttaaaagacgttttgttggagtgagacccatatgttttcactgcacattttcaggcttggtttccacattcgaggtagttctctggcttaatttctcatgtagtttctgtgtggtgttcagaggtggcagcccacatgctgaaatcctttgcatgcagccgactgggaagcggcctcccgggagccaggacttcagtttctcttgtctgtgcccagccacatgctctctccctctcttcagatgccaacgaggagattttcgtgctgtgtgctttaacccagggagatcagacacactggtcagctttttccaggagacaatcgctttcactgatgttcttgttgtgtaattgtctttttccttttttaaaaaataaggtgttcttgttcgttttcttctagaaactttagaaagagtgcgatgcccctttgcctttgcatccttagccagtgtcacccacacagccagccgcagcgcattctcatgctgtggcccctccccagaccgccagcgccctgcagccaccaggtctgcagtgtgcattaggattattgctggtcttcctagggggtaaaaggatcagagagagaagaattaagtgctaaattggaagaaaaccccaatatanttatgtaaaatgtcactacattgattttccaagaggcattgtaggaacatgtcaaaaacagccagccctttaaatattgcagtcagccaaggaaattagatgagaattgtggctattaagagaattcactgagagttattctctagatttttagccgacaattaaccactaaaagctnctgcttttccagggtgggggagggaatgaatacatagaaaaacaaaaaagattgttctggattctcagtgaaaggctataggaagtctgttctggagacatctactttttagatcctgatacatcactgagtgtcatactccactaaaaggaaactctaaccgaaggctggctggtgtgacaatcccgttagttggatcttcacctacagccagattttgntctagtggccctcttcctgtaaacccagatggngtcatacagaaattgtttctttcagaagcagattggaatctcttgggaccatgagactgagtcccaatatttccacccagggtcatgcccgttgttgtctacttccattttgagatctatagtttgattatctattattacaggaactgtttcttttctttttctaggagtgtttatgagagtgtgatattttaaagtcagacgcagcaaaaactgtttcagggtgaagaaagacccctttcagccctgttttgcagccctgggtgggggcatgagatagacagcaagcttctgatcttgaagcttgtctagaagacacatcttctaggtctcgtggtcatttggtaggctgacctttgagtgagcgaggccactattgagtggatagcaagaacattggaaccaaagcctcggcacaggcctggcactggctgtacatcagctcttacaactaaacaactcaactaagcaactgaaacgaaacaaaggagcattcgttctctgttgttaggaatcattctgctctgttagggaagggctgcaggaagggcagtttcctgaataaaaatctggctgcgaccagtcccatgtgtctggtaagtaagtaagtaagtaagtgccctttgaagggatcattaagacacagggagcatgaacctgagatcagaagcatttctttactaatttagattctgcgaaatagacggacctctccacccccaaacctaaaacaggccaggacttgtctctgtgctgaaagcaaatagcaagactaactcaagccccagcctctttccacactccctgatacctaaggactgctttctcagctagaccagggtgggcatcagcgacgccttctcagctagaccagggtaggcatcagcgtcctctctccatctctatacccctctctctcacatcaggaagatgaaatgtgtagctctagcggcaacctctagccaggagcccagtggcctctcagattgctttttggccaggtctcagcactgctggcatctttacatcttactccttaaaaccgcctctcgctgaggagccactgcattttgaagaatttctcagtgtctgtcaggaaagtgctcctgctcatttggaacgccacacaccacccgcactcacctgtccaggcgaatgagcaggtcctgtagctttacaaatatgccgctgatgccgcttctccccagggtctctcagttttccaggacaaaaagatttagggcctataccctatgggcaaaacacctaaaatgtcaacagtcaaaatgccattctttttggccatcataagagggagtaggtatcactgctgcatgccagttgtttttgactagaatatgccaaccagagcttgttggggcaggagacgtttttccttacaagcagactgcctgtgccctgtgccctgtttgctacttcactgccatggaatgatccgagtactgtatttcagagctgccccttccccagcagcaaacactcgctgagtccatgtctggcttcaggtgggaggaaatgtttcagatgaaacttactcaattcataccaccctgaaatggaggacagaggtgacaaacttcagtttaataggtttctcaccaagttgtatgttccattggcccaggattcttgcactaatgggtttctatcacatcatgtctataaatgggtgcactttactgtttgaatttgtaactgaagtactggatatttaagtgtgagtaatgtcttcattagaaaatagcagaaccgctcttgtcttttagtgtatttttcaagaaaaaaggaaaggaagaggaagaagaaggagaaagaagaagaagaagaagaactaagaagaactaagaagaaggagaagaagagggagagaagaaagaagaaaaggagaaggaagaagaagaactaagaagaaggaggaagaaagaaggagaaggaagaagagagaaggagaaggaagaaggagaggagaagaaggaagaaggagaaggaagaggaggaagaactaaagaaggagaaggaagaggaagaagg

SEQ ID NO: 64975 - DNA, 3597 bp, Homo sapiens
gtaatttgctctaacagagggtgaactaaactgcgccacagagaaaaattgtgtaaaaatatttcttttatcctaatggaatcatacaacctatatttgctgcagtattctgaaaggacaagcttatgtcaaccaatctaatgaaaagaactcgtctgtgtaatctcttgaaatcattagttgttcaaaacagaataccacagtgcttctctggatacaaaaagaagcaggtgatgttgttaggggttctaaacccctttgggagcatctcttgtgctttgggaccataatcaacatctgctataagaagtatcacctgtaacgcacagtgatgctgaacaggagcttggcccccctccatctgtagatgaggcagcaaacacactcatgactcgtctgggtttcctccttggagagaaagtcacagaagttcagccaggtgaccaatacagcatggaagtacaggatgaaaatcagacctcagcaatcacccagcggataagtccttgttccactctgactagcagcactgcctctccaccagccagtagcccctgctctacactcccacccatcagtacaaatgcaactgccaaggactgcagctatggggctgttactagtccaacctctacccttgaaagcagagatagtggcatcattgctacattaacaagctattctgaaaatgtggaacgcacaaaatatgctggggaaagcagtaaagaattaggatctggaggaaacataaaaccttggcaatctcaaaaatccagcatggactcctgtttgtatcgagtagatgaaaacatgactgcttccacctatagtctgaataagatcccagagagaaatttggaaacagtgttatctcaatcagtacagtctattcctttgtatctcatgccacggccaaattcagtagcagccaccagctctgcccacttggaagaccttgcttacctggatgagcagagacatacacctttgagaacttctctacgaatgccaagacagagcatgggtggtgctcgcacacagcaggatttaagagttcgctttgcaccttataggcctccagatatctccttgaagcctctgctctttgaagtgcccagcatcactacagagtcagtgtttgttggccgagattgggttttccacgaaatagatgctcaacttcaaagttcaaatgccagcgtgaaccaaggagtagtgattgtgggaaacattggattcggcaaaactgccatcatctccagactggtggccctcagctgccatggtacaaggatgagacagatcgcctcagacagcccacatgcctcccccaaacatgtggatgccaacagagagctgccactcacacagccaccttcagcccactcatctatcaccagtggaagctgcccaggaactccggaaatgcgcaggcggcaggaggaggctatgcgaagactagcctcgcaggtggttgcctatcactattgtcaagcagataatgcctacacttgcttggtgccagaatttgtccacaatgttgctgccttgctctgccgctcacctcagctgacagcctatcgggagcagcttcttcgggaacctcacctgcagagcatgctgagccttcgttcctgtgttcaagaccccatggcctccttccggaggggagttctggagccactagaaaatctccataaagagagaaaaatcccagatgaagatttcatcattttaattgatggattaaatgaagcagaatttcacaaaccggattatggggatacaattgtatcgtttctgagtaaaatgatcggaaagtttccttcttggctcaaactaattgtaacagttaggaccagtttacaggaaattaccaagctgctgcctttccataggatttttttggatcgactagaagagaatgaagccatagaccaggacctgcaggcttacatcctgcaccggatacacagcagctcagagatccagaataacatttcacttaatggcaaaatggacaatactacatttggcaaactcagttctcatctcaagaccctcagtcaagggtcctatctatatctgaaacttacatttgacctcatagagaaaggctatctagtgttaaagagctctagctacaaagtagttcctgtttcgctctcagaggtttatttactccagtgcaatatgaagttcccaacccagtcttcctttgaccgggtgatgcctctcctgaatgtggcagtggcctctctccacccactgactgatgagcatatcttccaggccatcaatgctgggagcattgaaggcacactagaatgggaggattttcagcagagaatggagaacctctccatgttcctaatcaagcgcagagacatgactcgtatgtttgtacatccttcttttcgagaatggcttatctggagagaagaaggagagaaaaccaaatttctctgtgatccgaggagtggtcacacgttacttgccttctggttttcccgccaagagggaaaactaaaccgacagcagactattgaactgggacatcacatcctcaaagcacacatttttaagggtttgagtaaaaaagttggtgtatcatcctccatcctccaaggtctctggatctcttatagcacagaaggtctttccatggcactggcgtctttacgaaatctctacactccaaatataaaggtcagccgactgctgattttgggaggtgccaatattaattaccggacagaggttttaaataatgctccaattctatgtgttcagtcccatcttggttacacagaaatggtagccctgctgctggagttcggggccaacgtggatgcctcttctgaaagtggcctgactcccctgggatatgctgcagcagcagggtacctgagcattgtggtgctgctgtgcaagaaacgggccaaggtggatcatttggataagaacgggcagtgtgctttggttcatgctgcactccgaggtcatctggaggttgtcaagtttttgattcagtgtgactggacgatggccggccagcagcaaggagtatttaagaagagccatgccatccaacaggccctcattgctgcagccagcatgggttatactgagattgtctcctacctacttgatcttccagaaaaagatgaagaggaagtagagcgagcacagatcaacagctttgacagtctctggggagagacaggtacctctcatggacgttgccctcaagaatgtgttgtgtttgtgtggactctcgaatctcacccccttattttttccctggcatacatttggcagtcttctgtctcaggcttttgtaatgcagactgattcagccaaactaaacagtcaagcagttttcctctttcaatcctctttgcctgtggattctccatactctttgcaccagagtcttctttcaaacaaaactttttccctctcttgtttccaaatatttttaaaagactgaaagttaccttacaatgtgccaaaccagagcagaaaattattgtggcctgtctcctttttatgtgatccttgtagtagttaggaataaatatttctcccatcaaa

SEQ ID NO: 64976 - DNA, 3532 bp, Homo sapiens
gtaatttgctctaacagagggtgaactaaactgcgccacagagaaaaattgtgtaaaaatatttcttttatcctaatggaatcatacaacctatatttgctgcagtattctgaaaggacaagcttatgtcaaccaatctaatgaaaagaactcgtctgtgtaatctcttgaaatcattagttgttcaaaacagaataccacagtgcttctctggatacaaaaagaagcaggtgatgttgttaggggttctaaacccctttgggagcatctcttgtgctttgggaccataatcaacatctgctataagaagtatcacctgtaacgcacagtgatgctgaacaggagcttggcccccctccatctgtagatgaggcagcaaacacactcatgactcgtctgggtttcctccttggagagaaagtcacagaagttcagccaggtgaccaatacagcatggaagtacaggatgaaaatcagacctcagcaatcacccagcggataagtccttgttccactctgactagcagcactgcctctccaccagccagtagcccctgctctacactcccacccatcagtacaaatgcaactgccaaggactgcagctatggggctgttactagtccaacctctacccttgaaagcagagatagtggcatcattgctacattaacaagctattctgaaaatgtggaacgcacaaaatatgctggggaaagcagtaaagaattaggatctggaggaaacataaaaccttggcaatctcaaaaatccagcatggactcctgtttgtatcgagtagatgaaaacatgactgcttccacctatagtctgaataagatcccagagagaaatttggaaacagtgttatctcaatcagtacagtctattcctttgtatctcatgccacggccaaattcagtagcagccaccagctctgcccacttggaagaccttgcttacctggatgagcagagacatacacctttgagaacttctctacgaatgccaagacagagcatgggtggtgctcgcacacagcaggatttaagagttcgctttgcaccttataggcctccagatatctccttgaagcctctgctctttgaagtgcccagcatcactacagagtcagtgtttgttggccgagattgggttttccacgaaatagatgctcaacttcaaagttcaaatgccagcgtgaaccaaggagtagtgattgtgggaaacattggattcggcaaaactgccatcatctccagactggtggccctcagctgccatggtacaaggatgagacagatcgcctcagacagcccacatgcctcccccaaacatgtggatgccaacagagagctgccactcacacagccaccttcagcccactcatctatcaccagtggaagctgcccaggaactccggaaatgcgcaggcggcaggaggaggctatgcgaagactagcctcgcaggtggttgcctatcactattgtcaagcagataatgcctacacttgcttggtgccagaatttgtccacaatgttgctgccttgctctgccgctcacctcagctgacagcctatcgggagcagcttcttcgggaacctcacctgcagagcatgctgagccttcgttcctgtgttcaagaccccatggcctccttccggaggggagttctggagccactagaaaatctccataaagagagaaaaatcccagatgaagatttcatcattttaattgatggattaaatgaagcagaatttcacaaaccggattatggggatacaattgtatcgtttctgagtaaaatgatcggaaagtttccttcttggctcaaactaattgtaacagttaggaccagtttacaggaaattaccaagctgctgcctttccataggatttttttggatcgactagaagagaatgaagccatagaccaggacctgcaggcttacatcctgcaccggatacacagcagctcagagatccagaataacatttcacttaatggcaaaatggacaatactacatttggcaaactcagttctcatctcaagaccctcagtcaagggtcctatctatatctgaaacttacatttgacctcatagagaaaggctatctagtgttaaagagctctagctacaaagtagttcctgtttcgctctcagaggtttatttactccagtgcaatatgaagttcccaacccagtcttcctttgaccgggtgatgcctctcctgaatgtggcagtggcctctctccacccactgactgatgagcatatcttccaggccatcaatgctgggagcattgaaggcacactagaatgggaggattttcagcagagaatggagaacctctccatgttcctaatcaagcgcagagacatgactcgtatgtttgtacatccttcttttcgagaatggcttatctggagagaagaaggagagaaaaccaaatttctctgtgatccgaggagtggtcacacgttacttgccttctggttttcccgccaagagggaaaactaaaccgacagcagactattgaactgggacatcacatcctcaaagcacacatttttaagggtttgagtaaaaaagttggtgtatcatcctccatcctccaaggtctctggatctcttatagcacagaaggtctttccatggcactggcgtctttacgaaatctctacactccaaatataaaggtcagccgactgctgattttgggaggtgccaatattaattaccggacagaggttttaaataatgctccaattctatgtgttcagtcccatcttggttacacagaaatggtagccctgctgctggagttcggggccaacgtggatgcctcttctgaaagtggcctgactcccctgggatatgctgcagcagcagggtacctgagcattgtggtgctgctgtgcaagaaacgggccaaggtggatcatttggataagaacgggcagtgtgctttggttcatgctgcactccgaggtcatctggaggttgtcaagtttttgattcagtgtgactggacgatggccggccagcagcaaggagtatttaagaagagccatgccatccaacaggccctcattgctgcagccagcatgggttatactgagattgtctcctacctacttgatcttccagaaaaagatgaagaggaagtagagcgagcacagatcaacagctttgacagtctctggggagagacagccctaacagctgcagccggaaggggcaaactggaggtgtgccgtttgctcttggaacaaggggcggcagtggcccagccaaaccgccgaggagcagtgccactattcagcacagtgcgccagggccactggcaggtaagcagggcgaccacttccagtccctcaggcaggactgagttctaggtgaggacttctgatgcacagagcaaaatgatcacaagtaaagtttgggttacccagcagtgatcaggtttgaggacttggacctttgttatgagtattctggttaattgagaatacgacagtt

SEQ ID NO: 64977 - DNA, 714 bp, Homo sapiens
ttctgcaatttacagtatcaattagctctagctcgcctgtgttgcttatctgtatagaatcaacattcgcagttgcattatttctgaataagcctaggatgccatcatatgataactcaagtccctaaaccacactgcattttttctctctttgtttctctcaatgttgacagtttgacctaagttctgcattctcttgttcctttcagttcgctttgcaccttataggcctccagatatctccttgaagcctctgctctttgaagtgcccagcatcactacagagtcagtgtttgttggccgagattgggttttccacgaaatagatgctcaacttcaaagttcaaatgccagcgtgaaccaaggagtagtgattgtgggaaacattggattcggcaaaactgccatcatctccagactggtggccctcagctgccatggtacaaggatgagacagatcgcctcagacagcccacatgcctcccccaaacgtacgtattcctttttaaagaactccctgtttcattggcgctgaagtttttctgacatatttatattaggtcgtatatccttttattttctcatctgcaaaacctgacttccacgtgaggactattcatttaggttgagagaaagattgtaatactctatttacatctaacccacatacccagtagtcacctaagcgtgactgaagaaaaacctttctcgtgg

SEQ ID NO: 64978 - DNA, 488 bp, Homo sapiens
ttggaatccagttgggaagtcagggtccagggccttccatttgccaaggctttgcctccctggcttgtatcttgggtatcccctcaaccttgcctttcctgccaggtgagtttcctatagaaaagactagacccttctgccctcaccatcagggccagaactcctctctaggctggcgtttgggagggttagcccttagtaacagctgctgagaagaagaagggagtggggaccacacttcctcagctgttcagcagaccaactgtgtgtttcgccatcttgtgctcccattagaaaggtaaagtaaaggaagctgcccagcgctaccagtacgccctgaagaagttccctagagaagggtttggtgaggacttgaaaactttccgggaactaaaggtgtctctcctcctcaacctctctcggtgtcgcaggaaaatgaacgtaagtccctgtcaccccaactcctttctgcaatcctggtagctgat

SEQ ID NO: 64979 - DNA, 5659 bp, Homo sapiens
gtaatttgctctaacagagggtgaactaaactgcgccacagagaaaaattgtgtaaaaatatttcttttatcctaatggaatcatacaacctatatttgctgcagtattctgaaaggacaagcttatgtcaaccaatctaatgaaaagaactcgtctgtgtaatctcttgaaatcattagttgttcaaaacagaataccacagtgcttctctggatacaaaaagaagcaggtgatgttgttaggggttctaaacccctttgggagcatctcttgtgctttgggaccataatcaacatctgctataagaagtatcacctgtaacgcacagtgatgctgaacaggagcttggcccccctccatctgtagatgaggcagcaaacacactcatgactcgtctgggtttcctccttggagagaaagtcacagaagttcagccaggtgaccaatacagcatggaagtacaggatgaaaatcagacctcagcaatcacccagcggataagtccttgttccactctgactagcagcactgcctctccaccagccagtagcccctgctctacactcccacccatcagtacaaatgcaactgccaaggactgcagctatggggctgttactagtccaacctctacccttgaaagcagagatagtggcatcattgctacattaacaagctattctgaaaatgtggaacgcacaaaatatgctggggaaagcagtaaagaattaggatctggaggaaacataaaaccttggcaatctcaaaaatccagcatggactcctgtttgtatcgagtagatgaaaacatgactgcttccacctatagtctgaataagatcccagagagaaatttggaaacagtgttatctcaatcagtacagtctattcctttgtatctcatgccacggccaaattcagtagcagccaccagctctgcccacttggaagaccttgcttacctggatgagcagagacatacacctttgagaacttctctacgaatgccaagacagagcatgggtggtgctcgcacacagcaggatttaagagttcgctttgcaccttataggcctccagatatctccttgaagcctctgctctttgaagtgcccagcatcactacagagtcagtgtttgttggccgagattgggttttccacgaaatagatgctcaacttcaaagttcaaatgccagcgtgaaccaaggagtagtgattgtgggaaacattggattcggcaaaactgccatcatctccagactggtggccctcagctgccatggtacaaggatgagacagatcgcctcagacagcccacatgcctcccccaaacatgtggatgccaacagagagctgccactcacacagccaccttcagcccactcatctatcaccagtggaagctgcccaggaactccggaaatgcgcaggcggcaggaggaggctatgcgaagactagcctcgcaggtggttgcctatcactattgtcaagcagataatgcctacacttgcttggtgccagaatttgtccacaatgttgctgccttgctctgccgctcacctcagctgacagcctatcgggagcagcttcttcgggaacctcacctgcagagcatgctgagccttcgttcctgtgttcaagaccccatggcctccttccggaggggagttctggagccactagaaaatctccataaagagagaaaaatcccagatgaagatttcatcattttaattgatggattaaatgaagcagaatttcacaaaccggattatggggatacaattgtatcgtttctgagtaaaatgatcggaaagtttccttcttggctcaaactaattgtaacagttaggaccagtttacaggaaattaccaagctgctgcctttccataggatttttttggatcgactagaagagaatgaagccatagaccaggacctgcaggcttacatcctgcaccggatacacagcagctcagagatccagaataacatttcacttaatggcaaaatggacaatactacatttggcaaactcagttctcatctcaagaccctcagtcaagggtcctatctatatctgaaacttacatttgacctcatagagaaaggctatctagtgttaaagagctctagctacaaagtagttcctgtttcgctctcagaggtttatttactccagtgcaatatgaagttcccaacccagtcttcctttgaccgggtgatgcctctcctgaatgtggcagtggcctctctccacccactgactgatgagcatatcttccaggccatcaatgctgggagcattgaaggcacactagaatgggaggattttcagcagagaatggagaacctctccatgttcctaatcaagcgcagagacatgactcgtatgtttgtacatccttcttttcgagaatggcttatctggagagaagaaggagagaaaaccaaatttctctgtgatccgaggagtggtcacacgttacttgccttctggttttcccgccaagagggaaaactaaaccgacagcagactattgaactgggacatcacatcctcaaagcacacatttttaagggtttgagtaaaaaagttggtgtatcatcctccatcctccaaggtctctggatctcttatagcacagaaggtctttccatggcactggcgtctttacgaaatctctacactccaaatataaaggtcagccgactgctgattttgggaggtgccaatattaattaccggacagaggttttaaataatgctccaattctatgtgttcagtcccatcttggttacacagaaatggtagccctgctgctggagttcggggccaacgtggatgcctcttctgaaagtggcctgactcccctgggatatgctgcagcagcagggtacctgagcattgtggtgctgctgtgcaagaaacgggccaaggtggatcatttggataagaacgggcagtgtgctttggttcatgctgcactccgaggtcatctggaggttgtcaagtttttgattcagtgtgactggacgatggccggccagcagcaaggagtatttaagaagagccatgccatccaacaggccctcattgctgcagccagcatgggttatactgaggtaagaagtaggcaataggattgttttttcaagctctgtattgaaggacccaggaaaccaggagaaaagattgcacgaagacaaaattgccaaccaaattaatgtgaattcgtgatcgctgctctgaataataaggagattaaactccatgaagcactttactcaaatgccaaagtccctcaaattataggtatagaaaggtgcgagttggaaaggaccgtggaaatgatataattattctccatgttttcctccctgtttaacagacagtggcaccaaggctcaaagagatgaattattgaggtgtagtcacatggttagataatgtggcacaggaacagcataacatttagaatctcagaaggaccagatttgagtcccagcctcgctattcattaactctagcccttgaacaatttacctatctcttagaagtttagtttcccatcagcaaagtgaagctaataaactcctttatacaaggctgttgtaagggatgcttggtaaactgttaaacattatacagtttatttattaatgataataacaataatagtggcaaatgtagggaattggtagtgtgctaggaaatgtttaacaaccaactgtgaagaggggtgtggggtggaacaggggtgtgtgtttgtgtgtgcatacgtttattataaattttactgatagaatgtgttgccgtggaatactacacagccgtaagaagaacaaaatcatgtcctttgcagcaacatagatgcaactgaaggccagtatcctaagtgaattaacacaggaacagaaaaccaaataccacatgttctcattgataagtgggagctaaacattgagtacctatggacataaagaggcaacagtagacactggggactactgggaggggaaaggaaggggaaagggttgaaaaaaactgttgttatcctcactaccaggtgatgggaacttttgtgtcccaaacctcggcatcatccagtacaccatgaaacaaacctgtacattcactgcccttgaatctacaataaaatttgaaataattaaaaaaaaaaaaaagaggctgggcgtggtggctcacgcctgtaatcccagcactttgggaggccaaggcgggtggatcacctgaggtcagaagttggagaccagcctggccaacgtggtgaaaccccatctgtactaaaaatacaaaaattagtcaggcgtggcagtaggcacctgtaatcccagctactcgggaggctgagacaggagaatcgcctgaacccgggaggtggaggttgcagtgagctgagatcatgccattgtactccagcctgggcagcaagagcgaactccatctcaaaaaaaaacaaacaaacaaaaagaatatgttgcacacaacttacaaataataatgaactatataatactcttaattgaaagcttttgttgatttttgccaaatttttagctaaactgtggttgtaacttataacgaaagtttgacaaatggagctgcatcccagtttgctcttttctcaataactgtattgccgttaaatctgatatgtgatctactgttaaactacttctcgtccacatacgaactatattcattgaactgaatcctctttcagctttagcactaaatgaagccctgatttataatgtttgccagtttcaagggtgtaaatactcccatcatggccaatttcaagctaccagtgtgacatcactgaaacaaagaggggaggagaagcatagtagcatgttgtgatgtaatattcccaccatgcagacaagacatgcacaatcaatataaataacctcaacagcatagataatagtaagatatagttaaataataggaagttgagagatttgagtattctttaacctttgtttttaatgttaatttatttaattgctatttgatttctaataaacaactggctttcagaatttctgagaatttaacagtcagctttcatgggccagtgcaagcatgggataatcagcaaaacagctaccatatcaattgagctgacatgtcaccaagggagtgttaagtaatattaaattttatcatctgtgggaggtttttgaaccgtgttcagtcaaattcccagaaacagaactgtcacttttcattgtgtttagagatttttctccctttactagttgcagaacagtccttatacatctgagaggaaaaaggaagataatcactttactctgaggaaacacagggccagatgcagtggctgacacctgtaatcccagcactttgggagaccaaagcaggagaatcacttgaggccaggagttcaagaccaccctggacaacatggcaagacccacatctctggggaagaaaaaaaaaacttttttaattagccaggtgtggtggtgcatgcctgtagtcccagctaatccggaggctgaagtgcaaagattgcttgagcctgggaggtcaagactgcagtgagtcatgaacacattactgcactccagtctaggtgacagaacgagaccctgtctc

SEQ ID NO: 64980 - DNA, 5183 bp, Homo sapiens
gtaatttgctctaacagagggtgaactaaactgcgccacagagaaaaattgtgtaaaaatatttcttttatcctaatggaatcatacaacctatatttgctgcagtattctgaaaggacaagcttatgtcaaccaatctaatgaaaagaactcgtctgtgtaatctcttgaaatcattagttgttcaaaacagaataccacagtgcttctctggatacaaaaagaagcaggtgatgttgttaggggttctaaacccctttgggagcatctcttgtgctttgggaccataatcaacatctgctataagaagtatcacctgtaacgcacagtgatgctgaacaggagcttggcccccctccatctgtagatgaggcagcaaacacactcatgactcgtctgggtttcctccttggagagaaagtcacagaagttcagccaggtgaccaatacagcatggaagtacaggatgaaaatcagacctcagcaatcacccagcggataagtccttgttccactctgactagcagcactgcctctccaccagccagtagcccctgctctacactcccacccatcagtacaaatgcaactgccaaggactgcagctatggggctgttactagtccaacctctacccttgaaagcagagatagtggcatcattgctacattaacaagctattctgaaaatgtggaacgcacaaaatatgctggggaaagcagtaaagaattaggatctggaggaaacataaaaccttggcaatctcaaaaatccagcatggactcctgtttgtatcgagtagatgaaaacatgactgcttccacctatagtctgaataagatcccagagagaaatttggaaacagtgttatctcaatcagtacagtctattcctttgtatctcatgccacggccaaattcagtagcagccaccagctctgcccacttggaagaccttgcttacctggatgagcagagacatacacctttgagaacttctctacgaatgccaagacagagcatgggtggtgctcgcacacagcaggatttaagagttcgctttgcaccttataggcctccagatatctccttgaagcctctgctctttgaagtgcccagcatcactacagagtcagtgtttgttggccgagattgggttttccacgaaatagatgctcaacttcaaagttcaaatgccagcgtgaaccaaggagtagtgattgtgggaaacattggattcggcaaaactgccatcatctccagactggtggccctcagctgccatggtacaaggatgagacagatcgcctcagacagcccacatgcctcccccaaacatgtggatgccaacagagagctgccactcacacagccaccttcagcccactcatctatcaccagtggaagctgcccaggaactccggaaatgcgcaggcggcaggaggaggctatgcgaagactagcctcgcaggtggttgcctatcactattgtcaagcagataatgcctacacttgcttggtgccagaatttgtccacaatgttgctgccttgctctgccgctcacctcagctgacagcctatcgggagcagcttcttcgggaacctcacctgcagagcatgctgagccttcgttcctgtgttcaagaccccatggcctccttccggaggggagttctggagccactagaaaatctccataaagagagaaaaatcccagatgaagatttcatcattttaattgatggattaaatgaagcagaatttcacaaaccggattatggggatacaattgtatcgtttctgagtaaaatgatcggaaagtttccttcttggctcaaactaattgtaacagttaggaccagtttacaggaaattaccaagctgctgcctttccataggatttttttggatcgactagaagagaatgaagccatagaccaggacctgcaggcttacatcctgcaccggatacacagcagctcagagatccagaataacatttcacttaatggcaaaatggacaatactacatttggcaaactcagttctcatctcaagaccctcagtcaagggtcctatctatatctgaaacttacatttgacctcatagagaaaggctatctagtgttaaagagctctagctacaaagtagttcctgtttcgctctcagaggtttatttactccagtgcaatatgaagttcccaacccagtcttcctttgaccgggtgatgcctctcctgaatgtggcagtggcctctctccacccactgactgatgagcatatcttccaggccatcaatgctgggagcattgaaggcacactagaatgggaggattttcagcagagaatggagaacctctccatgttcctaatcaagcgcagagacatgactcgtatgtttgtacatccttcttttcgagaatggcttatctggagagaagaaggagagaaaaccaaatttctctgtgatccgaggagtggtcacacgttacttgccttctggttttcccgccaagagggaaaactaaaccgacagcagactattgaactgggacatcacatcctcaaagcacacatttttaagggtttgagtaaaaaagttggtgtatcatcctccatcctccaaggtctctggatctcttatagcacagaaggtctttccatggcactggcgtctttacgaaatctctacactccaaatataaaggtcagccgactgctgattttgggaggtgccaatattaattaccggacagaggttttaaataatgctccaattctatgtgttcagtcccatcttggttacacagaaatggtagccctgctgctggagttcggggccaacgtggatgcctcttctgaaagtggcctgactcccctgggatatgctgcagcagcagggtacctgagcattgtggtgctgctgtgcaagaaacgggccaaggtactggctgcccagctctgctgcttttcttccctttttctttattttcgatgcatactctttcttatctccagtgttacttcatgagtctgggtagagtatatcaaaccatgatggagaggagatcagagagagtgctggttctgcatatgtgcagggccactgccatccatcctgcaggagcacacagttctaaaccctttgagaggtgcttgggaaactgcatttatccgtaaccacaaaaagtttctacataacaacccagaaatgatctattgagctcagaagaagcctctttttaacaaagagaggaaggagaagtgaggaagccaggagactgcagtggcaggtctggaccaaatgacacctgcaggctctaagcctttcatgtgtagagaagaaaacttagccatggagatgagaacaggaccagacaccttcatcctgtccttgaagaccaccactctagagataaggggagaagatgattctccctatttatactcagactgaccaagggcacctcgaagtgcttctgttagtactgatcagttctctgaaaatatttccaaaatatgtttgctttatgtataaaaactcgatttcacaatattggtgaaaagaaaaatgctggtctcacaaatgtgggcctctgggaaaaaaaagtctggcctcatagtattttgtttcagtcctgaaaacaaactgaggactttagtggtttcatagtgaaatacaagtcatagtatgacttcattctgcggtattcagtgctgttacgaggggagaaagtgggactcctccactcctttgggaactgagacgtaggcctctcaatgacatctcagagccttagaagtttactgtagcacagtgattgtgcacctgtgacatcccattcatttgaatggacacctctaggaacaatgataactgggcctcgttactattttcgttttctttttagagacaaagtcttgttctgttgcctaggccagagtgcagtggcatgattgtagctcactgcagtcttcagcctccccagtagccaggagtataggtatgtgccaccacactcagctttatttttttcctattttgtagaggcagggtcttgctatattgctcggaggtttgctaaaactcgttggatcaagagatcctcccactgtggcctcccaaagcgctaggattacaagcatgagccacggcagccagcccttcttactattgctgtcacttcatattctgatcttagctgggtctttcctgctgttcagcccttacactgccaagccatccttttcttcatctttcattgttttccccagagcagaaatgtaactcatatgtacttctttcaagatcctatcacgcctcttctgcccttcatcactgtgatcgagctcatctcaaggtgcctgtatctcaaaactcttatcagttcttacgtacgctcacctctactttgccttagagaaggaagtacttaccttcctttccagagcaattgtctcctcctctacactcttaacccacggtgttgctcattctctcacgttatttcattctttttctaaattcacactaccttttttctcagtttctacaaacctatgaatgtagaaacctacctaacctaaaaaagaaatgttcctctcccttgctaaccagaagcaacatcccatctcttccctttcacctctgccaaacctgtcctaagagtcctctatactggctacattcacctctttattactccttaaccacttgcattctggcttccatgaatgagagaggaggcaactcattaaaatgataagctttaggatcagacacaactgggttaaatcctgtgtccatacttaatttatacaagggcttgaacaagtcacttaacctctctcaatcgcacttttcatctataaaaagggtgttaaaagagtcagtgtaagcattgaaagagataaagcctttttttaaaagaggtgttaaagtctcttttaatcttatatagtgcctaataaatagtatctgtaaaaaagaaaataacccaacctccctacattctaccaagctgctcttttaaaagtcactaatgactgccattcaccaaataaagcagctttgtcttattcctcacatctctgagcccctccatagtattagcaataataaacctttttttttttttttttttaaacagagcctgggcaacaagagcgaaactccgtctc

SEQ ID NO: 64981 - DNA, 4613 bp, Homo sapiens
  misc_feature (3746)..(3746): n is a, c, g, or t
  misc_feature (3846)..(3846): n is a, c, g, or t
  misc_feature (3885)..(3885): n is a, c, g, or t
  misc_feature (3891)..(3891): n is a, c, g, or t
  misc_feature (4359)..(4359): n is a, c, g, or t
  misc_feature (4384)..(4384): n is a, c, g, or t
  misc_feature (4462)..(4462): n is a, c, g, or t
  misc_feature (4470)..(4470): n is a, c, g, or t
  misc_feature (4589)..(4589): n is a, c, g, or t
  misc_feature (4604)..(4604): n is a, c, g, or t
gtaatttgctctaacagagggtgaactaaactgcgccacagagaaaaattgtgtaaaaatatttcttttatcctaatggaatcatacaacctatatttgctgcagtattctgaaaggacaagcttatgtcaaccaatctaatgaaaagaactcgtctgtgtaatctcttgaaatcattagttgttcaaaacagaataccacagtgcttctctggatacaaaaagaagcaggtgatgttgttaggggttctaaacccctttgggagcatctcttgtgctttgggaccataatcaacatctgctataagaagtatcacctgtaacgcacagtgatgctgaacaggagcttggcccccctccatctgtagatgaggcagcaaacacactcatgactcgtctgggtttcctccttggagagaaagtcacagaagttcagccaggtgaccaatacagcatggaagtacaggatgaaaatcagacctcagcaatcacccagcggataagtccttgttccactctgactagcagcactgcctctccaccagccagtagcccctgctctacactcccacccatcagtacaaatgcaactgccaaggactgcagctatggggctgttactagtccaacctctacccttgaaagcagagatagtggcatcattgctacattaacaagctattctgaaaatgtggaacgcacaaaatatgctggggaaagcagtaaagaattaggatctggaggaaacataaaaccttggcaatctcaaaaatccagcatggactcctgtttgtatcgagtagatgaaaacatgactgcttccacctatagtctgaataagatcccagagagaaatttggaaacagtgttatctcaatcagtacagtctattcctttgtatctcatgccacggccaaattcagtagcagccaccagctctgcccacttggaagaccttgcttacctggatgagcagagacatacacctttgagaacttctctacgaatgccaagacagagcatgggtggtgctcgcacacagcaggatttaagagttcgctttgcaccttataggcctccagatatctccttgaagcctctgctctttgaagtgcccagcatcactacagagtcagtgtttgttggccgagattgggttttccacgaaatagatgctcaacttcaaagttcaaatgccagcgtgaaccaaggagtagtgattgtgggaaacattggattcggcaaaactgccatcatctccagactggtggccctcagctgccatggtacaaggatgagacagatcgcctcagacagcccacatgcctcccccaaacatgtggatgccaacagagagctgccactcacacagccaccttcagcccactcatctatcaccagtggaagctgcccaggaactccggaaatgcgcaggcggcaggaggaggctatgcgaagactagcctcgcaggtggttgcctatcactattgtcaagcagataatgcctacacttgcttggtgccagaatttgtccacaatgttgctgccttgctctgccgctcacctcagctgacagcctatcgggagcagcttcttcgggaacctcacctgcagagcatgctgagccttcgttcctgtgttcaagaccccatggcctccttccggaggggagttctggagccactagaaaatctccataaagagagaaaaatcccagatgaagatttcatcattttaattgatggattaaatgaagcagaatttcacaaaccggattatggggatacaattgtatcgtttctgagtaaaatgatcggaaagtttccttcttggctcaaactaattgtaacagttaggaccagtttacaggaaattaccaagctgctgcctttccataggatttttttggatcgactagaagagaatgaagccatagaccaggacctgcaggcttacatcctgcaccggatacacagcagctcagagatccagaataacatttcacttaatggcaaaatggacaatactacatttggcaaactcagttctcatctcaagaccctcagtcaagggtcctatctatatctgaaacttacatttgacctcatagagaaaggctatctagtgttaaagagctctagctacaaagtagttcctgtttcgctctcagaggtttatttactccagtgcaatatgaagttcccaacccagtcttcctttgaccgggtgatgcctctcctgaatgtggcagtggcctctctccacccactgactgatgagcatatcttccaggccatcaatgctgggagcattgaaggcacactagaatgggaggattttcagcagagaatggagaacctctccatgttcctaatcaagcgcagagacatgactcgtatgtttgtacatccttcttttcgagaatggcttatctggagagaagaaggagagaaaaccaaatttctctgtgatccgaggagtggtcacacgttacttgccttctggttttcccgccaagagggaaaactaaaccgacagcagactattgaactgggacatcacatcctcaaagcacacatttttaagggtttgagtaaaaaagttggtgtatcatcctccatcctccaaggtctctggatctcttatagcacagaaggtctttccatggcactggcgtctttacgaaatctctacactccaaatataaaggtcagccgactgctgattttgggaggtgccaatattaattaccggacagaggttttaaataatgctccaattctatgtgttcagtcccatcttggttacacagaaatggtagccctgctgctggagttcggggccaacgtggatgcctcttctgaaagtggcctgactcccctgggatatgctgcagcagcagggtacctgagcattgtggtgctgctgtgcaagaaacgggccaaggtggatcatttggataagaacgggcagtgtgctttggttcatgctgcactccgaggtcatctggaggttgtcaagtttttgattcagtgtgactggacgatggccggccagcagcaaggagtatttaagaagagccatgccatccaacaggccctcattgctgcagccagcatgggttatactgagattgtctcctacctacttgatcttccagaaaaagatgaagaggaagtagagcgagcacagatcaacagctttgacagtctctggggagagacagccctaacagctgcagccggaaggggcaaactggaggtgtgccgtttgctcttggaacaaggggcggcagtggcccagccaaaccgccgaggagcagtgccactattcagcacagtgcgccagggccactggcagattgttgatcttttactcacccatggagctgatgtcaacatggcagacaagcagggccgcactcccctgatgatggctgcttccgaaggccatctaggaaccgtggactttctgcttgcacaaggtgcctccattgctcttatggacaaagaaggattgacagccctcagctgggcttgtttgaagggccatctctcagtagtacgttctctggtggataacggagctgccacagaccatgctgacaagaatggccgtaccccactggatctggcagctttctatggcgatgctgaggtggtccagttcctggtagatcatggggccatgatcgagcacgttgactacagtggaatgcgccctttggatagggcagtggggtgccngaacacttctgttgttgtcactcttctgaagaaaggagccaagataggttgtcagacgttccgagtcgcccacgaggtccagccacatgggcgatggccncctccaagccagacatcatgatcatcctgttgagcaagntgatgnaagagggggacatgttttataagaaaggtaaagtaaaggaagctgcccagcgctaccagtacgccctgaagaagttccctagagaagggtttggtgaggacttgaaaactttccgggaactaaaggtgtctctcctcctcaacctctctcggtgtcgcaggaaaatgaacgattttggaatggcggaggaatttgctactaaggccctggagctgaaaccgaaatcttatgaagcttactatgcgagagcaagggcaaaacgcagcagcagacagttcgcagcagccttagaggacctgaacgaggccatcaagctgtgtcccaacaaccgtgagatccagagacttctgctgagagtggaagaagagtgtagacagatgcagcagccacagcagccaccgccgccaccgcagcctgcccaggaggtggtggtgtgcatgcggagggacacagcgctggagacagccntcaatgctaaggcctacaagcgcanaacgcccacgtcccttgcgcgaggcccgcatcacttgagaagctggagaagcagcagaagatcgagcaggagcgcaangcaggcangaaagcaccaggaatacctcaatagcattctccagcatgccaaggatttcaaggaatatcacagatccgtcacaggcaaaatccagaagctgaccaaggcagtggccacgtaccatgcnaacacggagcggganagaaagaaa

SEQ ID NO: 64982 - DNA, 11867 bp, Homo sapiens
  misc_feature (3746)..(3746): n is a, c, g, or t
  misc_feature (3846)..(3846): n is a, c, g, or t
  misc_feature (3885)..(3885): n is a, c, g, or t
  misc_feature (3891)..(3891): n is a, c, g, or t
  misc_feature (6744)..(6744): n is a, c, g, or t
  misc_feature (6922)..(6922): n is a, c, g, or t
  misc_feature (7143)..(7143): n is a, c, g, or t
  misc_feature (7176)..(7176): n is a, c, g, or t
gtaatttgctctaacagagggtgaactaaactgcgccacagagaaaaattgtgtaaaaatatttcttttatcctaatggaatcatacaacctatatttgctgcagtattctgaaaggacaagcttatgtcaaccaatctaatgaaaagaactcgtctgtgtaatctcttgaaatcattagttgttcaaaacagaataccacagtgcttctctggatacaaaaagaagcaggtgatgttgttaggggttctaaacccctttgggagcatctcttgtgctttgggaccataatcaacatctgctataagaagtatcacctgtaacgcacagtgatgctgaacaggagcttggcccccctccatctgtagatgaggcagcaaacacactcatgactcgtctgggtttcctccttggagagaaagtcacagaagttcagccaggtgaccaatacagcatggaagtacaggatgaaaatcagacctcagcaatcacccagcggataagtccttgttccactctgactagcagcactgcctctccaccagccagtagcccctgctctacactcccacccatcagtacaaatgcaactgccaaggactgcagctatggggctgttactagtccaacctctacccttgaaagcagagatagtggcatcattgctacattaacaagctattctgaaaatgtggaacgcacaaaatatgctggggaaagcagtaaagaattaggatctggaggaaacataaaaccttggcaatctcaaaaatccagcatggactcctgtttgtatcgagtagatgaaaacatgactgcttccacctatagtctgaataagatcccagagagaaatttggaaacagtgttatctcaatcagtacagtctattcctttgtatctcatgccacggccaaattcagtagcagccaccagctctgcccacttggaagaccttgcttacctggatgagcagagacatacacctttgagaacttctctacgaatgccaagacagagcatgggtggtgctcgcacacagcaggatttaagagttcgctttgcaccttataggcctccagatatctccttgaagcctctgctctttgaagtgcccagcatcactacagagtcagtgtttgttggccgagattgggttttccacgaaatagatgctcaacttcaaagttcaaatgccagcgtgaaccaaggagtagtgattgtgggaaacattggattcggcaaaactgccatcatctccagactggtggccctcagctgccatggtacaaggatgagacagatcgcctcagacagcccacatgcctcccccaaacatgtggatgccaacagagagctgccactcacacagccaccttcagcccactcatctatcaccagtggaagctgcccaggaactccggaaatgcgcaggcggcaggaggaggctatgcgaagactagcctcgcaggtggttgcctatcactattgtcaagcagataatgcctacacttgcttggtgccagaatttgtccacaatgttgctgccttgctctgccgctcacctcagctgacagcctatcgggagcagcttcttcgggaacctcacctgcagagcatgctgagccttcgttcctgtgttcaagaccccatggcctccttccggaggggagttctggagccactagaaaatctccataaagagagaaaaatcccagatgaagatttcatcattttaattgatggattaaatgaagcagaatttcacaaaccggattatggggatacaattgtatcgtttctgagtaaaatgatcggaaagtttccttcttggctcaaactaattgtaacagttaggaccagtttacaggaaattaccaagctgctgcctttccataggatttttttggatcgactagaagagaatgaagccatagaccaggacctgcaggcttacatcctgcaccggatacacagcagctcagagatccagaataacatttcacttaatggcaaaatggacaatactacatttggcaaactcagttctcatctcaagaccctcagtcaagggtcctatctatatctgaaacttacatttgacctcatagagaaaggctatctagtgttaaagagctctagctacaaagtagttcctgtttcgctctcagaggtttatttactccagtgcaatatgaagttcccaacccagtcttcctttgaccgggtgatgcctctcctgaatgtggcagtggcctctctccacccactgactgatgagcatatcttccaggccatcaatgctgggagcattgaaggcacactagaatgggaggattttcagcagagaatggagaacctctccatgttcctaatcaagcgcagagacatgactcgtatgtttgtacatccttcttttcgagaatggcttatctggagagaagaaggagagaaaaccaaatttctctgtgatccgaggagtggtcacacgttacttgccttctggttttcccgccaagagggaaaactaaaccgacagcagactattgaactgggacatcacatcctcaaagcacacatttttaagggtttgagtaaaaaagttggtgtatcatcctccatcctccaaggtctctggatctcttatagcacagaaggtctttccatggcactggcgtctttacgaaatctctacactccaaatataaaggtcagccgactgctgattttgggaggtgccaatattaattaccggacagaggttttaaataatgctccaattctatgtgttcagtcccatcttggttacacagaaatggtagccctgctgctggagttcggggccaacgtggatgcctcttctgaaagtggcctgactcccctgggatatgctgcagcagcagggtacctgagcattgtggtgctgctgtgcaagaaacgggccaaggtggatcatttggataagaacgggcagtgtgctttggttcatgctgcactccgaggtcatctggaggttgtcaagtttttgattcagtgtgactggacgatggccggccagcagcaaggagtatttaagaagagccatgccatccaacaggccctcattgctgcagccagcatgggttatactgagattgtctcctacctacttgatcttccagaaaaagatgaagaggaagtagagcgagcacagatcaacagctttgacagtctctggggagagacagccctaacagctgcagccggaaggggcaaactggaggtgtgccgtttgctcttggaacaaggggcggcagtggcccagccaaaccgccgaggagcagtgccactattcagcacagtgcgccagggccactggcagattgttgatcttttactcacccatggagctgatgtcaacatggcagacaagcagggccgcactcccctgatgatggctgcttccgaaggccatctaggaaccgtggactttctgcttgcacaaggtgcctccattgctcttatggacaaagaaggattgacagccctcagctgggcttgtttgaagggccatctctcagtagtacgttctctggtggataacggagctgccacagaccatgctgacaagaatggccgtaccccactggatctggcagctttctatggcgatgctgaggtggtccagttcctggtagatcatggggccatgatcgagcacgttgactacagtggaatgcgccctttggatagggcagtggggtgccngaacacttctgttgttgtcactcttctgaagaaaggagccaagataggttgtcagacgttccgagtcgcccacgaggtccagccacatgggcgatggccncctccaagccagacatcatgatcatcctgttgagcaagntgatgnaagagggggacatgttttataagaaaggtaaagtaaaggaagctgcccagcgctaccagtacgccctgaagaagttccctagagaagggtttggtgaggacttgaaaactttccgggaactaaaggtgtctctcctcctcaacctctctcggtgtcgcaggaaaatgaacgattttggaatggcggaggaatttgctactaaggccctggagctgaaaccgaaatcttatgaagcttactatgcgagagcaagggcaaaacgcagcagcagacagttcgcagcagccttagaggacctgaacgaggccatcaagctgtgtcccaacaaccgtgagatccagagacttctgctgagagtggaagaagagtgtagacagatgcagcagccacagcagccaccgccgccaccgcagcctcagcagcagttgccggaagaagcagaacctgagccacagcatgaagacatatactctgtacaggatatattcgaggaggagtacctggaacaggatgttgaaaatgtttccattggcctccagacagaggcccggcccagccaggggctcccggtcatccagagcccaccctcctctcccccgcatcgggactcagcctacatctccagctcacctcttggctctcatcaggtttttgacttccggtccagtagttctgtaggctctcccactagacagacctatcagtccacctcacctgccctttctccaactcatcagaactcacattacaggcctagcccaccacacacttccccggctcatcagggaggatcttaccgtttcagcccccctcctgtgggaggacagggcaaagaatacccaagccctcccccttcccctctccggagaggccctcagtatcgggccagccctccagctgaaagtatgagtgtctatagatcccagtctggttcacccgtgcgctatcagcaggaaacaagcgtcagtcagcttcctggcagacccaaatctccattatccaaaatggcccagcggccctaccagatgcctcagctccctgtggcagttccccagcaagggctcaggctacagcctgccaaggcccagattgtgagaagtaaccagcccagcccagccgtccattcaagcaccgtcatccccacaggagcctatggccaagtagcccattcaatggccagtaaataccagtcttcacaaggagacataggagtcagccagagccggttggtttatcaagggtcaattgggggaatcgtaggggatggaaggccggtgcagcatgtccaagccagcctgagtgcaggcgccatctgtcagcatggaggattgaccaaagaggatcttccacagcgaccttcctcagcataccgaggtggcgtgagatacagccagacaccacagatcggacgcagccagtcagcatcctattacccagtctgtcactcaaaactagatctggagcgctcctccagccaactaggttcccctgatgtgtcgcatttaatcagaagacctatcagtgtcaaccctaacgaaatcaaaccgcacccgccaactcccaggccgttgctgcattcccaaagtgtaggccttcgcttctctccatctagcaatagtatctcctccacctccaacctaactccgaccttccggccatcttcttccatccagcaaatggagatcccactgaaacctgcatatgagaggtcatgtgacgagctgtcgccagtgtctccaactcaaggaggttaccccagtgagcccacccgatccaggaccacaccattcatggggatcatagataaaacagcacggactcagcagtacccccacctccaccagcagaatcggacctgggcagtgtcatctgtggacaccgtcctcagtcccacgtctccaggcaacctgcctcagcctgagtccttcagtccaccatcatccatcagcaacattgccttttataacaaaaccaacaatgcacagaatggccatttgctggaggacgattattacagcccccatgggatgctggctaacgggtctcgtggagacctcttggagcgagtcagccaggcctcctcctatcccgacgtgaaggtagctcggactctacctgtggctcaggcataccaggacaacctgtacaggcagctgtcccgagactctcggcaagggcagacatcccctatcaaaccaaagagaccgttcgtggagtctaatgtttaaaagacgttttgttggagtgagacccatatgttttcactgcacattttcaggcttggtttccacattcgaggtagttctctggcttaatttctcatgtagtttctgtgtggtgttcagaggtggcagcccacatgctgaaatcctttgcatgcagccgactgggaagcggcctcccgggagccaggacttcagtttctcttgtctgtgcccagccacatgctctctccctctcttcagatgccaacgaggagattttcgtgctgtgtgctttaacccagggagatcagacacactggtcagctttttccaggagacaatcgctttcactgatgttcttgttgtgtaattgtctttttccttttttaaaaaataaggtgttcttgttcgttttcttctagaaactttagaaagagtgcgatgcccctttgcctttgcatccttagccagtgtcacccacacagccagccgcagcgcattctcatgctgtggcccctccccagaccgccagcgccctgcagccaccaggtctgcagtgtgcattaggattattgctggtcttcctagggggtaaaaggatcagagagagaagaattaagtgctaaattggaagaaaaccccaatatanttatgtaaaatgtcactacattgattttccaagaggcattgtaggaacatgtcaaaaacagccagccctttaaatattgcagtcagccaaggaaattagatgagaattgtggctattaagagaattcactgagagttattctctagatttttagccgacaattaaccactaaaagctnctgcttttccagggtgggggagggaatgaatacatagaaaaacaaaaaagattgttctggattctcagtgaaaggctataggaagtctgttctggagacatctactttttagatcctgatacatcactgagtgtcatactccactaaaaggaaactctaaccgaaggctggctggtgtgacaatcccgttagttggatcttcacctacagccagattttgntctagtggccctcttcctgtaaacccagatggngtcatacagaaattgtttctttcagaagcagattggaatctcttgggaccatgagactgagtcccaatatttccacccagggtcatgcccgttgttgtctacttccattttgagatctatagtttgattatctattattacaggaactgtttcttttctttttctaggagtgtttatgagagtgtgatattttaaagtcagacgcagcaaaaactgtttcagggtgaagaaagacccctttcagccctgttttgcagccctgggtgggggcatgagatagacagcaagcttctgatcttgaagcttgtctagaagacacatcttctaggtctcgtggtcatttggtaggctgacctttgagtgagcgaggccactattgagtggatagcaagaacattggaaccaaagcctcggcacaggcctggcactggctgtacatcagctcttacaactaaacaactcaactaagcaactgaaacgaaacaaaggagcattcgttctctgttgttaggaatcattctgctctgttagggaagggctgcaggaagggcagtttcctgaataaaaatctggctgcgaccagtcccatgtgtctggtaagtaagtaagtaagtaagtgccctttgaagggatcattaagacacagggagcatgaacctgagatcagaagcatttctttactaatttagattctgcgaaatagacggacctctccacccccaaacctaaaacaggccaggacttgtctctgtgctgaaagcaaatagcaagactaactcaagccccagcctctttccacactccctgatacctaaggactgctttctcagctagaccagggtgggcatcagcgacgccttctcagctagaccagggtaggcatcagcgtcctctctccatctctatacccctctctctcacatcaggaagatgaaatgtgtagctctagcggcaacctctagccaggagcccagtggcctctcagattgctttttggccaggtctcagcactgctggcatctttacatcttactccttaaaaccgcctctcgctgaggagccactgcattttgaagaatttctcagtgtctgtcaggaaagtgctcctgctcatttggaacgccacacaccacccgcactcacctgtccaggcgaatgagcaggtcctgtagctttacaaatatgccgctgatgccgcttctccccagggtctctcagttttccaggacaaaaagatttagggcctataccctatgggcaaaacacctaaaatgtcaacagtcaaaatgccattctttttggccatcataagagggagtaggtatcactgctgcatgccagttgtttttgactagaatatgccaaccagagcttgttggggcaggagacgtttttccttacaagcagactgcctgtgccctgtgccctgtttgctacttcactgccatggaatgatccgagtactgtatttcagagctgccccttccccagcagcaaacactcgctgagtccatgtctggcttcaggtgggaggaaatgtttcagatgaaacttactcaattcataccaccctgaaatggaggacagaggtgacaaacttcagtttaataggtttctcaccaagttgtatgttccattggcccaggattcttgcactaatgggtttctatcacatcatgtctataaatgggtgcactttactgtttgaatttgtaactgaagtactggatatttaagtgtgagtaatgtcttcattagaaaatagcagaaccgctcttgtcttttagtgtatttttcaagaaaaaaggaaaggaaagacatcaagcagtggatcacaacatttatagcacaagaaataacttgtatataagcatcaaaaagattaagaattttttaatatgaaaaatatttgcagtgattttaaagtgcttttccagcaatgttcttagggactcctgagacacggttactttatctactggatcagtaaggcacacaattaacaattaacaattaatgtttatttacaaagtaaagggaaaacctgtgtaacatgagaatttggcatgacaaaatggagaccattttgtatctgctgttgtatcttgtccgggttgcagacgtgcactattaaagtcccaagttaatagagcacaaacccttctcgctcctcccccatgtgcccctctttttagatgtgtataacttaaactcgatggctcaggaaaattccactaattagaatcatgtacagtaccccaggtcgttgtccagatatacaagtttgctaatgtagttaagcctggattattaaacacttttcctaaattattgtaaacagaacagcttagagaaaggtattctcagtccttaatattgtatagtagtttatgagcccctctctaaatattggtatttttatattccagagatgtacccaatagaaaaaattaaaaattaatcagtatctaatttaatatccataagtatttttccttagattttagtcacgtacagtgggctatgtggatgtcacttgtgcttcaccatagtttaccactaggtgtcactgtggctctgcactgcgcttgttttgtagcaaagaacagcggcatcccctcgggagagaggagctgcttccaggcaacaggcaagcgggctcagaggttcaggagaaggcaacagaggcctggaaggggtcttcgtgcatctgtgccagttgtgcaagacgaactctttgaacactacatgctttggacttcagccaggcagaggctggaagaaggttgaccagagctcccttgctctggtagagggatgggtacatggagaagccccttcttccccatgagcctccctcctgtcagttcctctcagcctccagcttttataactccagaagcgtcacagttgggtggtttgattcagagagagttatttttctactgcagaaatgccttggacaaaaccagtgctcactgaatctttgccacaaaatggaataggctatcccagggggcaagaggtgcccgcccctgtgcccagcctcctcttgatgctcccagtgcccagcagcctcgcacaccctgcctgtctgttcctgggctgcccatttctcaagaaaccgacctgcaaaggcagccggctgctgcctccacaccgagggctgtgcggtcctgctgctcgctcactgggaggtgcagctctttctcctcttcctctaggaattccagaccgaccatctaccatgactaacaacaatgaacaaagggcttaggggcaagagctacctgcaaagacgtgtcatggaacccttcaccatgcaatgccttgaactcagctctggctgctcccaagaaaaggtggctggctgggggcctggacacaagcacaatggggctggtggagccactgtgcagagctacttgaataatcactgggttttcatcaactccttttgtcatacagaccactcaagggctgaagtgttggtaaccttcatttcggtgtccaaagcctcacagcaggtgagccaccctgagatgcttgtggccacatggtggccacagtcagagctttgaaagtcagtaccaaatgaacgcataattggacaccaaaaatcaagtgttactttcatgtttcctcaccccatcatctcattgcctcctgctgactctgataccgacgctgagctgacttgccaggctgccgctggacgcgtagagatcaggccagcgccgcgctcatttttccaggtagacctactctgtggaacggaagtgccctagctgctttgtttttgtagcacttgctggctgaatttttcttttgctaatcgctaaccagaaagtctggttagagggggctcaactcaatccctttggtccccagcgccagacaagagttaattctggaaaattcagtacttgaatgtacctgccttattgcataccaatttactggggggaaaaaaaaagttaagagatgccggctccagatctccacttcattcacaggtgattttggaaatcctgtaagttacacttcctgttctggttttgttttgttttttgtttcctttggctgattcctgctgagtgaggccagttcctcatcaggctcagggcaggtgccttttcaggcgtggcctcctttccatctagcacagcatctttgtctctgttctgtctcctccaaatccaagatgattttaattagtacagacatgtacagtctacaattaaagagtgatttgtactaatatgattttgattcttcctcctctttgctgtcctttcaagacacttgctggaaaaagctttaatgcacttagttttcctttaggttttctatgactcagatgtaaaggactttctctgtacagtatattatccaatgcatgtttgttctctctcctgatatattgaacaccacacagttgtgaagccgtgcagtggggatgccccacaccccacagaggcatctacccctgtgtataaggaaagacattttcctttgctgtacttgcttgagcagttttattgtctgtacatgtgagctgtgtgagatagatgtgaaaagttcaaatgaatgcattttcctgccccatgtatacagattgtcatctgtacaaggaactgtatgtatgaaagcaaatgtacttatttataaatggctaacacttggaaaaa

SEQ ID NO: 64983 - DNA, 576 bp, Homo sapiens
gagacagagtctgcctctgtcacccaggctggagtgcagtggcgctatctcggctcactgcaacctttgcctcctgggttcaagtgattctcctgcctcagcctcccaagtggctgggattacaggcgcccgccaccacgcctggctaatttttgttatttctagtagagatgaggtttcccccatgttggtcaggctggtctcaaactcctgacctcgtgatccatccacctcggcctcccagggtgttgggattacagacatgagccaccgtgcccggcgccttatacgatttctgcagacaacataggcagaggctgagagagtcagagaacacgtttgagcctgggtccctgtcttagtgaataggagatctcgagcagcaagttcctccacctctctgggtcttttatcttcttcatctgtaaaatggatatataagagtggtacttacctcatagactattgtaagaattaaacagggtactctatgtacagacttagcacagtgcttccatgtaatagtgttggacaaatattagctattaaaatatcctcaccatttaaactttaaaa

SEQ ID NO: 64984 - DNA, 436 bp, Homo sapiens
ctgaaatttttttttttaacaacaaaaaaaacaataaagagcaaacagaccagcagaataaatgtaggacaaacctggccttgagtcatggctctaccactaataaacatagtagtcttaatctcgtagaatctcaggaccttgttgtcatagggctgttggaggaccaaatgagagcgtttattaagcctttctttatcaaagtcttgcccattgcttttaaaacggcagcaattattatggagaataataattattttcagaaaggatattctccattttatccattcctgtgcctttgtaaagctctttacagaatttgaaagtaaagctcttaaccatttatattgcagatattatccctagtttgtcattttcttttggaagtttctggttttcacttgggcaaaatatactgtcttaatgctttctggat

SEQ ID NO: 64985 - DNA, 243 bp, Homo sapiens
gagactccatctcaaaaaaaaacaaacaaaaaaaacactcctggcctcaagcaatccttccaccttggcctcccaaggtatgagccaccacatccagcctccttaagcaaagtctttcacataatatattgcttttaatattaaacattttttactttatgtttcttatttttaaaaaatacagtgactaacacttgttttaagaaaaaggccaggagtggtggctcacgcctgtaatcccag

SEQ ID NO: 64986 - DNA, 964 bp, Homo sapiens
gcggaggcgagagaacctcttagctaggttccgccgaagccccacccactgcgcagaccccgcctcccaccgcagggcacgcctcctacccccacccttcgcggattgatcctgctggccgcagccacccacgtggtggaagcccggccctgcaggctggagaggatttgattagactacgcgtttcgacttgcagggtgtttaatcgtcgccaagcgggacttactgcaagctatcaaatctgaggtcttattttgttgagtcgaaagtgaaattttcctttggccaacgtgacagggctttgtttggtggtaaaaagggttactagacacccctcattccactgccactggagggcgcatttctcagctcttgctcttcaaacctgctgaaaggaattcctagatctaaacaccagcatcccctgcacaggagtgatggacagttgggtgcaaaggtgatgaaggtgggatccccgaggcattgtcactacagaacaaccatgaaatagactccttatttcagaggaagagttacatattaatccacttctactgattttgtagagggagaaaagtcagggactgtgttgtattcctgtttgcatcctttaatcatctagtataattcctttaatatggtagatgctcaggaactacctgagttaataaaggaagagaaaacttgaacaaattgtgacggcctgacttgcactgttaatacttctggctttcataaatctaagcattcaggataagagtcctatgaatcattaaaatacatataatcaaaattaagagtgatctttttctaaaccaaacctgacaatagatcaacgaacaaaattcattggtttgaaattcattttttcaaattgcttttttcagtggcccacttaactttctagtggaaaactcgcaaaaacaacgaaatataattgcataagattgttttttagttgggg

SEQ ID NO: 64987 - DNA, 920 bp, Homo sapiens
gcggaggcgagagaacctcttagctaggttccgccgaagccccacccactgcgcagaccccgcctcccaccgcagggcacgcctcctacccccacccttcgcggattgatcctgctggccgcagccacccacgtggtggaagcccggccctgcaggctggagaggatttgattagactacgcgtttcgacttgcagggtgtttaatcgtcgccaagcgggacttactgcaagctatcaaatctgaggtcttattttgttgagtcgaaagtgaaattttcctttggccaacgtgacagggctttgtttggtggtaaaaagggttactagacacccctcattccactgccactggagggcgcatttctcagctcttgctcttcaaacctgctgaaaggaattcctagatctaaacaccaggtacacctctattttcaagtgtcgtcaggaggaaacccatcaaaccctacatttagcttactagagaaatacattgttctgctgtgtcagtttggcgagtaacataatgtttcgttattaactctcaacccctgtgttttcagtttttttttttttaacatgaaaaattgtcattttctctaattggtatgcctgttcctttggcagtgaggttgtcagtacacatgcttctggaatagtcttgtaaatttcttgaggctaaaaagcacaggtctagttagctaactgactcatgcacctctccccttggattccccacaggtctcagattcagcatttaaaattgaactcgtcatctttccctgcctcccttaaagaaaaaaagtcaatatgctgcttctactgtgtgcgtgccgtgctcagtagtaccactgtccaaataattgcctaagctagacagaggaagctgggaagaatcttagactctggctttccacccaca

SEQ ID NO: 64988 - DNA, 704 bp, Homo sapiens
ccagccttgtcaaatgtcctgttttgttttaaactttggtgggtacagtaggttactgtacttcagtgagtaaagtaggttactatactttcgtgagtgtagtagtaacagcttactatgaattttccctgcatttgacctgttttcttccccagcagcatcccctgcacaggagtgatggacagttgggtgcaaaggtgatgaaggtgggatccccgaggcattgtcactacagaacaaccatgaaatagactccttatttcagaggaagagttacatattaatccacttctactgattttgtagagggagaaaagtcagggactgtgttgtattcctgtttgcatcctttaatcatctagtataattcctttaatatggtagatgctcaggaactacctgagttaataaaggaagagaaaacttgaacaaattgtgacggcctgacttgcactgttaatacttctggctttcataaatctaagcattcaggataagagtcctatgaatcattaaaatacatataatcaaaattaagagtgatctttttctaaaccaaacctgacaatagatcaacgaacaaaattcattggtttgaaattcattttttcaaattgcttttttcagtggcccacttaactttctagtggaaaactcgcaaaaacaacgaaatataattgcataagattgttttttagttgggg

SEQ ID NO: 64989 - DNA, 1834 bp, Homo sapiens
ggggcgcggcctcctgtctgcaccggcagcaccatgtcgctcacggtcgtcagcatggcgtgcgttgggttcttcttgctgcagggggcctggccactcatgggtggtcaggacaaacccttcctgtctgcccggcccagcactgtggtgcctcgaggaggacacgtggctcttcagtgtcactatcgtcgtgggtttaacaatttcatgctgtacaaagaagacagaagccacgttcccatcttccacggcagaatattccaggagagcttcatcatgggccctgtgaccccagcacatgcagggacctacagatgtcggggttcacgcccacactccctcactgggtggtcggcacccagcaaccccctggtgatcatggtcacaggaaaccacagaaaaccttccctcctggcccacccagggcccctgctgaaatcaggagagacagtcatcctgcaatgttggtcagatgtcatgtttgagcacttctttctgcacagagaggggatctctgaggacccctcacgcctcgttggacagatccatgatggggtctccaaggccaacttctccatcggtcccttgatgcctgtccttgcaggaacctacagatgttatggttctgttcctcactccccctatcagttgtcagctcccagtgaccccctggacatcgtgatcacaggtctatatgagaaaccttctctctcagcccagccgggccccacggttcaggcaggagagaacgtgaccttgtcctgtagctcctggagctcctatgacatctaccatctgtccagggaaggggaggcccatgaacgtaggctccgtgcagtgcccaaggtcaacagaacattccaggcagactttcctctgggccctgccacccacggagggacctacagatgcttcggctctttccgtgccctgccctgcgtgtggtcaaactcaagtgacccactgcttgtttctgtcacaggtatctgcagacacctgcatgttctgattgggacctcagtggtcatcttcctcttcatcctcctcctcttctttctcctttatcgctggtgctccaacaaaaagaatgctgctgtaatggaccaagagcctgcgggggacagaacagtgaataggcaggactctgatgaacaagaccctcaggaggtgacgtacgcacagttggatcactgcgttttcatacagagaaaaatcagtcgcccttctcagaggcccaagacacccctaacagataccagcgtgtacacggaacttccaaatgctgagcccagatccaaagttgtctcctgcccacgagcaccacagtcaggtcttgagggggttttctagggagacaacagccctgtctcaaaaccaggttgccagatccaatgaaccagcagctggaatctgaaggcatcagtctgcatcttaggggatcgctcttcctcacaccacgaatctgaacatgcctctctcttgcttacaaatgcctaaggtcgccactgcctgctgcagagaaaacacactcctttgcttagcccacaagtatctatttcacttgacccctgcccacctctccaacctaactggcttacttcctagtcctacttgaggctgcaatcacactgaggaactcacaattccaaacatacaagaggctccctcttaacacggcacttacacacttgctgttccaccttccctcatgctgttccacctcccctcagactatctttcagccttctgtcatcagtaaaatttataaattttttttataacttcagtgtagctctctcctcttcaaataaacatgtctgccctcatggtttcg

SEQ ID NO: 64990 - DNA, 1798 bp, Homo sapiens
ggggcgcggcctcctgtctgcaccggcagcaccatgtcgctcacggtcgtcagcatggcgtgcgttgggttcttcttgctgcagggggcctggccactcatgggtggtcaggacaaacccttcctgtctgcccggcccagcactgtggtgcctcgaggaggacacgtggctcttcagtgtcactatcgtcgtgggtttaacaatttcatgctgtacaaagaagacagaagccacgttcccatcttccacggcagaatattccaggagagcttcatcatgggccctgtgaccccagcacatgcagggacctacagatgtcggggttcacgcccacactccctcactgggtggtcggcacccagcaaccccctggtgatcatggtcacaggaaaccacagaaaaccttccctcctggcccacccagggcccctgctgaaatcaggagagacagtcatcctgcaatgttggtcagatgtcatgtttgagcacttctttctgcacagagaggggatctctgaggacccctcacgcctcgttggacagatccatgatggggtctccaaggccaacttctccatcggtcccttgatgcctgtccttgcaggaacctacagatgttatggttctgttcctcactcccccacggttcaggcaggagagaacgtgaccttgtcctgtagctcctggagctcctatgacatctaccatctgtccagggaaggggaggcccatgaacgtaggctccgtgcagtgcccaaggtcaacagaacattccaggcagactttcctctgggccctgccacccacggagggacctacagatgcttcggctctttccgtgccctgccctgcgtgtggtcaaactcaagtgacccactgcttgtttctgtcacaggaaacccttcaagtagttggccttcacccacagaaccaagctccaaatctggtatctgcagacacctgcatgttctgattgggacctcagtggtcatcttcctcttcatcctcctcctcttctttctcctttatcgctggtgctccaacaaaaagaatgctgctgtaatggaccaagagcctgcgggggacagaacagtgaataggcaggactctgatgaacaagaccctcaggaggtgacgtacgcacagttggatcactgcgttttcatacagagaaaaatcagtcgcccttctcagaggcccaagacacccctaacagataccagcgtgtacacggaacttccaaatgctgagcccagatccaaagttgtctcctgcccacgagcaccacagtcaggtcttgagggggttttctagggagacaacagccctgtctcaaaaccaggttgccagatccaatgaaccagcagctggaatctgaaggcatcagtctgcatcttaggggatcgctcttcctcacaccacgaatctgaacatgcctctctcttgcttacaaatgcctaaggtcgccactgcctgctgcagagaaaacacactcctttgcttagcccacaagtatctatttcacttgacccctgcccacctctccaacctaactggcttacttcctagtcctacttgaggctgcaatcacactgaggaactcacaattccaaacatacaagaggctccctcttaacacggcacttacacacttgctgttccaccttccctcatgctgttccacctcccctcagactatctttcagccttctgtcatcagtaaaatttataaattttttttataacttcagtgtagctctctcctcttcaaataaacatgtctgccctcatggtttcg

SEQ ID NO: 64991 - DNA, 1885 bp, Homo sapiens
ggggcgcggcctcctgtctgcaccggcagcaccatgtcgctcacggtcgtcagcatggcgtgcgttgggttcttcttgctgcagggggcctggccactcatgggtggtcaggacaaacccttcctgtctgcccggcccagcactgtggtgcctcgaggaggacacgtggctcttcagtgtcactatcgtcgtgggtttaacaatttcatgctgtacaaagaagacagaagccacgttcccatcttccacggcagaatattccaggagagcttcatcatgggccctgtgaccccagcacatgcagggacctacagatgtcggggttcacgcccacactccctcactgggtggtcggcacccagcaaccccctggtgatcatggtcacaggaaaccacagaaaaccttccctcctggcccacccagggcccctgctgaaatcaggagagacagtcatcctgcaatgttggtcagatgtcatgtttgagcacttctttctgcacagagaggggatctctgaggacccctcacgcctcgttggacagatccatgatggggtctccaaggccaacttctccatcggtcccttgatgcctgtccttgcaggaacctacagatgttatggttctgttcctcactccccctatcagttgtcagctcccagtgaccccctggacatcgtgatcacaggtctatatgagaaaccttctctctcagcccagccgggccccacggttcaggcaggagagaacgtgaccttgtcctgtagctcctggagctcctatgacatctaccatctgtccagggaaggggaggcccatgaacgtaggctccgtgcagtgcccaaggtcaacagaacattccaggcagactttcctctgggccctgccacccacggagggacctacagatgcttcggctctttccgtgccctgccctgcgtgtggtcaaactcaagtgacccactgcttgtttctgtcacaggaaacccttcaagtagttggccttcacccacagaaccaagctccaaatctggtatctgcagacacctgcatgttctgattgggacctcagtggtcatcttcctcttcatcctcctcctcttctttctcctttatcgctggtgctccaacaaaaagaatgctgctgtaatggaccaagagcctgcgggggacagaacagtgaataggcaggactctgatgaacaagaccctcaggaggtgacgtacgcacagttggatcactgcgttttcatacagagaaaaatcagtcgcccttctcagaggcccaagacacccctaacagataccagcgtgtacacggaacttccaaatgctgagcccagatccaaagttgtctcctgcccacgagcaccacagtcaggtcttgagggggttttctagggagacaacagccctgtctcaaaaccaggttgccagatccaatgaaccagcagctggaatctgaaggcatcagtctgcatcttaggggatcgctcttcctcacaccacgaatctgaacatgcctctctcttgcttacaaatgcctaaggtcgccactgcctgctgcagagaaaacacactcctttgcttagcccacaagtatctatttcacttgacccctgcccacctctccaacctaactggcttacttcctagtcctacttgaggctgcaatcacactgaggaactcacaattccaaacatacaagaggctccctcttaacacggcacttacacacttgctgttccaccttccctcatgctgttccacctcccctcagactatctttcagccttctgtcatcagtaaaatttataaattttttttataacttcagtgtagctctctcctcttcaaataaacatgtctgccctcatggtttcg

SEQ ID NO: 64992 - DNA, 443 bp, Homo sapiens
aaaccttaacatttatggtcaattgatttttcacaagggtacataaacaattaattgggaaaagaacagacttttcaacaaatagtgctgggacaactggatatccagatgcagaagaataaagctatacccccacctcacacaatatacatagattaactcaaaatggttcaaatacccaaaactaaaactcttcaaagaaaaaaaaggggaaaatctttgtgaacttatctggcaatgttttcttaggtatgacaccaaaaacacaagcaaccaaaataaaaataaataaattagactatcaaaatttaaaattttaggccaggtgtggtggctcacacctgtaatcccaacattttaggaggcaaagacaggaggactgcttgagcccagaagttcgagatgagcctaagcaacatagacctatctctacaaaaaaaaaa

SEQ ID NO: 64993 - DNA, 420 bp, Homo sapiens
cagattccacctgaaatcacctggaggatgcctggagtgctgttccacaccctgggctccccctgaagttctgactccttatccctacctctgcagacacactggctgggccatctggggccaaggttggtgaaaacccaggcgtctgggtccccagcagcaagaacaactcccaaggagacagaggccggccccctgcataacaactttgatggctgcggcccaccctccaaccacctgacacatgtcatgccaacggctctgagcctcacatcttcaaaaactggatgccaaggagacccaccaaaaacatgcgggtaacatttgttatggctttgaagataaaagtcaattgaagtaagccctcgctgtatttcaagttttccctctagcatggagcaagctgcctggcagtttaga

SEQ ID NO: 64994 - DNA, 787 bp, Homo sapiens
gtcttatgtaattccaaactcccctgtgaggtgggtgctctcttctccatcataccgatagggaacggaggcccagggcagttccataacaaggccatgtggccagggtcactttgtggtctccatccagatagcatcctgcctgccaagtcagtgggcgtgtcccctttgctcctgcctgccctcttcactggagggcctcactgcccaggtgtactctgagcatggggctactgctggcaggtggcagggagtctccccagtctcttgatgccattccaataccttgtctgctctttagcctaacgcacctctcggggtggtcaggagagcgggtggtagaagcctgaaagatcagctccctggggacacagccagagcttcgtcctcagtgaccacagggctgagccaggctcaaccggcttctggctcttgttttgcagaagaagaactagaagcaaggtgctttcctccgggtcccagagctgttagtgatggagccaggcctgggatccagctttcctgagttcctgacccctgctcatttcatagtcagctctcagcacttaccagaggaacaggcagccttttggctactgcccttcagagaaagagagatgagagaattcaaatgcgtgttggtgttccctgttagtacaagcagcagcagggggaagaactggaactagtgagtggagtgaaatctagggattgcccctcagtttcagttgtccttgttattcctccctgttaagctccccctgcagattcatttcttcactcattc

SEQ ID NO: 64995 - DNA, 1001 bp, Homo sapiens
  misc_feature (553)..(553): n is a, c, g, or t
  misc_feature (750)..(751): n is a, c, g, or t
cccgtctctactaaaaatacaagaaatagccaggcgtggtagctggtacctgtagtcccagctacttgggaggctgaggcaggagaattgcttgaacccaggaggcagaggttgcagtgagccgagattatgccactgcactccagcctgggtgacagactgagactctgtctcaaaaaaaaaaaaaaaaaagaggaagaatttagtaacctttaaaatgtgttaccatttcatatggtcaggtagacaataaacacaaattcagacttgcatttcaactaaaagtctcctctttgtctattttatttgtgctgaaatcacagtcatattcacttgcgtttctcatgtcggtcagaagtgttggtactgttttatctgatttaatgtaatagaaaaatgccaggtacgatggctcacgcctgtaatcctagcactttgggaagccgaggggggtggatcacgaggtcaggagttcgagattagcctagccagcatggtgaaattcagtctactaaaaatacaaaaaaaaaaaaaattagctgggcatggtggnatgtgcctgttagtcccagctactcgagcggctgaggcaggagaatcacttgaacctgggaggtggacgttgcagtgagccgagatcacaccactgcactccagcctgggcaacagagcaaaaccctgtctcaaaaaaaaaaagaaaaaaaaaagtaatagaaaaatattaggccaggcgtgtggctcacgcctgtnntcccagcactttggaaggccaagatgggcggatcacaggtcaggagttcgagaccagcatgaccaacatggtgaaaccccatctctactaaaatacaaaaattagccgggtatggtgtcgcgcacgtgtaatcccagctacttgggaggctgaggcgggagaatcgcttgaacccgggaggtggaggttgcagtgagccaagattatgctactgcactgcagcctgggcgacagagtgagactctgtctc

SEQ ID NO: 64996 - DNA, 668 bp, Homo sapiens
cccactgcacttgccagggctgccggggcccagccttgcccctagcttcctctggcgggagctatggctcggaggagaatggggacctctgaacatacctgcccgcaagggggaccggaggtgctcggagtgggcttgtgagggaggtggtgccgcagtccccgctgagcagcctggccccccagatcgtgtacttcactgctacattcccctacgtggtcctggtcgtgctgcttgtgcttggagtgctgctgcctggcgccctggacagcatcatttactatctcaagcctgactggtcaaagctggggtcccctcagccctgggcagctacaaccgcttcaacaacaactgctacaatgggaccagcttctttgctggcttcgtggtcttctccatcctgggcttcatggctgcagagcagggcatgcacatctccaaggtggcagagtcagggagatctctgtggccctctgttgtgccctccgctttgtcattgatctctccatggtgactgatggtgggatgtatgtcttccagctgtttgactactactcagccagcggcaccaccctgctctggcaggccttttgggagtgcgtggtggtggcctgggtgtatggagctgaccgcttcacggacgacattgcctgtatgatcgggtaccg

SEQ ID NO: 64997 - DNA, 433 bp, Homo sapiens
cccactgcacttgccagggctgccggggcccagccttgcccctagcttcctctggcgggagctatggctcggaggagaatggggacctctgaacatacctgcccgcaagggggaccggaggtgctcggagtgggcttgtgagggaggtggtgccgcagtccccgctgagcagcctggccccccagatcgtgtacttcactgctacattcccctacgtggtcctggtcgtgctgcttgtgcttggagtgctgctgcctggcgccctggacagcatcatttactatctcaagcctgactggtcaaagctggggtcccctcaggtgaggtggaggtggggaggctgcagcagggtgttgtgggggagccctgcaggcccctcatgcctgcactctccagccctcctctaggtatggatagatgtggggacccagat

SEQ ID NO: 64998 - DNA, 329 bp, Homo sapiens
aagcaaactcataagcaacctttactctgaagtgtccccaaagtacttggtagtgtagcagggtccttcacacaggacaggatgaatttcagttactattgactgaatgataattatctgattcttgtcttctcaactagattgttttaaacatcaacattcagagttgtcaattaacactcctaaactgctttattaggcatataagttaagacaaatgaacaattaatttaagatttttgtgtaaagtgctaaaccaaaataaccaggaaaggagattaaaaacacttctaaagctttaaaaatcagaagattaagattatttgtac

SEQ ID NO: 64999 - DNA, 703 bp, Homo sapiens
gtagtcccagctactcaggaggctgaggtgaaaagattgcttgagcccaggagactgaggctgcagtgagccatgattgcacctctgcattccagcctgggcaacagagcaagaccctatctcaaaaagaaaagaaattgagactcaggtctcatagctggtgaacagcagagccagtatttgagcccaggactgcctgactccaaaacctgagctcttccctcactgtgctgcctctcctggtgtgggcaaacaggattttaatgggagtaaggtctgccatgggttaggacatcacctttggcccagtttcaaaggaaggtgcagacttgaaggacagaagctcattagctgagtctctggggaccacgtttgcaatggtcccacctgcaaaccagatgagggaataaaattcagtctaccggccaggtgcggtggctcacgcctgtaatcccagcactttgggaggctgaggcagacagatcacaagatcaagagatcaagaccatcctggccaacatggtgaaaccccgtctctaataaatatacaaagattagctgggcgtggtggtgcacgcctgtagtcccagctgcttgggaggctgaggcaggagaatcgcttgaacccaggaggcagaggttgcagtgagccaagactgtgccattgcactccagcctggccacagagtgagactccatctca

SEQ ID NO: 65000 - DNA, 1140 bp, Homo sapiens
aatcatcttgttggccctgacctcgttggaaaacgaagctccccgcagggtcccggcctctagggctgctgtgcgggcgggggtggcctggagctatttccattcggcggcgggaacaggtgccggcgcctccgccccatccccaggggccgcctcccccggggcggcctccaggctgccgagacctataaaggcgccaggttttctcaatgaagccgggacgcactccggagcgcactgcgtggtcgcaccctacccgggctgccttggaagtcgtccccgccgcccctccgcaccggcatgaagctcatcgtgggcatcggaggcatgaccaacggcggcaagaccacgctgaccaacagcctgctcagagccctgcccaactgctgcgtgatccatcaggatgacttcttcaagccccaagaccaaatagcagttggggaagacggcttcaaacagtgggacgtgctggagtctctggacatggaggccatgctggacaccgtgcaggcctggctgagcagcccgcagaagtttgcccgtgcccacggggtcagcgtccagccagaggcctcggacacccacatcctcctcctggaaggcttcctgctctacagctacaagcccctggtggacttgtacagccgccggtacttcctgaccgtcccgtatgaagagtgcaagtggaggagaagtacccgcaactacacagtccctgatccccccggcctcttcgatggccacgtgtggcccatgtaccagaagtataggcaggagatggaggccaacggtgtggaagtggtctacctggacggcatgaagtcccgagaggagctcttccgtgaagtcctggaagacattcagaactcgctgctgaaccgctcccaggaatcagccccctccccggctcgcccagccaggacacagggacccggacgcggatgcggccacagaacggccaggcctgcagcgtcccagcaggacagcatgtgagcgtttccctatgggggtgtctgtacgtaggagagtggaggccccactcccagttgggcgtcccggagctcagggactgagccccaagacgcctctgtaacctcgctgcagcttcagtagtaaactgggtcctgtttttttaaaagt

SEQ ID NO: 65001 - DNA, 920 bp, Homo sapiens
  misc_feature (815)..(815): n is a, c, g, or t
  misc_feature (877)..(877): n is a, c, g, or t
  misc_feature (897)..(897): n is a, c, g, or t
  misc_feature (910)..(910): n is a, c, g, or t
  misc_feature (920)..(920): n is a, c, g, or t
aatcatcttgttggccctgacctcgttggaaaacgaagctccccgcagggtcccggcctctagggctgctgtgcgggcgggggtggcctggagctatttccattcggcggcgggaacaggtgccggcgcctccgccccatccccaggggccgcctcccccggggcggcctccaggctgccgagacctataaaggcgccaggttttctcaatgaagccgggacgcactccggagcgcactgcgtggtcgcaccctacccgggctgccttggaagtcgtccccgccgcccctccgcaccggcatgaagctcatcgtgggcatcggaggcatgaccaacggcggcaagaccacgctgaccaacagcctgctcagagccctgcccaactgctgcgtgatccatcaggatgacttcttcaagccccaagaccaaatagcagttggggaagacggcttcaaacagtgggacgtgctggagtctctggacatggaggccatgctggacaccgtgcaggcctggctgagcagcccgcagaagtttgcccgtgcccacggggtcagcgtccagccagaggcctcggacacccacatcctcctcctggaaggcttcctgctctacagctacaagcccctggtggacttgtacagccgccggtacttcctgaccgtcccgtatgaagagtgcaagtggaggagaagtacccgcaactacacagtccctgatccccccggcctcttcgatggccacgtgtggcccatgtaccagaagtataggcaggagatggaggccaacggtgtggaagtggtctacctggaacngcattgaaattccccgaaaaaagaactcttcccgttgaaattccttggaaaaaaaatttcanaaactccccttgcttgaaanccgcctccccaangaaaattcan

SEQ ID NO: 65002 - DNA, 1008 bp, Homo sapiens
aatcatcttgttggccctgacctcgttggaaaacgaagctccccgcagggtcccggcctctagggctgctgtgcgggcgggggtggcctggagctatttccattcggcggcgggaacaggtgccggcgcctccgccccatccccaggggccgcctcccccggggcggcctccaggctgccgagacctataaaggcgccaggttttctcaatgaagccgggacgcactccggagcgcactgcgtggtcgcaccctacccgggctgccttggaagtcgtccccgccgcccctccgcaccggcatgaagctcatcgtgggcatcggaggcatgaccaacggcggcaagaccacgctgaccaacagcctgctcagagccctgcccaactgctgcgtgatccatcaggatgacttcttcaagccccaagaccaaatagcagttggggaagacggcttcaaacagtgggacgtgctggagtctctggacatggaggccatgctggacaccgtgcaggcctggctgagcagcccgcagaagtttgcccgtgcccacggggtcagcgtccagccagaggcctcggacacccacatcctcctcctggaaggcttcctgctctacagctacaagtaccagaagtataggcaggagatggaggccaacggtgtggaagtggtctacctggacggcatgaagtcccgagaggagctcttccgtgaagtcctggaagacattcagaactcgctgctgaaccgctcccaggaatcagccccctccccggctcgcccagccaggacacagggacccggacgcggatgcggccacagaacggccaggcctgcagcgtcccagcaggacagcatgtgagcgtttccctatgggggtgtctgtacgtaggagagtggaggccccactcccagttgggcgtcccggagctcagggactgagccccaagacgcctctgtaacctcgctgcagcttcagtagtaaactgggtcctgtttttttaaaagt

SEQ ID NO: 65003 - DNA, 546 bp, Homo sapiens
aaggttaggcatacagttatggtatgatccagcaattccacttctagttatatacctaaggtcacacaaaaacttgtacaccagtattcagagcagcactattcacaatagcccaaaggtagaaatacccaaatgtgcatcaaatgataaatggataaatagaatgtagtatatcctacaatgagaattattcagccaaaaaaaggcgtgaaatatcaatacctgctataacatggatgaaccttgaaaacattatgttaagtgaaagaaagaagcaaaggaccatatattggatgattccatgcatatgaaacattcagaatagggcaatccgtagagaggaaatagattagtggttgccagaggctgagcaaaaaggggaattgggaagtacggggtttctctttggggtggtaaaaatattctcatattagatagtggtagtagctacacaccattgaggattacacattgaattgtacactttgcaatgtttaaaataattaattttgtgttatatgaattttacctcaataaaaattttca

SEQ ID NO: 65004 - DNA, 254 bp, Homo sapiens
aaggcactcacactacctgtgaaacagtatagttatttgtatgtaggtctggatttgttataaatgtatattgcaaactctagggcaaccaggaaggagataaattataatcatataaaatgttctattaaactcaccaagagggctgggcacaatggctcatgcctgtaatcccagcactttgggaggccgaggcaggcagatcacttgaggccaggagtttgagaccagcatggccaacatggtgaaaccct

SEQ ID NO: 65005 - DNA, 485 bp, Homo sapiens
cctcctgagtagctgggattacaggtgcgctgtaatttttgtatttttagtagagacgggtttcaccatcttggccaggctggtcttgaactcctgacctcatgatccacccgcctgggcctcccaaagtgctgggattccaggcgtgagccaccgcgtccggccgcctggctaatttttgtattttcaatagagacggggtttcgccatgttgtccagactggtctcgagctcctgacctcaagtgatcctcctgcctcaccctcccaaagtgttgggattacaggcataagtcaccgcccctggctgatactacttattttaaaatgatgaacaaagtgaagggcagtttctgtagctctctacttgagtcacttggagcagggattctgaacgctagagacctgaatacccagtttgtgaataagtttcctgtctctctcttagctgcttcacttcatattcttagtatctttgttaaaggg

SEQ ID NO: 65006 - DNA, 319 bp, Homo sapiens
gatgctggtgttacgcttcctgcacagcctgcagaactgtgagctagttaaacctcttttcttataaattatccagtctcaggtatttctttatagcaatacaagaatggcctaccacgagtgatacctgtatttaatatacagccttcacaaaatatagtacagacttcctaaaaaaaatggatactctgtaaatttccttgttcatactacttctccagaatctgctaagagatggtatagaaatgataataaaatgatagtttacatttattaaaatatgggtaccaaaataagcacattcacaagattaatcaag

SEQ ID NO: 65007 - DNA, 365 bp, Homo sapiens
aaccttaagtttcttacttaggaaaacctgaaattcgcagtctataaaaatgattaactgggaaataactttcaatgataactctcagttttcaaaagtaatagagccccaaggccaaaaataaatgggccccaaaaatggcagattctcagatttcaaaaaaatagcatacacgcagacacacacatgaaaaaatgtggaaaagaaaaataagcagttatgaaaaaagctatggaatctcttaattacttgccatctgaaggtcccatgccagtgacaaatgccacagaaaagtttcattttacctttagccttcacactaatcagaccctgattaagtcgagacagccagcccagagcacctt

SEQ ID NO: 65008 - DNA, 303 bp, Homo sapiens
taaccagccagactggaggtatttcacttaaatcccaagtattcagttgagactccagaaagccataggaaaaatggctactctagccttaagagtgtcctaacaaaaacttaaagtaagccttaatatgatcagactgatccaccagaaaataacttctttccagaacaaaattcaatgcactttaaaagaaaataacaaatccagattatcaataaatacagtacataatacccagtaaatcatcaagttatgaggtatgttaagagacaggaaagtgtgacacataatctgggaggaaaa

SEQ ID NO: 65009 - DNA, 467 bp, Homo sapiens
acgtcctcctcacgccgatcctttccctctttcttccccttggacctctgtcctcaactttcttctgtccctttcctcgaaggacacctctcccaggactggggccgcgctccagggctccccctcccccgccacccgcgcagcccggcatatgcctcgacccagcacccgggcctcagaggagctggggtgaggcctgggacgtgacagactaggtccctgccctctggggcttccattccgtgggggagcagcagaaactggcgcgtctacctttgccagtagctaggagtgccatgagaacaagggaaggggtgggagggcgtcgcctacggagacgaaggaaggcctcccgcgctcatccgcctccgccttcggagcactgtgcttggtgtcataactttttactgaaaaaaaaatttcaaagagaaaatattctaaaataaacagcaataaatcagatgaag

SEQ ID NO: 65010 - DNA, 316 bp, Homo sapiens
atcagtaacatcaaacttgataatgtcaacaatcccttcttggcctgtgtggatatagcagatgaggcctctgttaatctcatcctgggtaaagttcattcccagagtaagattgttcctcacttctcctctgggttttctcagcctctgtagaagcccttgttgaggcccagaatggaggacaaaactgaggcttttatcatctgagtcaagatctgtggccttgaggatccgatttgtgatgatctcagagtgtcctttctctaccttcagcccattgttgacagtcaggtgaggagtttcatcatccactagg

SEQ ID NO: 65011 - DNA, 859 bp, Homo sapiens
  misc_feature (1)..(3): n is a, c, g, or t
  misc_feature (70)..(70): n is a, c, g, or t
  misc_feature (100)..(100): n is a, c, g, or t
  misc_feature (191)..(191): n is a, c, g, or t
  misc_feature (242)..(242): n is a, c, g, or t
  misc_feature (265)..(265): n is a, c, g, or t
  misc_feature (336)..(336): n is a, c, g, or t
  misc_feature (381)..(381): n is a, c, g, or t
  misc_feature (562)..(562): n is a, c, g, or t
  misc_feature (808)..(808): n is a, c, g, or t
nnngttatcaggtatactagttaacatgtttgacagcattctcaaaccttatatagcctggctgggcacngcggctcatgcccataatcccagcacttcnggaggtggatgtgggaggatcacttgaggccaggagttcaaaaccatcctggtcaacatagtgaaaccctgtctctacaaaagtagaaaantttttttgaaaattagctgagcatggtggcatgcacctgtagttccagctnctcaggagactgaggcagaggantgcttgagcccaggagttcaaggctgcagtgaggcatgattgcgccactgcattccagcctaagcaacagnacaagactgtctcaataaacaaaaaaacaccttatatatccttantagttttttgtccagttctgtcgataactgagaaggggatattgaaacctataacaacaacgatgtattgttcgctttgctgattagttctgtcagctgttacttcttgtattttgaagttatgttagtaagtgtatacatatttaggatcattatgtcttcattatctgttgactttttntatgtaaagaactgtccctcgtgggctgtgtgtggttgcacaggcctgtattcccagcgcttttgggaggccaaggcaaggcaggctgatttcttgagcccagcaattgagacctgcttgggcaacatgacgaaaccctgtctctacaaaaaaacacagaaattaacccagcgtggtagtcccaactacttgggaggttgagctgggtggattgcttggcccagggggtcgaggcagcagtgagcngagatcacaccactgcactccagcctgagcaatagagcaagaccctgtctc

SEQ ID NO: 65012 - DNA, 123 bp, Homo sapiens
tttactctaataaaccaatattttagattaagggaaaagagaaatggggtaagaccagcttatcttagtgaccaaagaactgaaaaaatgagaacactggaaagccaagtctcactgagtctg

SEQ ID NO: 65013 - DNA, 434 bp, Homo sapiens
tcagagcaacaaatttgtattttctaaagacatgaataatttcaaataaaagcaatgatgaaatatacatgaacattaccatgcatggttttttagttggaaaaatgtccttatagttacaagagctatttcacagtgttgtattgctgagagctatttgattaggttataatacaagagaaaaaacatttacagaaagctcaaatccagtaacctcatcaggatcaggaaacagcattgtactaaccaacgaggaaatgagagagctggaccctggacacaaaatgaggaatcggtatccctgcatcaaaatcactgcctgaaccatgcaccaaagctcaagcctggctgaaggatattgtgcttcccaggaggatacctggcccctgcttcataggggacatctctgaggtccttatagactcatccatgtc

SEQ ID NO: 65014 - DNA, 622 bp, Homo sapiens
cgcagcgtagctgtaagcacaagaagagattcagaaaagtccaacagggttgggttatgaattttacttctggttattcttagctctatatatataatacagggacatttcttaactagtctcagccttcatgtctagatttgtaaaatgggcttagtcaaggatttcaaagagtaattcaatcattatggaaaatacttagagtccatgacacaaagtattctgggagtttggaggagcatatgaaagaaagttgttatgaatactattcagtgctcagtttagatttcctgttactggcagggaggatttagagtaaaattttcagctctatattgtatttgttttgacttaggtaaattaacaattttaaagtcagttaattataggtgtgtaaattaaaagttaaggagcagcttgaatgtatctctttggggagtgtctgggcagcctgagcctccgtggctgctaattgaagaggaagaaaggggtcctgatgaaaaagttaggagttcctgaattttagtccatgctctgctaccatacattgtgaatatgaacaggaattttttttttttttttttttcaagactccatctcaacaacaacaacaaaaaaaaaa

SEQ ID NO: 65015 - DNA, 630 bp, Homo sapiens
aaaaatcttaaggcccacctcccttttcttgcaatttttaaatacaggatataaattcaaacattaagagttaatacgtggaaaatactataggtgttttagaaaacaaagataagacaattcctaacctagagcaatttaaaatttatgagccattagggaaatgcaaataaatgagatattactatgtgctcactaggatagctgaaatcaaaaggcagacaaataacaagtgttggcaagatgtggaaaaattggagccttcatacacctttggaaggagtgtaaatactgcagctgcttagaaaagcagtatggaagttccttaaaaagttagttacatatagtcgggcgcattagctcacacctgtaatcccagcactttggaaggccgagttaggtggatcacctggggtcgggagtttgagaccagcctgaccaacatggagaaaccccatctctactaaaaatacaaaataattagccaggcatggtggcacatgcctgtaatcccggctacttgcgaggctgaggcaggagaattgcctaaacccaagaggcagaagttgcggtgagccaagaccatgccattgcactccagcctgggcaacaagagcaaaagtccatatc

SEQ ID NO: 65016 - DNA, 861 bp, Homo sapiens
gggtggcaacattttactaggaaatcccatactcttgatgcataacggccttttctgggcagcattttgaaaatcacagtttgtattaggaagcactgtatttagagaatcttcatggactgtgataaagaaaaaaaacaaaagaaaaccccaaaaaacaaaaaaaaatactaaatatataacatgtatttaatagtaagtttttttgtggcccccacagatacacagagtttggcaaacagaacaaagcatatgtaccaacaatgcatgtttatattctgtgccatgccaggggcaaattcatagttggcctgtttccataagtgtggggatggaaccttgaaacacaggacatctcataatgctgtaagcagggaccattgaaattgattcctagagtcttgttctacaacttctttaaaaattactgatttgacagcagtatgtattcaacatttaagactttctgtctaattttgagcatacattcttgactaaggctagcaattagagattctttctttaatttatcagatatctattaattgtctacttttgagtgggctctgtgcaaggcgctaaaaagccagttactggggttctgttccttaaggatcctgagaattgagttgctaagaattaaatcagcaggcgtgcaatatgactgtcaaagcttgacccctgctttgattccctttgttgagacaggttcttataggacctggattctcaccacatcctctgttctgtttagggaacacaaaggtaagctcagctctgtgtccaggagtaccttatagtcctctcccttaactgtgtctgtttcaacttgatccaagatcaggattagtacaagcttgt

SEQ ID NO: 65017 - DNA, 409 bp, Homo sapiens
tttaaatgagcacctggagtctagaattaactaaaaaatatctatgttgatgcatattaagttgattttgaagtcataaattttgacaagaattgatactatggcactgtcataactttacaaaagatgacctgaactaacatgattttatgcttttaccagtggaactccctgaaatatattcagataatttgttattaaagcaaaactaagtttattgaaaccctgtgccaagaaagtacaccattttgacatacttttgcagtgtttcagcagggaagagtgagaggaagatttttcatgtttgtggagaatggcttaagagagttaaatgagtctttcaaagtgagtagctgattgaaattgagctaaactcagagcataatagtttagatagtctaagaaattg

SEQ ID NO: 65018 - DNA, 3612 bp, Homo sapiens
gcggccgctgcagagattggaatccgcctgccgggcttggcgaaggagaagggaggaggcaggagcgaggagggaggagggccaagggcgggcaggaaggcttaggctcggcgcgtccgtccgcgcgcggcgaagatcgcacggcccgatcgaggggcgaccgggtcggggccgctgcacgccaagggcgaaggccgattcgggccccacttcgccccggcggctcgccgcgcccacccgctccgcgccgagggctggaggatgcgttccctggggtccggacttatgaaaatatgcatcagtttaatactgtcttggaattcatgagatggaagcataggtcaaagctgtttggagaaaatcagaagtacagttttatctagccacatcttggaggagtcgtaagaaagcagtgggagttgaagtcattgtcaagtgcttgcgatcttttacaagaaaatctcactgaatgatagtcatttaaattggtgaagtagcaagaccaattattaaaggtgacagtacacaggaaacattacaattgaacaatgcctcagctatacatttacatcagattattgggagcctatttgttcatcatttctcgtgttcaaggacagaatctggatagtatgcttcatggcactgggatgaaatcagactccgaccagaaaaagtcagaaaatggagtaaccttagcaccagaggataccttgccttttttaaagtgctattgctcagggcactgtccagatgatgctattaataacacatgcataactaatggacattgctttgccatcatagaagaagatgaccagggagaaaccacattagcttcagggtgtatgaaatatgaaggatctgattttcagtgcaaagattctccaaaagcccagctacgccggacaatagaatgttgtcggaccaatttatgtaaccagtatttgcaacccacactgccccctgttgtcataggtccgttttttgatggcagcattcgatggctggttttgctcatttctatggctgtctgcataattgctatgatcatcttctccagctgcttttgttacaaacattattgcaagagcatctcaagcagacgtcgttacaatcgtgatttggaacaggatgaagcatttattccagttggagaatcactaaaagaccttattgaccagtcacaaagttctggtagtgggtctggactacctttattggttcagcgaactattgccaaacagattcagatggtccggcaagttggtaaaggccgatatggagaagtatggatgggcaaatggcgtggcgaaaaagtggcggtgaaagtattctttaccactgaagaagccagctggtttcgagaaacagaaatctaccaaactgtgctaatgcgccatgaaaacatacttggtttcatagcggcagacattaaaggtacaggttcctggactcagctctatttgattactgattaccatgaaaatggatctctctatgacttcctgaaatgtgctacactggacaccagagccctgcttaaattggcttattcagctgcctgtggtctgtgccacctgcacacagaaatttatggcacccaaggaaagcccgcaattgctcatcgagacctaaagagcaaaaacatcctcatcaagaaaaatgggagttgctgcattgctgacctgggccttgctgttaaattcaacagtgacacaaatgaagttgatgtgcccttgaataccagggtgggcaccaaacgctacatggctcccgaagtgctggacgaaagcctgaacaaaaaccacttccagccctacatcatggctgacatctacagcttcggcctaatcatttgggagatggctcgtcgttgtatcacaggagggatcgtggaagaataccaattgccatattacaacatggtaccgagtgatccgtcatacgaagatatgcgtgaggttgtgtgtgtcaaacgtttgcggccaattgtgtctaatcggtggaacagtgatgaatgtctacgagcagttttgaagctaatgtcagaatgctgggcccacaatccagcctccagactcacagcattgagaattaagaagacgcttgccaagatggttgaatcccaagatgtaaaaatctgatggttaaaccatcggaggagaaactctagactgcaagaactgtttttacccatggcatgggtggaattagagtggaataaggatgttaacttggttctcagactctttcttcactacgtgttcacaggctgctaatattaaacctttcagtactcttattaggatacaagctgggaacttctaaacacttcattctttatatatggacagctttattttaaatgtggtttttgatgcctttttttaagtgggtttttatgaactgcatcaagacttcaatcctgattagtgtctccagtcaagctctgggtactgaattgcctgttcataaaacggtgctttctgtgaaagccttaagaagataaatgagcgcagcagagatggagaaatagactttgccttttacctgagacattcagttcgtttgtattctacctttgtaaaacagcctatagatgatgatgtgtttgggatactgcttattttatgatagtttgtcctgtgtccttagtgatgtgtgtgtgtctccatgcacatgcacgccgggattcctctgctgccatttgaattagaagaaaataatttatatgcatgcacaggaagatattggtggccggtggttttgtgctttaaaaatgcaatatctgaccaagattcgccaatctcatacaagccatttactttgcaagtgagatagcttccccaccagctttattttttaacatgaaagctgatgccaaggccaaaagaagtttaaagcatctgtaaatttggactgttttccttcaaccaccattttttttgtggttattatttttgtcacggaaagcatcctctccaaagttggagcttctattgccatgaaccatgcttacaaagaaagcacttcttattgaagtgaattcctgcatttgatagcaatgtaagtgcctataaccatgttctatattctttattctcagtaacttttaaaagggaagttatttatattttgtgtataatgtgctttatttgcaaatcacccactcctttacaaccatactttatatatgtacatacattcatactgtagaaaccagctcatgtgtacctcatatcccatccttaagagaagaaatgttataaagtagaactaaatataaattttcagaattaatgcattcaaagtaatatatcaaatccaggactttgttaacttcaggtaaaaacttcattagggtaatatcatctcaattttttcaaatgaaaggattctctaattagaaatttatatgtcagagctgttataaatttatcaactgtcaaatatgttctggacagctaaatcatttgagatttttggttttttgatttctattccctaacttgtgaagacaatgaaaaatcaggcagaaatatttagtatctagtcagtatctgtagctacactgtataactgttcttcaataaaatggttcatatttta

SEQ ID NO: 65019 - DNA, 2511 bp, Homo sapiens
gggatacgcggatgagggcctgagcgtagtgagaattatttatagccaccacacccagcatatatgatctttttcttaatcctattcactttcatgattattaagattattataaatttattgtagaagtacagttatatgtgtaaatgtagaaatataatttttagtaacacattcacgacttggtgtcaggcgaattaaagtttcactatctgcacatgatacctaagtttttctcagtatccagaatgagcattacttctccctagcctatctctgatgataactaaccttttaaactcatcaactggacaggtttcatagcggcagacattaaaggtacaggttcctggactcagctctatttgattactgattaccatgaaaatggatctctctatgacttcctgaaatgtgctacactggacaccagagccctgcttaaattggcttattcagctgcctgtggtctgtgccacctgcacacagaaatttatggcacccaaggaaagcccgcaattgctcatcgagacctaaagagcaaaaacatcctcatcaagaaaaatgggagttgctgcattgctgacctgggccttgctgttaaattcaacagtgacacaaatgaagttgatgtgcccttgaataccagggtgggcaccaaacgctacatggctcccgaagtgctggacgaaagcctgaacaaaaaccacttccagccctacatcatggctgacatctacagcttcggcctaatcatttgggagatggctcgtcgttgtatcacaggagggatcgtggaagaataccaattgccatattacaacatggtaccgagtgatccgtcatacgaagatatgcgtgaggttgtgtgtgtcaaacgtttgcggccaattgtgtctaatcggtggaacagtgatgaatgtctacgagcagttttgaagctaatgtcagaatgctgggcccacaatccagcctccagactcacagcattgagaattaagaagacgcttgccaagatggttgaatcccaagatgtaaaaatctgatggttaaaccatcggaggagaaactctagactgcaagaactgtttttacccatggcatgggtggaattagagtggaataaggatgttaacttggttctcagactctttcttcactacgtgttcacaggctgctaatattaaacctttcagtactcttattaggatacaagctgggaacttctaaacacttcattctttatatatggacagctttattttaaatgtggtttttgatgcctttttttaagtgggtttttatgaactgcatcaagacttcaatcctgattagtgtctccagtcaagctctgggtactgaattgcctgttcataaaacggtgctttctgtgaaagccttaagaagataaatgagcgcagcagagatggagaaatagactttgccttttacctgagacattcagttcgtttgtattctacctttgtaaaacagcctatagatgatgatgtgtttgggatactgcttattttatgatagtttgtcctgtgtccttagtgatgtgtgtgtgtctccatgcacatgcacgccgggattcctctgctgccatttgaattagaagaaaataatttatatgcatgcacaggaagatattggtggccggtggttttgtgctttaaaaatgcaatatctgaccaagattcgccaatctcatacaagccatttactttgcaagtgagatagcttccccaccagctttattttttaacatgaaagctgatgccaaggccaaaagaagtttaaagcatctgtaaatttggactgttttccttcaaccaccattttttttgtggttattatttttgtcacggaaagcatcctctccaaagttggagcttctattgccatgaaccatgcttacaaagaaagcacttcttattgaagtgaattcctgcatttgatagcaatgtaagtgcctataaccatgttctatattctttattctcagtaacttttaaaagggaagttatttatattttgtgtataatgtgctttatttgcaaatcacccactcctttacaaccatactttatatatgtacatacattcatactgtagaaaccagctcatgtgtacctcatatcccatccttaagagaagaaatgttataaagtagaactaaatataaattttcagaattaatgcattcaaagtaatatatcaaatccaggactttgttaacttcaggtaaaaacttcattagggtaatatcatctcaattttttcaaatgaaaggattctctaattagaaatttatatgtcagagctgttataaatttatcaactgtcaaatatgttctggacagctaaatcatttgagatttttggttttttgatttctattccctaacttgtgaagacaatgaaaaatcaggcagaaatatttagtatctagtcagtatctgtagctacactgtataactgttcttcaataaaatggttcatatttta

SEQ ID NO: 65020 - DNA, 3657 bp, Homo sapiens
gcggccgctgcagagattggaatccgcctgccgggcttggcgaaggagaagggaggaggcaggagcgaggagggaggagggccaagggcgggcaggaaggcttaggctcggcgcgtccgtccgcgcgcggcgaagatcgcacggcccgatcgaggggcgaccgggtcggggccgctgcacgccaagggcgaaggccgattcgggccccacttcgccccggcggctcgccgcgcccacccgctccgcgccgagggctggaggatgcgttccctggggtccggacttatgaaaatatgcatcagtttaatactgtcttggaattcatgagatggaagcataggtcaaagctgtttggagaaaatcagaagtacagttttatctagccacatcttggaggagtcgtaagaaagcagtgggagttgaagtcattgtcaagtgcttgcgatcttttacaagaaaatctcactgaatgatagtcatttaaattggtgaagtagcaagaccaattattaaaggtgacagtacacaggaaacattacaattgaacaatgcctcagctatacatttacatcagattattgggagcctatttgttcatcatttctcgtgttcaaggacagaatctggatagtatgcttcatggcactgggatgaaatcagactccgaccagaaaaagtcagaaaatggagtaaccttagcaccagaggataccttgccttttttaaagtgctattgctcagggcactgtccagatgatgctattaataacacatgcataactaatggacattgctttgccatcatagaagaagatgaccagggagaaaccacattagcttcagggtgtatgaaatatgaaggatctgattttcagtgcaaagattctccaaaagcccagctacgccggacaatagaatgttgtcggaccaatttatgtaaccagtatttgcaacccacactgccccctgttgtcataggtccgttttttgatggcagcattcgatggctggttttgctcatttctatggctgtctgcataattgctatgatcatcttctccagctgcttttgttacaaacattattgcaagagcatctcaagcagacgtcgttacaatcgtgatttggaacaggatgaagcatttattccagttggagaatcactaaaagaccttattgaccagtcacaaagttctggtagtgggtctggactacctttattggttcagcgaactattgccaaacagattcagatggtccggcaagttggtaaaggccgatatggagaagtatggatgggcaaatggcgtggcgaaaaagtggcggtgaaagtattctttaccactgaagaagccagctggtttcgagaaacagaaatctaccaaactgtgctaatgcgccatgaaaacatacttggtttcatagcggcagacattaaaggtacaggttcctggactcagctctatttgattactgattaccatgaaaatggatctctctatgacttcctgaaatgtgctacactggacaccagagccctgcttaaattggcttattcagctgcctgtggtctgtgccacctgcacacagaaatttatggcacccaaggaaagcccgcaattgctcatcgagacctaaagagcaaaaacatcctcatcaagaaaaatgggagttgctgcattgctgacctgggccttgctgttaaattcaacagtgacacaaatgaagttgatgtgcccttgaataccagggtgggcaccaaacgctacatggctcccgaagtgctggacgaaagcctgaacaaaaaccacttccagccctacatcatggctgacatctacagcttcggcctaatcatttgggagatggctcgtcgttgtatcacaggagggatcgtggaagaataccaattgccatattacaacatggtaccgagtgatccgtcatacgaagatatgcgtgaggttgtgtgtgtcaaacgtttgcggccaattgtgtctaatcggtggaacagtgatgaatgtctacgagcagttttgaagctaatgtcagaatgctgggcccacaatccagcctccagactcacagcattgagaattaagaagacgcttgccaagatggttgaatcccaagatgtaaaaatctgatggttaaaccatcggaggagaaactctagactgcaagaactgtttttacccatggcatgggtggaattagagtggaataaggatgttaacttggttctcagactctttcttcactacgtgttcacaggctgctaatattaaacctttcagtactcttattaggatacaagctgggaacttctaaacacttcattctttatatatggacagctttattttaaatgtggtttttgatgcctttttttaagtgggtttttatgaactgcatcaagacttcaatcctgattagtgtctccagtcaagctctgggtactgaattgcctgttcataaaacggtgctttctgtgaaagccttaagaagataaatgagcgcagcagagatggagaaatagactttgccttttacctgagacattcagttcgtttgtattctacctttgtaaaacagcctatagatgatgatgtgtttgggatactgcttattttatgatagtttgtcctgtgtccttagtgatgtgtgtgtgtctccatgcacatgcacgccgggattcctctgctgccatttgaattagaagaaaataatttatatgcatgcacaggaagatattggtggccggtggttttgtgctttaaaaatgcaatatctgaccaagattcgccaatctcatacaagccatttactttgcaagtgagatagcttccccaccagctttattttttaacatgaaagctgatgccaaggccaaaagaagtttaaagcatctgtaaatttggactgttttccttcaaccaccattttttttgtggttattatttttgtcacggaaagcatcctctccaaagttggagcttctattgccatgaaccatgcttacaaagaaagcacttcttattgaagtgaattcctgcatttgatagcaatgtaagtgcctataaccatgttctatattctttattctcagtaacttttaaaagggaagttatttatattttgtgtataatgtgctttatttgcaaatcacccactcctttacaaccatactttatatatgtacatacattcatactgtagaaaccagctcatgtgtacctcatatcccatccttaagagaagaaatgttataaagtagaactaaatataaattttcagaattaatgcattcaaagtaatatatcaaatccaggactttgttaacttcaggtaaaaacttcattagggtaatatcatctcaattttttcaaatgaaaggattctctaattagaaatttatatgtcagagctgttataaatttatcaactgtcaaatatgttctggacagctaaatcatttgagatttttggttttttgatttctattccctaacttgtgaagacaatgaaaaatcaggcagaaatatttagtatctagtcagtatctgtagctacactgtataactgttcttcaataaaatggttcatattttatagatgccttgttatctcaagaaatctgatttacataaacttata

SEQ ID NO: 65021 - DNA, 1760 bp, Homo sapiens
aaccatttttgtgcccatgttttctcattcccttatagggatcgtggaagaataccaattgccatattacaacatggtaccgagtgatccgtcatacgaagatatgcgtgaggttgtgtgtgtcaaacgtttgcggccaattgtgtctaatcggtggaacagtgatgaatgtctacgagcagttttgaagctaatgtcagaatgctgggcccacaatccagcctccagactcacagcattgagaattaagaagacgcttgccaagatggttgaatcccaagatgtaaaaatctgatggttaaaccatcggaggagaaactctagactgcaagaactgtttttacccatggcatgggtggaattagagtggaataaggatgttaacttggttctcagactctttcttcactacgtgttcacaggctgctaatattaaacctttcagtactcttattaggatacaagctgggaacttctaaacacttcattctttatatatggacagctttattttaaatgtggtttttgatgcctttttttaagtgggtttttatgaactgcatcaagacttcaatcctgattagtgtctccagtcaagctctgggtactgaattgcctgttcataaaacggtgctttctgtgaaagccttaagaagataaatgagcgcagcagagatggagaaatagactttgccttttacctgagacattcagttcgtttgtattctacctttgtaaaacagcctatagatgatgatgtgtttgggatactgcttattttatgatagtttgtcctgtgtccttagtgatgtgtgtgtgtctccatgcacatgcacgccgggattcctctgctgccatttgaattagaagaaaataatttatatgcatgcacaggaagatattggtggccggtggttttgtgctttaaaaatgcaatatctgaccaagattcgccaatctcatacaagccatttactttgcaagtgagatagcttccccaccagctttattttttaacatgaaagctgatgccaaggccaaaagaagtttaaagcatctgtaaatttggactgttttccttcaaccaccattttttttgtggttattatttttgtcacggaaagcatcctctccaaagttggagcttctattgccatgaaccatgcttacaaagaaagcacttcttattgaagtgaattcctgcatttgatagcaatgtaagtgcctataaccatgttctatattctttattctcagtaacttttaaaagggaagttatttatattttgtgtataatgtgctttatttgcaaatcacccactcctttacaaccatactttatatatgtacatacattcatactgtagaaaccagctcatgtgtacctcatatcccatccttaagagaagaaatgttataaagtagaactaaatataaattttcagaattaatgcattcaaagtaatatatcaaatccaggactttgttaacttcaggtaaaaacttcattagggtaatatcatctcaattttttcaaatgaaaggattctctaattagaaatttatatgtcagagctgttataaatttatcaactgtcaaatatgttctggacagctaaatcatttgagatttttggttttttgatttctattccctaacttgtgaagacaatgaaaaatcaggcagaaatatttagtatctagtcagtatctgtagctacactgtataactgttcttcaataaaatggttcatatttta

SEQ ID NO: 65022 - DNA, 914 bp, Homo sapiens
  misc_feature (5)..(5): n is a, c, g, or t
  misc_feature (12)..(12): n is a, c, g, or t
  misc_feature (21)..(21): n is a, c, g, or t
  misc_feature (28)..(28): n is a, c, g, or t
  misc_feature (32)..(32): n is a, c, g, or t
ctgcngtcgctntgatgattnccctcangccncgcactccagactacggaagatattggtggccggtggttttgtgctttaaaaatgcaatatctgaccaagattcgccaatctcatacaagccatttactttgcaagtgagatagcttccccaccagctttattttttaacatgaaagctgatgccaaggccaaaagaagtttaaagcatctgtaaatttggactgttttccttcaaccaccattttttttgtggttattatttttgtcacggaaagcatcctctccaaagttggagcttctattgccatgaaccatgcttacaaagaaagcacttcttattgaagtgaattcctgcatttgatagcaatgtaagtgcctataaccatgttctatattctttattctcagtaacttttaaaagggaagttatttatattttgtgtataatgtgctttatttgcaaatcacccactcctttacaaccatactttatatatgtacatacattcatactgtagaaaccagctcatgtgtacctcatatcccatccttaagagaagaaatgttataaagtagaactaaatataaattttcagaattaatgcattcaaagtaatatatcaaatccaggactttgttaacttcaggtaaaaacttcattagggtaatatcatctcaattttttcaaatgaaaggattctctaattagaaatttatatgtcagagctgttataaatttatcaactgtcaaatatgttctggacagctaaatcatttgagatttttggttttttgatttctattccctaacttgtgaagacaatgaaaaatcaggcagaaatatttagtatctagtcagtatctgtagctacactgtataactgttcttcaataaaatggttcatatttta

SEQ ID NO: 65023 - DNA, 3717 bp, Homo sapiens
gcggccgctgcagagattggaatccgcctgccgggcttggcgaaggagaagggaggaggcaggagcgaggagggaggagggccaagggcgggcaggaaggcttaggctcggcgcgtccgtccgcgcgcggcgaagatcgcacggcccgatcgaggggcgaccgggtcggggccgctgcacgccaagggcgaaggccgattcgggccccacttcgccccggcggctcgccgcgcccacccgctccgcgccgagggctggaggatgcgttccctggggtccggacttatgaaaatatgcatcagtttaatactgtcttggaattcatgagatggaagcataggtcaaagctgtttggagaaaatcagaagtacagttttatctagccacatcttggaggatattacttttttggtccctattaaactatgtggcagcaagtcacaaaggaggaatcagaaagtaacctgctccccacccttggtgtgtagtccagttagcaaggagtcgtaagaaagcagtgggagttgaagtcattgtcaagtgcttgcgatcttttacaagaaaatctcactgaatgatagtcatttaaattggtgaagtagcaagaccaattattaaaggtgacagtacacaggaaacattacaattgaacaatgcctcagctatacatttacatcagattattgggagcctatttgttcatcatttctcgtgttcaaggacagaatctggatagtatgcttcatggcactgggatgaaatcagactccgaccagaaaaagtcagaaaatggagtaaccttagcaccagaggataccttgccttttttaaagtgctattgctcagggcactgtccagatgatgctattaataacacatgcataactaatggacattgctttgccatcatagaagaagatgaccagggagaaaccacattagcttcagggtgtatgaaatatgaaggatctgattttcagtgcaaagattctccaaaagcccagctacgccggacaatagaatgttgtcggaccaatttatgtaaccagtatttgcaacccacactgccccctgttgtcataggtccgttttttgatggcagcattcgatggctggttttgctcatttctatggctgtctgcataattgctatgatcatcttctccagctgcttttgttacaaacattattgcaagagcatctcaagcagacgtcgttacaatcgtgatttggaacaggatgaagcatttattccagttggagaatcactaaaagaccttattgaccagtcacaaagttctggtagtgggtctggactacctttattggttcagcgaactattgccaaacagattcagatggtccggcaagttggtaaaggccgatatggagaagtatggatgggcaaatggcgtggcgaaaaagtggcggtgaaagtattctttaccactgaagaagccagctggtttcgagaaacagaaatctaccaaactgtgctaatgcgccatgaaaacatacttggtttcatagcggcagacattaaaggtacaggttcctggactcagctctatttgattactgattaccatgaaaatggatctctctatgacttcctgaaatgtgctacactggacaccagagccctgcttaaattggcttattcagctgcctgtggtctgtgccacctgcacacagaaatttatggcacccaaggaaagcccgcaattgctcatcgagacctaaagagcaaaaacatcctcatcaagaaaaatgggagttgctgcattgctgacctgggccttgctgttaaattcaacagtgacacaaatgaagttgatgtgcccttgaataccagggtgggcaccaaacgctacatggctcccgaagtgctggacgaaagcctgaacaaaaaccacttccagccctacatcatggctgacatctacagcttcggcctaatcatttgggagatggctcgtcgttgtatcacaggagggatcgtggaagaataccaattgccatattacaacatggtaccgagtgatccgtcatacgaagatatgcgtgaggttgtgtgtgtcaaacgtttgcggccaattgtgtctaatcggtggaacagtgatgaatgtctacgagcagttttgaagctaatgtcagaatgctgggcccacaatccagcctccagactcacagcattgagaattaagaagacgcttgccaagatggttgaatcccaagatgtaaaaatctgatggttaaaccatcggaggagaaactctagactgcaagaactgtttttacccatggcatgggtggaattagagtggaataaggatgttaacttggttctcagactctttcttcactacgtgttcacaggctgctaatattaaacctttcagtactcttattaggatacaagctgggaacttctaaacacttcattctttatatatggacagctttattttaaatgtggtttttgatgcctttttttaagtgggtttttatgaactgcatcaagacttcaatcctgattagtgtctccagtcaagctctgggtactgaattgcctgttcataaaacggtgctttctgtgaaagccttaagaagataaatgagcgcagcagagatggagaaatagactttgccttttacctgagacattcagttcgtttgtattctacctttgtaaaacagcctatagatgatgatgtgtttgggatactgcttattttatgatagtttgtcctgtgtccttagtgatgtgtgtgtgtctccatgcacatgcacgccgggattcctctgctgccatttgaattagaagaaaataatttatatgcatgcacaggaagatattggtggccggtggttttgtgctttaaaaatgcaatatctgaccaagattcgccaatctcatacaagccatttactttgcaagtgagatagcttccccaccagctttattttttaacatgaaagctgatgccaaggccaaaagaagtttaaagcatctgtaaatttggactgttttccttcaaccaccattttttttgtggttattatttttgtcacggaaagcatcctctccaaagttggagcttctattgccatgaaccatgcttacaaagaaagcacttcttattgaagtgaattcctgcatttgatagcaatgtaagtgcctataaccatgttctatattctttattctcagtaacttttaaaagggaagttatttatattttgtgtataatgtgctttatttgcaaatcacccactcctttacaaccatactttatatatgtacatacattcatactgtagaaaccagctcatgtgtacctcatatcccatccttaagagaagaaatgttataaagtagaactaaatataaattttcagaattaatgcattcaaagtaatatatcaaatccaggactttgttaacttcaggtaaaaacttcattagggtaatatcatctcaattttttcaaatgaaaggattctctaattagaaatttatatgtcagagctgttataaatttatcaactgtcaaatatgttctggacagctaaatcatttgagatttttggttttttgatttctattccctaacttgtgaagacaatgaaaaatcaggcagaaatatttagtatctagtcagtatctgtagctacactgtataactgttcttcaataaaatggttcatatttta

SEQ ID NO: 65024 - DNA, 3558 bp, Homo sapiens
gcggccgctgcagagattggaatccgcctgccgggcttggcgaaggagaagggaggaggcaggagcgaggagggaggagggccaagggcgggcaggaaggcttaggctcggcgcgtccgtccgcgcgcggcgaagatcgcacggcccgatcgaggggcgaccgggtcggggccgctgcacgccaagggcgaaggccgattcgggccccacttcgccccggcggctcgccgcgcccacccgctccgcgccgagggctggaggatgcgttccctggggtccggacttatgaaaatatgcatcagtttaatactgtcttggaattcatgagatggaagcataggtcaaagctgtttggagaaaatcagaagtacagttttatctagccacatcttggaggagtcgtaagaaagcagtgggagttgaagtcattgtcaagtgcttgcgatcttttacaagaaaatctcactgaatgatagtcatttaaattggtgaagtagcaagaccaattattaaaggtgacagtacacaggaaacattacaattgaacaatgcctcagctatacatttacatcagattattgggagcctatttgttcatcatttctcgtgttcaaggacagaatctggatagtatgcttcatggcactgggatgaaatcagactccgaccagaaaaagtcagaaaatggagtaaccttagcaccagaggataccttgccttttttaaagtgctattgctcagggcactgtccagatgatgctattaataacacatgcataactaatggacattgctttgccatcatagaagaagatgaccagggagaaaccacattagcttcagggtgtatgaaatatgaaggatctgattttcagtgcaaagattctccaaaagcccagctacgccggacaatagaatgttgtcggaccaatttatgtaaccagtatttgcaacccacactgccccctgttgtcataggtccgttttttgatggcagcattcgatggctggttttgctcatttctatggctgtctgcataattgctatgatcatcttctccagctgcttttgttacaaacattattgcaagagcatctcaagcagacgtcgttacaatcgtgatttggaacaggatgaagcatttattccagttggagaatcactaaaagaccttattgaccagtcacaaagttctggtagtgggtctggactacctttattggttcagcgaactattgccaaacagattcagatggtccggcaagttggtaaaggccgatatggagaagtatggatgggcaaatggcgtggcgaaaaagtggcggtgaaagtattctttaccactgaagaagccagctggtttcgagaaacagaaatctaccaaactgtgctaatgcgccatgaaaacatacttggtttcatagcggcagacattaaaggtacaggttcctggactcagctctatttgattactgattaccatgaaaatggatctctctatgacttcctgaaatgtgctacactggacaccagagccctgcttaaattggcttattcagctgcctgtggtctgtgccacctgcacacagaaatttatggcacccaaggaaagcccgcaattgctcatcgagacctaaagagcaaaaacatcctcatcaagaaaaatgggagttgctgcattgctgacctgggccttgctgttaaattcaacagtgacacaaatgaagttgatgtgcccttgaataccagggtgggcaccaaacgctacatggctcccgaagtgctggacgaaagcctgaacaaaaaccacttccagccctacatcatggctgacatctacagcttcggcctaatcatttgggagatggctcgtcgttgtatcacaggagggatcgtggaagaataccaattgccatattacaacatggtaccgagtgatccgtcatacgaagatatgcgtgaggttgtgtgtgtcaaacgtttgcggccaattgtgtctaatcggtggaacagtgatgaatgtctacgagcagttttgaagctaatgtcagaatgctgggcccacaatccagcctccagactcacagcattgagaattaagaagacgcttgccaagatggttgaatcccaagatgtaaaaatctgatggttaaaccatcggaggagaaactctagactgcaagaactgtttttacccatggcatgggtggaattagagtggaataaggatgttaacttggttctcagactctttcttcactacgtgttcacaggctgctaatattaaacctttcagtactcttattaggatacaagctgggaacttctaaacacttcattctttatatatggacagctttattttaaatgtggtttttgatgcctttttttaagtgggtttttatgaactgcatcaagacttcaatcctgattagtgtctccagtcaagctctgggtactgaattgcctgttcataaaacggtgctttctgtgaaagccttaagaagataaatgagcgcagcagagatggagaaatagactttgccttttacctgagacattcagttcgtttgtattctacctttgtaaaacagcctatagatgatgatgtgtttgggatactgcttattttatgatagtttgtcctgtgtccttagtgatgtgtgtgtgtctccatgcacatgcacgccgggattcctctgctgccatttgaattagaagaaaataatttatatgcatgcacaggaagatattggtggccggtggttttgtgctttaaaaatgcaatatctgaccaagattcgccaatctcatacaagccatttactttgcaagtgagatagcttccccaccagctttattttttaacatgaaagctgatgccaaggccaaaagaagtttaaagcatctgtaaatttggactgttttccttcaaccaccattttttttgtggttattatttttgtcacggaaagcatcctctccaaagttggagcttctattgccatgaaccatgcttacaaagaaagcacttcttattgaagtgaattcctgcatttgatagcaatgtaagtgcctataaccatgttctatattctttattctcagtaacttttaatcctttacaaccatactttatatatgtacatacattcatactgtagaaaccagctcatgtgtacctcatatcccatccttaagagaagaaatgttataaagtagaactaaatataaattttcagaattaatgcattcaaagtaatatatcaaatccaggactttgttaacttcaggtaaaaacttcattagggtaatatcatctcaattttttcaaatgaaaggattctctaattagaaatttatatgtcagagctgttataaatttatcaactgtcaaatatgttctggacagctaaatcatttgagatttttggttttttgatttctattccctaacttgtgaagacaatgaaaaatcaggcagaaatatttagtatctagtcagtatctgtagctacactgtataactgttcttcaataaaatggttcatatttta

SEQ ID NO: 65025 - DNA, 3371 bp, Homo sapiens
gcggccgctgcagagattggaatccgcctgccgggcttggcgaaggagaagggaggaggcaggagcgaggagggaggagggccaagggcgggcaggaaggcttaggctcggcgcgtccgtccgcgcgcggcgaagatcgcacggcccgatcgaggggcgaccgggtcggggccgctgcacgccaagggcgaaggccgattcgggccccacttcgccccggcggctcgccgcgcccacccgctccgcgccgagggctggaggatgcgttccctggggtccggacttatgaaaatatgcatcagtttaatactgtcttggaattcatgagatggaagcataggtcaaagctgtttggagaaaatcagaagtacagttttatctagccacatcttggaggagtcgtaagaaagcagtgggagttgaagtcattgtcaagtgcttgcgatcttttacaagaaaatctcactgaatgatagtcatttaaattggtgaagtagcaagaccaattattaaaggtgacagtacacaggaaacattacaattgaacaatgcctcagctatacatttacatcagattattgggagcctatttgttcatcatttctcgtgttcaaggacagaatctggatagtatgcttcatggcactgggatgaaatcagactccgaccagaaaaagtcagaaaatggagtaaccttagcaccagaggataccttgccttttttaaagtgctattgctcagggcactgtccagatgatgctattaataacacatgcataactaatggacattgctttgccatcatagaagaagatgaccagggagaaaccacattagcttcagggtgtatgaaatatgaaggatctgattttcagtgcaaagattctccaaaagcccagctacgccggacaatagaatgttgtcggaccaatttatgtaaccagtatttgcaacccacactgccccctgttgtcataggtccgttttttgatggcagcattcgatggctggttttgctcatttctatggctgtctgcataattgctatgatcatcttctccagctgcttttgttacaaacattattgcaagagcatctcaagcagacgtcgttacaatcgtgatttggaacaggatgaagcatttattccagttggagaatcactaaaagaccttattgaccagtcacaaagttctggtagtgggtctggactacctttattggttcagcgaactattgccaaacagattcagatggtccggcaagttggtaaaggccgatatggagaagtatggatgggcaaatggcgtggcgaaaaagtggcggtgaaagtattctttaccactgaagaagccagctggtttcgagaaacagaaatctaccaaactgtgctaatgcgccatgaaaacatacttggtttcatagcggcagacattaaaggtacaggttcctggactcagctctatttgattactgattaccatgaaaatggatctctctatgacttcctgaaatgtgctacactggacaccagagccctgcttaaattggcttattcagctgcctgtggtctgtgccacctgcacacagaaatttatggcacccaaggaaagcccgcaattgctcatcgagacctaaagagcaaaaacatcctcatcaagaaaaatgggagttgctgcattgctgacctgggccttgctgttaaattcaacagtgacacaaatgaagttgatgtgcccttgaataccagggtgggcaccaaacgctacatggctcccgaagtgctggacgaaagcctgaacaaaaaccacttccagccctacatcatggctgacatctacagcttcggcctaatcatttgggagatggctcgtcgttgtatcacaggagggatcgtggaagaataccaattgccatattacaacatggtaccgagtgatccgtcatacgaagatatgcgtgaggttgtgtgtgtcaaacgtttgcggccaattgtgtctaatcggtggaacagtgatgaatgtctacgagcagttttgaagctaatgtcagaatgctgggcccacaatccagcctccagactcacagcattgagaattaagaagacgcttgccaagatggttgaatcccaagatgtaaaaatctgatggttaaaccatcggaggagaaactctagactgcaagaactgtttttacccatggcatgggtggaattagagtggaataaggatgttaacttggttctcagactctttcttcactacgtgttcacaggctgctaatattaaacctttcagtactcttattaggatacaagctgggaacttctaaacacttcattctttatatatggacagctttattttaaatgtggtttttgatgcctttttttaagtgggtttttatgaactgcatcaagacttcaatcctgattagtgtctccagtcaagctctgggtactgaattgcctgttcataaaacggtgctttctgtgaaagccttaagaagataaatgagcgcagcagagatggagaaatagactttgccttttacctgagacattcagttcgtttgtattctacctttgtaaaacagcctatagatgatgatgtgtttgggatactgcttattttatgatagtttgtcctgtgtccttagtgatgtgtgtgtgtctccatgcacatgcacgccgggattcctctgctgccatttgaattagaagaaaataatttatatgcatgcacaggaagatattggtggccggtggttttgtgctttaaaaatgcaatatctgaccaagattcgccaatctcatacaagccatttactttgcaagtgagatagcttccccaccagctttattttttaacatgaaagctgatgccaaggccaaaagaagtttaaagcatctgtaaatttggactgttttccttcaaccaccattttttttgtggttattatttttgtcacggaaagcatcctctccaaagttggagcttctattgccatgaaccatgcttacaaagaaagcacttcttattgaagtgaattcctgcatttgatagcaatgtaagtgcctataaccatgttctatattctttattctcagtaacttttaaaagggaagttatttatattttgtgtataatgtgctttatttgcaaatcacccactcctttacaaccatactttatatatgtacatacattcatactgtagaaaccagctcatgtgtacctcatatcccatccttaagagaagaaatgttataaagtagaactaaaattattaaaattttccaagaaaattaaatggcatttccaaaaagttaattattattccaaaattccaagggaactttggtttaactt

SEQ ID NO: 65026 - DNA, 632 bp, Homo sapiens
ctggaccacctcgaccgagttccacctctgccaaaaaaaatcagtgattcattgctgcgtaaggaataaaatcaaactctttagtttatgtgccgaagctcctctgtgggctcctctgtgattcacatctggtcacacaccctacattccagccatcacaaattcctcatggtaatccaaatagctcagccctttcagttactcacttagcccttcagcttgaacctgggtataaacttctccttcaaaagccaacccaaaaggtatccctttcctaaagacttctccaacctgttttctattttatgaattaaaacctcttccttacaccgaaaatattgcatccctatacaacagcattttttttactgctttatatcatagactctcatctacatacacctcccccgaaaaaatgctattccccatctgaattcttgaccatagcatctttgagcacaatgaaatgtgttgtagcgtcccctaagtgtggcaatgattggttaactgattggttatacaatacagagataactgatacactaacttctccttccccttgccttattttttaggttctgcacctggttttctgaacttttttccctaaaccctggttctccttgaatctg

SEQ ID NO: 65027 - DNA, 469 bp, Homo sapiens
aaacaggtgccgtaacagtaaaggggccccataaatgggaaacccaggaggcctctcagagctggacagctggtgcgaaagggagggttacagacctaagtggtccccagacttccggagtctgctatccttcacctcacacactcttaaacgtccatttgcctccaagagcacacacacaccccatcccttaataccctagttttctatcctcttgggtaaatattaatacttttctctctttttttttttcttttggagatagacttgctctgttgcccaggctggagtgcagtggtgcgatcttggatcatggcaacctccgccttccaggttcgagcaattcttgtgtctcagcctttcaagtagctgggaatacacgcatccaccaccatgcctgggcaatttttgtatttttagtagagacagggtttcatcatgttgtccaggctggtcttgaactcctggc

SEQ ID NO: 65028 - DNA, 1154 bp, Homo sapiens
  misc_feature (1)..(1): n is a, c, g, or t
  misc_feature (4)..(8): n is a, c, g, or t
  misc_feature (12)..(13): n is a, c, g, or t
  misc_feature (16)..(16): n is a, c, g, or t
  misc_feature (34)..(34): n is a, c, g, or t
nccnnnnncccnnctncttgggaggctgaggcangagaatggcgtgaacctgggaggtggagtttgcagtgagctgagatcgtgccactgcactccagcctggccgacagagcaagactcttgtctcaaaaaaatatagaattaaactaaattaaaaaataaatggaaccacccagcccatcccctacccacctgtcctgcattttttttctccttatcactgtctcaccactagaggccagctccaccagggcaagggtttttccctgcctgccactgtatgccgagtgtccagaacaaagcctagcacaaggaaaagaaaaaagccatccaggaggaggaggagagagaccaggccttgcaggccaaggcgagcctgaccatcccgctggtgcccgagacggaagatgaccgcaagctggcggctctgctgaagttccacaccctggactcctacgaggacaagcagaaactcaagcggaccgagatcatcagccgctcctggttcccctctgcccccggatccgcctccagcagcaaggtcagcggcgtcctgaagaagctggcacagagccgcagaaccgcgcttgccacctcccccatcaccgtcggggacctgggcatcgtgcggcggaggtctcgggacgtcccggagagcccccagcatgcggccgacacccccaagtctggggaaccgcgggtaccagaggaggctgcccaggaccggcccatgtcccccggagactgtcctccggaaacaactgagacccccaagtgcagcagcccgagggggcaggaagggagccgtcaggacaagcccctgtcgccagcaggctcctcccaggaggcagctgacacccccgacacgcggcacccctgcagtctcggctcctccctcgtggcggactactccgactcggagagtgagtgagcgatccccatcctggagactggacccgctctagaggcccggacacacccaggaggcccctcacagactgcagacccccggctcgcccaccagccctgggagagctcagatgccgcatcctccccagaccgcgccttcctgcaaccgtggagttatttatttggtcctggtgagggtgtttgtgccttgtgagactccgtacattaaagacctgtctcttctt

SEQ ID NO: 65029 - DNA, 1791 bp, Homo sapiens
ccactccggcgtcgcagaacgcttggcgtatcgtccttcagccaatcagcgtggagctgctgcctcgccccgcctcacgccggcgtcctgggggcgcggagagggcgcccaggttcaccgcgctctcagcgcgcacttccgggcacggtcagggcgtgacgtcgggaggagggcagacacgccgctttttggatgcctcctatgcctggcgggagtcttgtctgagctggcaccaccacacggcccacgacatcttcgcagggaagcctgtggaccctctgccaggctccacaagaggtcaggacagtgcagtgtgttcacaaggccagtttctgatcgtccgccccgaggctgaggaccagtaggcagctcccaagatgggtgaaaggaaaggggtcaacaagtactatcctccagacttcaaccctgagaagcatggctctctcaaccgataccacaacagccacccgcttcgggagcgggctcggaagctgtcacagggcatcctcatcatccgattcgaaatgccatataacatctggtgcgatggctgcaagaaccacatcggcatgggtgttcgttacaatgcagaaaagaagaaggtgggcaattactacacaaccccgatctacaggttccggatgaaatgccacctctgtgtcaactacatcgagatgcagacggaccccgccaactgcgactacgtgatcgtgagtggcgcccagcgcaaggaggagcgctgggacatggcggacaatgagcaggtgctgaccacagagcatgagaagaagcagaagctggagacggacgccatgttccggctggagcatggcgaggccgaccgcagcacactcaagaaggcgctgcccacactgagccacatccaggaggcccagagcgcctggaaggacgacttcgccctcaacagcatgctgcggagaaggttccgggaaaagaaaaaagccatccaggaggaggaggagagagaccaggccttgcaggccaaggcgagcctgaccatcccgctggtgcccgagacggaagatgaccgcaagctggcggctctgctgaagttccacaccctggactcctacgaggacaagcagaaactcaagcggaccgagatcatcagccgctcctggttcccctctgcccccggatccgcctccagcagcaaggtcagcggcgtcctgaagaagctggcacagagccgcagaaccgcgcttgccacctcccccatcaccgtcggggacctgggcatcgtgcggcggaggtctcgggacgtcccggagagcccccagcatgcggccgacacccccaagtctggggaaccgcgggtaccagaggaggctgcccaggaccggcccatgtcccccggagactgtcctccggaaacaactgagacccccaagtgcagcagcccgagggggcaggaagggagccgtcaggacaagcccctgtcgccagcaggctcctcccaggaggcagctgacacccccgacacgcggcacccctgcagtctcggctcctccctcgtggcggactactccgactcggagagtgagtgagcgatccccatcctggagactggacccgctctagaggcccggacacacccaggaggcccctcacagactgcagacccccggctcgcccaccagccctgggagagctcagatgccgcatcctccccagaccgcgccttcctgcaaccgtggagttatttatttggtcctggtgagggtgtttgtgccttgtgagactccgtacattaaagacctgtctcttctt

SEQ ID NO: 65030 - DNA, 1880 bp, Homo sapiens
ccactccggcgtcgcagaacgcttggcgtatcgtccttcagccaatcagcgtggagctgctgcctcgccccgcctcacgccggcgtcctgggggcgcggagagggcgcccaggttcaccgcgctctcagcgcgcacttccgggcacggtcagggcgtgacgtcgggaggagggcagacacgccgctttttggatgcctcctatgcctggcgggagtcttgtctgagctggcaccaccacacggcccacgacatcttcgcagggaagcctgtggaccctctgccaggctccacaagaggtcaggacagtgcagtgtgttcacaaggccagtttctgatcgtccgccccgaggctgaggaccagtaggcagctcccaagatgggtgaaaggaaaggggtcaacaagtactatcctccagacttcaaccctgagaagcatggctctctcaaccgataccacaacagccacccgcttcgggagcgggctcggaagctgtcacagggcatcctcatcatccgattcgaaatgccatataacatctggtgcgatggctgcaagaaccacatcggcatgggtgttcgttacaatgcagaaaagaagaaggtgggcaattactacacaaccccgatctacaggttccggatgaaatgccacctctgtgtcaactacatcgagatgcagacggaccccgccaactgcgactacgtgatcgtgagtggcgcccagcgcaaggaggagcgctgggacatggcggacaatgagcaggtgctgaccacaggtgagcgccacccacttacctgcctgggggccctggccctgagtctgcgctggggcccccaaagcccagccgagctctgatcgttgcagagcatgagaagaagcagaagctggagacggacgccatgttccggctggagcatggcgaggccgaccgcagcacactcaagaaggcgctgcccacactgagccacatccaggaggcccagagcgcctggaaggacgacttcgccctcaacagcatgctgcggagaaggttccgggaaaagaaaaaagccatccaggaggaggaggagagagaccaggccttgcaggccaaggcgagcctgaccatcccgctggtgcccgagacggaagatgaccgcaagctggcggctctgctgaagttccacaccctggactcctacgaggacaagcagaaactcaagcggaccgagatcatcagccgctcctggttcccctctgcccccggatccgcctccagcagcaaggtcagcggcgtcctgaagaagctggcacagagccgcagaaccgcgcttgccacctcccccatcaccgtcggggacctgggcatcgtgcggcggaggtctcgggacgtcccggagagcccccagcatgcggccgacacccccaagtctggggaaccgcgggtaccagaggaggctgcccaggaccggcccatgtcccccggagactgtcctccggaaacaactgagacccccaagtgcagcagcccgagggggcaggaagggagccgtcaggacaagcccctgtcgccagcaggctcctcccaggaggcagctgacacccccgacacgcggcacccctgcagtctcggctcctccctcgtggcggactactccgactcggagagtgagtgagcgatccccatcctggagactggacccgctctagaggcccggacacacccaggaggcccctcacagactgcagacccccggctcgcccaccagccctgggagagctcagatgccgcatcctccccagaccgcgccttcctgcaaccgtggagttatttatttggtcctggtgagggtgtttgtgccttgtgagactccgtacattaaagacctgtctcttctt

SEQ ID NO: 65031 - DNA, 2034 bp, Homo sapiens
tgcgcctcggagctggcttcaaccagcgaaggctgaacccgcttccagggtcctcgccgagctgggagttaggatccgagggggccaagagggataagaaaacttctctgggtgcccacgtggtactgagcgcccttgggagggctctggagaagaccatcgccttccagggtagctccctccctcaaaggtttgagatcatggtccagttctcgggtctcccagcctcagtttccccatttgtaggaaaggcgttcacagcctctatctcagaggaggctttgaggattcagagagctcagaagaggggaaggaaactgaggtccagaaaagttatgactcgccccaaggggattgcctggcaggacgtgaaggggaagaggcccaccctggagtaaccctcactggagaatccagagacacgccgctttttggatgcctcctatgcctggcgggagtcttgtctgagctggcaccaccacacggcccacgacatcttcgcagggaagcctgtggaccctctgccaggctccacaagaggtcaggacagtgcagtgtgttcacaaggccagtttctgatcgtccgccccgaggctgaggaccagtaggcagctcccaagatgggtgaaaggaaaggggtcaacaagtactatcctccagacttcaaccctgagaagcatggctctctcaaccgataccacaacagccacccgcttcgggagcgggctcggaagctgtcacagggcatcctcatcatccgattcgaaatgccatataacatctggtgcgatggctgcaagaaccacatcggcatgggtgttcgttacaatgcagaaaagaagaaggtgggcaattactacacaaccccgatctacaggttccggatgaaatgccacctctgtgtcaactacatcgagatgcagacggaccccgccaactgcgactacgtgatcgtgagtggcgcccagcgcaaggaggagcgctgggacatggcggacaatgagcaggtgctgaccacagagcatgagaagaagcagaagctggagacggacgccatgttccggctggagcatggcgaggccgaccgcagcacactcaagaaggcgctgcccacactgagccacatccaggaggcccagagcgcctggaaggacgacttcgccctcaacagcatgctgcggagaaggttccgggaaaagaaaaaagccatccaggaggaggaggagagagaccaggccttgcaggccaaggcgagcctgaccatcccgctggtgcccgagacggaagatgaccgcaagctggcggctctgctgaagttccacaccctggactcctacgaggacaagcagaaactcaagcggaccgagatcatcagccgctcctggttcccctctgcccccggatccgcctccagcagcaaggtcagcggcgtcctgaagaagctggcacagagccgcagaaccgcgcttgccacctcccccatcaccgtcggggacctgggcatcgtgcggcggaggtctcgggacgtcccggagagcccccagcatgcggccgacacccccaagtctggggaaccgcgggtaccagaggaggctgcccaggaccggcccatgtcccccggagactgtcctccggaaacaactgagacccccaagtgcagcagcccgagggggcaggaagggagccgtcaggacaagcccctgtcgccagcaggctcctcccaggaggcagctgacacccccgacacgcggcacccctgcagtctcggctcctccctcgtggcggactactccgactcggagagtgagtgagcgatccccatcctggagactggacccgctctagaggcccggacacacccaggaggcccctcacagactgcagacccccggctcgcccaccagccctgggagagctcagatgccgcatcctccccagaccgcgccttcctgcaaccgtggagttatttatttggtcctggtgagggtgtttgtgccttgtgagactccgtacattaaagacctgtctcttctt

SEQ ID NO: 65032 - DNA, 1916 bp, Homo sapiens
tgcgcctcggagctggcttcaaccagcgaaggctgaacccgcttccagggtcctcgccgagctgggagttaggatccgagggggccaagagggataagaaaacttctctgggtgcccacgtggtactgagcgcccttgggagggctctggagaagaccatcgccttccagggtagctccctccctcaaagggaaggaaactgaggtccagaaaagttatgactcgccccaaggggattgcctggcaggacgtgaaggggaagaggcccaccctggagtaaccctcactggagaatccagagacacgccgctttttggatgcctcctatgcctggcgggagtcttgtctgagctggcaccaccacacggcccacgacatcttcgcagggaagcctgtggaccctctgccaggctccacaagaggtcaggacagtgcagtgtgttcacaaggccagtttctgatcgtccgccccgaggctgaggaccagtaggcagctcccaagatgggtgaaaggaaaggggtcaacaagtactatcctccagacttcaaccctgagaagcatggctctctcaaccgataccacaacagccacccgcttcgggagcgggctcggaagctgtcacagggcatcctcatcatccgattcgaaatgccatataacatctggtgcgatggctgcaagaaccacatcggcatgggtgttcgttacaatgcagaaaagaagaaggtgggcaattactacacaaccccgatctacaggttccggatgaaatgccacctctgtgtcaactacatcgagatgcagacggaccccgccaactgcgactacgtgatcgtgagtggcgcccagcgcaaggaggagcgctgggacatggcggacaatgagcaggtgctgaccacagagcatgagaagaagcagaagctggagacggacgccatgttccggctggagcatggcgaggccgaccgcagcacactcaagaaggcgctgcccacactgagccacatccaggaggcccagagcgcctggaaggacgacttcgccctcaacagcatgctgcggagaaggttccgggaaaagaaaaaagccatccaggaggaggaggagagagaccaggccttgcaggccaaggcgagcctgaccatcccgctggtgcccgagacggaagatgaccgcaagctggcggctctgctgaagttccacaccctggactcctacgaggacaagcagaaactcaagcggaccgagatcatcagccgctcctggttcccctctgcccccggatccgcctccagcagcaaggtcagcggcgtcctgaagaagctggcacagagccgcagaaccgcgcttgccacctcccccatcaccgtcggggacctgggcatcgtgcggcggaggtctcgggacgtcccggagagcccccagcatgcggccgacacccccaagtctggggaaccgcgggtaccagaggaggctgcccaggaccggcccatgtcccccggagactgtcctccggaaacaactgagacccccaagtgcagcagcccgagggggcaggaagggagccgtcaggacaagcccctgtcgccagcaggctcctcccaggaggcagctgacacccccgacacgcggcacccctgcagtctcggctcctccctcgtggcggactactccgactcggagagtgagtgagcgatccccatcctggagactggacccgctctagaggcccggacacacccaggaggcccctcacagactgcagacccccggctcgcccaccagccctgggagagctcagatgccgcatcctccccagaccgcgccttcctgcaaccgtggagttatttatttggtcctggtgagggtgtttgtgccttgtgagactccgtacattaaagacctgtctcttctt

SEQ ID NO: 65033 - DNA, 1897 bp, Homo sapiens
tgcgcctcggagctggcttcaaccagcgaaggctgaacccgcttccagggtcctcgccgagctgggagttaggatccgagggggccaagagggataagaaaacttctctgggtgcccacgtggtactgagcgcccttgggagggctctggagaagaccatcgccttccaggggaaggaaactgaggtccagaaaagttatgactcgccccaaggggattgcctggcaggacgtgaaggggaagaggcccaccctggagtaaccctcactggagaatccagagacacgccgctttttggatgcctcctatgcctggcgggagtcttgtctgagctggcaccaccacacggcccacgacatcttcgcagggaagcctgtggaccctctgccaggctccacaagaggtcaggacagtgcagtgtgttcacaaggccagtttctgatcgtccgccccgaggctgaggaccagtaggcagctcccaagatgggtgaaaggaaaggggtcaacaagtactatcctccagacttcaaccctgagaagcatggctctctcaaccgataccacaacagccacccgcttcgggagcgggctcggaagctgtcacagggcatcctcatcatccgattcgaaatgccatataacatctggtgcgatggctgcaagaaccacatcggcatgggtgttcgttacaatgcagaaaagaagaaggtgggcaattactacacaaccccgatctacaggttccggatgaaatgccacctctgtgtcaactacatcgagatgcagacggaccccgccaactgcgactacgtgatcgtgagtggcgcccagcgcaaggaggagcgctgggacatggcggacaatgagcaggtgctgaccacagagcatgagaagaagcagaagctggagacggacgccatgttccggctggagcatggcgaggccgaccgcagcacactcaagaaggcgctgcccacactgagccacatccaggaggcccagagcgcctggaaggacgacttcgccctcaacagcatgctgcggagaaggttccgggaaaagaaaaaagccatccaggaggaggaggagagagaccaggccttgcaggccaaggcgagcctgaccatcccgctggtgcccgagacggaagatgaccgcaagctggcggctctgctgaagttccacaccctggactcctacgaggacaagcagaaactcaagcggaccgagatcatcagccgctcctggttcccctctgcccccggatccgcctccagcagcaaggtcagcggcgtcctgaagaagctggcacagagccgcagaaccgcgcttgccacctcccccatcaccgtcggggacctgggcatcgtgcggcggaggtctcgggacgtcccggagagcccccagcatgcggccgacacccccaagtctggggaaccgcgggtaccagaggaggctgcccaggaccggcccatgtcccccggagactgtcctccggaaacaactgagacccccaagtgcagcagcccgagggggcaggaagggagccgtcaggacaagcccctgtcgccagcaggctcctcccaggaggcagctgacacccccgacacgcggcacccctgcagtctcggctcctccctcgtggcggactactccgactcggagagtgagtgagcgatccccatcctggagactggacccgctctagaggcccggacacacccaggaggcccctcacagactgcagacccccggctcgcccaccagccctgggagagctcagatgccgcatcctccccagaccgcgccttcctgcaaccgtggagttatttatttggtcctggtgagggtgtttgtgccttgtgagactccgtacattaaagacctgtctcttctt

SEQ ID NO: 65034 - DNA, 1667 bp, Homo sapiens
aattcggctagtacgagcctggtgtgagtcggacgagggtcggaggagggcgacacgccgctttttggatgcctcctatgcctggcgggagtcttgtctgagctggcaccaccacacggcccacgacatcttcgcagggaagcctgtggaccctctgccaggctccacaagaggtcaggacagtgcagtgtgttcacaaggccagtttctgatcgtccgccccgaggctgaggaccagtaggcagctcccaagatgggtgaaaggaaaggggtcaacaagtactatcctccagacttcaaccctgagaagcatggctctctcaaccgataccacaacagccacccgcttcgggagcgggctcggaagctgtcacagggcatcctcatcatccgattcgaaatgccatataacatctggtgcgatggctgcaagaaccacatcggcatgggtgttcgttacaatgcagaaaagaagaaggtgggcaattactacacaaccccgatctacaggttccggatgaaatgccacctctgtgtcaactacatcgagatgcagacggaccccgccaactgcgactacgtgatcgtgagtggcgcccagcgcaaggaggagcgctgggacatggcggacaatgagcaggtgctgaccacagagcatgagaagaagcagaagctggagacggacgccatgttccggctggagcatggcgaggccgaccgcagcacactcaagaaggcgctgcccacactgagccacatccaggaggcccagagcgcctggaaggacgacttcgccctcaacagcatgctgcggagaaggttccgggaaaagaaaaaagccatccaggaggaggaggagagagaccaggccttgcaggccaaggcgagcctgaccatcccgctggtgcccgagacggaagatgaccgcaagctggcggctctgctgaagttccacaccctggactcctacgaggacaagcagaaactcaagcggaccgagatcatcagccgctcctggttcccctctgcccccggatccgcctccagcagcaaggtcagcggcgtcctgaagaagctggcacagagccgcagaaccgcgcttgccacctcccccatcaccgtcggggacctgggcatcgtgcggcggaggtctcgggacgtcccggagagcccccagcatgcggccgacacccccaagtctggggaaccgcgggtaccagaggaggctgcccaggaccggcccatgtcccccggagactgtcctccggaaacaactgagacccccaagtgcagcagcccgagggggcaggaagggagccgtcaggacaagcccctgtcgccagcaggctcctcccaggaggcagctgacacccccgacacgcggcacccctgcagtctcggctcctccctcgtggcggactactccgactcggagagtgagtgagcgatccccatcctggagactggacccgctctagaggcccggacacacccaggaggcccctcacagactgcagacccccggctcgcccaccagccctgggagagctcagatgccgcatcctccccagaccgcgccttcctgcaaccgtggagttatttatttggtcctggtgagggtgtttgtgccttgtgagactccgtacattaaagacctgtctcttctt

SEQ ID NO: 65035 - DNA, 1958 bp, Homo sapiens
ccactccggcgtcgcagaacgcttggcgtatcgtccttcagccaatcagcgtggagctgctgcctcgccccgcctcacgccggcgtcctgggggcgcggagagggcgcccaggttcaccgcgctctcagcgcgcacttccgggcacggtcagggcgtgacgtcgggaggagggcagacacgccgctttttggatgcctcctatgcctggcgggagtcttgtctgagctggcaccaccacacggcccacgacatcttcgcagggaagcctgtggaccctctgccaggctccacaagaggtcaggacagtgcagtgtgttcacaaggccagtttctgatcgtccgccccgaggctgaggaccagtaggcagctcccaagatgggtgaaaggaaaggggtcaacaagtactatcctccagacttcaaccctgagaagcatggctctctcaaccgataccacaacagccacccgcttcgggagcgggctcggaagctgtcacagggcatcctcatcatccgattcgaaatgccatataacatctggtgcgatggctgcaagaaccacatcggcatgggtgttcgttacaatgcagaaaagaagaaggtgggcaattactacacaaccccgatctacaggttccggatgaaatgccacctctgtgtcaactacatcgagatgcagacggaccccgccaactgcgactacgtgatcgtgagtggcgcccagcgcaaggaggagcgctgggacatggcggacaatgagcaggtgctgaccacaggtgagcgccacccacttacctgcctgggggccctggccctgagtctgcgctggggcccccaaagcccagccgagctctgatcgttgcagagcatgagaagaagcagaagctggagacggacgccatgttccggctggagcatggcgaggccgaccgcagcacactcaagaaggcgctgcccacactgagccacatccaggaggcccagagcgcctggaaggacgacttcgccctcaacagcatgctgcggagaaggttccggaggccagctccaccagggcaagggtttttccctgcctgccactgtatgccgagtgtccagaacaaagcctagcacaaggaaaagaaaaaagccatccaggaggaggaggagagagaccaggccttgcaggccaaggcgagcctgaccatcccgctggtgcccgagacggaagatgaccgcaagctggcggctctgctgaagttccacaccctggactcctacgaggacaagcagaaactcaagcggaccgagatcatcagccgctcctggttcccctctgcccccggatccgcctccagcagcaaggtcagcggcgtcctgaagaagctggcacagagccgcagaaccgcgcttgccacctcccccatcaccgtcggggacctgggcatcgtgcggcggaggtctcgggacgtcccggagagcccccagcatgcggccgacacccccaagtctggggaaccgcgggtaccagaggaggctgcccaggaccggcccatgtcccccggagactgtcctccggaaacaactgagacccccaagtgcagcagcccgagggggcaggaagggagccgtcaggacaagcccctgtcgccagcaggctcctcccaggaggcagctgacacccccgacacgcggcacccctgcagtctcggctcctccctcgtggcggactactccgactcggagagtgagtgagcgatccccatcctggagactggacccgctctagaggcccggacacacccaggaggcccctcacagactgcagacccccggctcgcccaccagccctgggagagctcagatgccgcatcctccccagaccgcgccttcctgcaaccgtggagttatttatttggtcctggtgagggtgtttgtgccttgtgagactccgtacattaaagacctgtctcttctt

SEQ ID NO: 65036 - DNA, 1665 bp, Homo sapiens
ccactccggcgtcgcagaacgcttggcgtatcgtccttcagccaatcagcgtggagctgctgcctcgccccgcctcacgccggcgtcctgggggcgcggagagggcgcccaggttcaccgcgctctcagcgcgcacttccgggcacggtcagggcgtgacgtcgggaggagggcagggtgaaaggaaaggggtcaacaagtactatcctccagacttcaaccctgagaagcatggctctctcaaccgataccacaacagccacccgcttcgggagcgggctcggaagctgtcacagggcatcctcatcatccgattcgaaatgccatataacatctggtgcgatggctgcaagaaccacatcggcatgggtgttcgttacaatgcagaaaagaagaaggtgggcaattactacacaaccccgatctacaggttccggatgaaatgccacctctgtgtcaactacatcgagatgcagacggaccccgccaactgcgactacgtgatcgtgagtggcgcccagcgcaaggaggagcgctgggacatggcggacaatgagcaggtgctgaccacagagcatgagaagaagcagaagctggagacggacgccatgttccggctggagcatggcgaggccgaccgcagcacactcaagaaggcgctgcccacactgagccacatccaggaggcccagagcgcctggaaggacgacttcgccctcaacagcatgctgcggagaaggttccggaggccagctccaccagggcaagggtttttccctgcctgccactgtatgccgagtgtccagaacaaagcctagcacaaggaaaagaaaaaagccatccaggaggaggaggagagagaccaggccttgcaggccaaggcgagcctgaccatcccgctggtgcccgagacggaagatgaccgcaagctggcggctctgctgaagttccacaccctggactcctacgaggacaagcagaaactcaagcggaccgagatcatcagccgctcctggttcccctctgcccccggatccgcctccagcagcaaggtcagcggcgtcctgaagaagctggcacagagccgcagaaccgcgcttgccacctcccccatcaccgtcggggacctgggcatcgtgcggcggaggtctcgggacgtcccggagagcccccagcatgcggccgacacccccaagtctggggaaccgcgggtaccagaggaggctgcccaggaccggcccatgtcccccggagactgtcctccggaaacaactgagacccccaagtgcagcagcccgagggggcaggaagggagccgtcaggacaagcccctgtcgccagcaggctcctcccaggaggcagctgacacccccgacacgcggcacccctgcagtctcggctcctccctcgtggcggactactccgactcggagagtgagtgagcgatccccatcctggagactggacccgctctagaggcccggacacacccaggaggcccctcacagactgcagacccccggctcgcccaccagccctgggagagctcagatgccgcatcctccccagaccgcgccttcctgcaaccgtggagttatttatttggtcctggtgagggtgtttgtgccttgtgagactccgtacattaaagacctgtctcttctt

SEQ ID NO: 65037 - DNA, 1097 bp, Homo sapiens
  misc_feature (1)..(1): n is a, c, g, or t
  misc_feature (4)..(8): n is a, c, g, or t
  misc_feature (12)..(13): n is a, c, g, or t
  misc_feature (16)..(16): n is a, c, g, or t
  misc_feature (34)..(34): n is a, c, g, or t
nccnnnnncccnnctncttgggaggctgaggcangagaatggcgtgaacctgggaggtggagtttgcagtgagctgagatcgtgccactgcactccagcctggccgacagagcaagactcttgtctcaaaaaaatatagaattaaactaaattaaaaaataaatggaaccacccagcccatcccctacccacctgtcctgcattttttttctccttatcactgtctcaccactagaggccagctccaccagggcaagggtttttccctgcctgccactgtatgccgagtgtccagaacaaagcctagcacaaggcgagcctgaccatcccgctggtgcccgagacggaagatgaccgcaagctggcggctctgctgaagttccacaccctggactcctacgaggacaagcagaaactcaagcggaccgagatcatcagccgctcctggttcccctctgcccccggatccgcctccagcagcaaggtcagcggcgtcctgaagaagctggcacagagccgcagaaccgcgcttgccacctcccccatcaccgtcggggacctgggcatcgtgcggcggaggtctcgggacgtcccggagagcccccagcatgcggccgacacccccaagtctggggaaccgcgggtaccagaggaggctgcccaggaccggcccatgtcccccggagactgtcctccggaaacaactgagacccccaagtgcagcagcccgagggggcaggaagggagccgtcaggacaagcccctgtcgccagcaggctcctcccaggaggcagctgacacccccgacacgcggcacccctgcagtctcggctcctccctcgtggcggactactccgactcggagagtgagtgagcgatccccatcctggagactggacccgctctagaggcccggacacacccaggaggcccctcacagactgcagacccccggctcgcccaccagccctgggagagctcagatgccgcatcctccccagaccgcgccttcctgcaaccgtggagttatttatttggtcctggtgagggtgtttgtgccttgtgagactccgtacattaaagacctgtctcttctt

SEQ ID NO: 65038 - DNA, 443 bp, Homo sapiens
gaatgtatgaattactttaacaaatgaatcagtgaaccaacaaacaaatgcactaatgaatgaacaaatgaattaacgaataaatgaaccaaaaaaatggatgagggaatgaatgaatgaacaaacagctgaatgaacaaatgaataagccaactgcagccccactgacagaaggtccgttctgggtgcccggatgtgcccctttttgcccgtggctctacacggcacacagtgggtgctcagtgaatttttgtcaaatgacaccattgggtggaaggaagcaggcagaggcgacagggctgtcctggtgcacagccacagcctcctgactcctgcccaccgctccctcccaggttccggatgaaatgccacctctgtgtcaactacatcgagatgcagacggaccccgccaactgcgactacgtgatcgtgagtggcgccca

SEQ ID NO: 65039 - DNA, 595 bp, Homo sapiens
tgcgcctcggagctggcttcaaccagcgaaggctgaacccgcttccagggtcctcgccgagctgggagttaggatccgagggggccaagagggataagaaaacttctctgggtgcccacgtggtactgagcgcccttgggagggctctggagaagaccatcgccttccagggtagctccctccctcaaagggaaggaaactgaggtccagaaaagttatgactcgccccaaggggattgcctggcaggacgtgaaggggaagaggcccaccctggagtaaccctcactggagaatccagaggtgagatgagccttgtacctatctcagcagagggagtaggataatatttaaatattaagggtggggagaaggaatgaaggcaagaaataaaatgcccaaaatgccccaaacgccatccggaccataaaagtgatggcgatagtgttggacttaggagctcaaagatgctaaccttgacaggcctggtggcccaagtctgtagtctcagctacttggaaggctgaggcaggaggatcgctttagcccaggagtgccaatccctcctgggcaacatagtgagatccttgtttcctt

SEQ ID NO: 65040 - DNA, 1943 bp, Homo sapiens
ccactccggcgtcgcagaacgcttggcgtatcgtccttcagccaatcagcgtggagctgctgcctcgccccgcctcacgccggcgtcctgggggcgcggagagggcgcccaggttcaccgcgctctcagcgcgcacttccgggcacggtcagggcgtgacgtcgggaggagggcagacacgccgctttttggatgcctcctatgcctggcgggagtcttgtctgagctggcaccaccacacggcccacgacatcttcgcagggaagcctgtggaccctctgccaggctccacaagaggtcaggacagtgcagtgtgttcacaaggccagtttctgatcgtccgccccgaggctgaggaccagtaggcagctcccaagatgggtgaaaggaaaggggtcaacaagtactatcctccagacttcaaccctgagaagcatggctctctcaaccgataccacaacagccacccgcttcgggagcgggctcggaagctgtcacagggcatcctcatcatccgattcgaaatgccatataacatctggtgcgatggctgcaagaaccacatcggcatgggtgttcgttacaatgcagaaaagaagaaggtgggcaattactacacaaccccgatctacaggttccggatgaaatgccacctctgtgtcaactacatcgagatgcagacggaccccgccaactgcgactacgtgatcgtgagtggcgcccagcgcaaggaggagcgctgggacatggcggacaatgagcaggtgctgaccacagagcatgagaagaagcagaagctggagacggacgccatgttccggctggagcatggcgaggccgaccgcagcacactcaagaaggcgctgcccacactgagccacatccaggaggcccagagcgcctggaaggacgacttcgccctcaacagcatgctgcggagaaggttccgggaaaagaaaaaagccatccaggaggaggaggagagagaccaggccttgcaggccaaggcgagcctgaccatcccgctggtgcccgagacggaagatgaccgcaagctggcggctctgctgaagttccacaccctggactgtgcgtaggaggccagggggaaaaggggacagggaggctcagagttgcctggagatggggggtcctcagccatgagtggactctggtctaccagagggcagttctggaccccctcccctgccgcccctgaaatgtcctctcctctcctctagcctacgaggacaagcagaaactcaagcggaccgagatcatcagccgctcctggttcccctctgcccccggatccgcctccagcagcaaggtcagcggcgtcctgaagaagctggcacagagccgcagaaccgcgcttgccacctcccccatcaccgtcggggacctgggcatcgtgcggcggaggtctcgggacgtcccggagagcccccagcatgcggccgacacccccaagtctggggaaccgcgggtaccagaggaggctgcccaggaccggcccatgtcccccggagactgtcctccggaaacaactgagacccccaagtgcagcagcccgagggggcaggaagggagccgtcaggacaagcccctgtcgccagcaggctcctcccaggaggcagctgacacccccgacacgcggcacccctgcagtctcggctcctccctcgtggcggactactccgactcggagagtgagtgagcgatccccatcctggagactggacccgctctagaggcccggacacacccaggaggcccctcacagactgcagacccccggctcgcccaccagccctgggagagctcagatgccgcatcctccccagaccgcgccttcctgcaaccgtggagttatttatttggtcctggtgagggtgtttgtgccttgtgagactccgtacattaaagacctgtctcttctt

SEQ ID NO: 65041 - DNA, 1675 bp, Homo sapiens
ctggtacggtccggaggtcggtaggatggcacggtcagggcgtgacgtcgggaggagggcacacgccgctttttggatgcctcctatgcctggcgggagtcttgtctgagctggcaccaccacacggcccacgacatcttcgcagggaagcctgtggaccctctgccaggctccacaagaggtcaggacagtgcagtgtgttcacaaggccagtttctgatcgtccgccccgaggctgaggaccagtaggcagctcccaagatgggtgaaaggaaaggggtcaacaagtactatcctccagacttcaaccctgagaagcatggctctctcaaccgataccacaacagccacccgcttcgggagcgggctcggaagctgtcacagggcatcctcatcatccgattcgaaatgccatataacatctggtgcgatggctgcaagaaccacatcggcatgggtgttcgttacaatgcagaaaagaagaaggtgggcaattactacacaaccccgatctacaggttccggatgaaatgccacctctgtgtcaactacatcgagatgcagacggaccccgccaactgcgactacgtgatcgtgagtggcgcccagcgcaaggaggagcgctgggacatggcggacaatgagcaggtgctgaccacagagcatgagaagaagcagaagctggagacggacgccatgttccggctggagcatggcgaggccgaccgcagcacactcaagaaggcgctgcccacactgagccacatccaggaggcccagagcgcctggaaggacgacttcgccctcaacagcatgctgcggagaaggttccgggaaaagaaaaaagccatccaggaggaggaggagagagaccaggccttgcaggccaaggcgagcctgaccatcccgctggtgcccgagacggaagatgaccgcaagctggcggctctgctgaagttccacaccctggactcctacgaggacaagcagaaactcaagcggaccgagatcatcagccgctcctggttcccctctgcccccggatccgcctccagcagcaaggtcagcggcgtcctgaagaagctggcacagagccgcagaaccgcgcttgccacctcccccatcaccgtcggggacctgggcatcgtgcggcggaggtctcgggacgtcccggagagcccccagcatgcggccgacacccccaagtctggggaaccgcgggtaccagaggaggctgcccaggaccggcccatgtcccccggagactgtcctccggaaacaactgagacccccaagtgcagcagcccgagggggcaggaagggagccgtcaggacaagcccctgtcgccagcaggctcctcccaggaggcagctgacacccccgacacgcggcacccctgcagtctcggctcctccctcgtggcggactactccgactcggagagtgagtgagcgatccccatcctggagactggacccgctctagaggcccggacacacccaggaggcccctcacagactgcagacccccggctcgcccaccagccctgggagagctcagatgccgcatcctccccagaccgcgccttcctgcaaccgtggagttatttatttggtcctggtgagggtgtttgtgccttgtgagactccgtacattaaagacctgtctcttctt

SEQ ID NO: 65042 - DNA, 2078 bp, Homo sapiens
atggtggctcacacctgtaatgccagcactttgggaggttggggcgggtggatcatgaggtaaagagatcaagaccatcctgggcaacatggtgaaaccctgtctctattaaaaatacaaaattagctgggtgtggtggcgcacgcttgtagtcccagctactcgggagactgaggcaggagaatcacttgaacccaggaggtggaggttgcagtgagcagagatcgcgccactgcactccagcctggtgacagagcgagactccatctcaaaaaacaaaaagatcccctgggcagctgtggggtgagcaagtgtcaagggcagagtcgggagagagaagaccgtgctggcccacgtgagtgatgatgggtgctggacccggtgggggccacagagggatgaaagtgtcagatgtgatgcgtatattggctgtagagtggacgggactctctctttctaaacaacacgccgctttttggatgcctcctatgcctggcgggagtcttgtctgagctggcaccaccacacggcccacgacatcttcgcagggaagcctgtggaccctctgccaggctccacaagaggtcaggacagtgcagtgtgttcacaaggccagtttctgatcgtccgccccgaggctgaggaccagtaggcagctcccaagatgggtgaaaggaaaggggtcaacaagtactatcctccagacttcaaccctgagaagcatggctctctcaaccgataccacaacagccacccgcttcgggagcgggctcggaagctgtcacagggcatcctcatcatccgattcgaaatgccatataacatctggtgcgatggctgcaagaaccacatcggcatgggtgttcgttacaatgcagaaaagaagaaggtgggcaattactacacaaccccgatctacaggttccggatgaaatgccacctctgtgtcaactacatcgagatgcagacggaccccgccaactgcgactacgtgatcgtgagtggcgcccagcgcaaggaggagcgctgggacatggcggacaatgagcaggtgctgaccacagagcatgagaagaagcagaagctggagacggacgccatgttccggctggagcatggcgaggccgaccgcagcacactcaagaaggcgctgcccacactgagccacatccaggaggcccagagcgcctggaaggacgacttcgccctcaacagcatgctgcggagaaggttccgggaaaagaaaaaagccatccaggaggaggaggagagagaccaggccttgcaggccaaggcgagcctgaccatcccgctggtgcccgagacggaagatgaccgcaagctggcggctctgctgaagttccacaccctggactcctacgaggacaagcagaaactcaagcggaccgagatcatcagccgctcctggttcccctctgcccccggatccgcctccagcagcaaggtcagcggcgtcctgaagaagctggcacagagccgcagaaccgcgcttgccacctcccccatcaccgtcggggacctgggcatcgtgcggcggaggtctcgggacgtcccggagagcccccagcatgcggccgacacccccaagtctggggaaccgcgggtaccagaggaggctgcccaggaccggcccatgtcccccggagactgtcctccggaaacaactgagacccccaagtgcagcagcccgagggggcaggaagggagccgtcaggacaagcccctgtcgccagcaggctcctcccaggaggcagctgacacccccgacacgcggcacccctgcagtctcggctcctccctcgtggcggactactccgactcggagagtgagtgagcgatccccatcctggagactggacccgctctagaggcccggacacacccaggaggcccctcacagactgcagacccccggctcgcccaccagccctgggagagctcagatgccgcatcctccccagaccgcgccttcctgcaaccgtggagttatttatttggtcctggtgagggtgtttgtgccttgtgagactccgtacattaaagacctgtctcttctt

SEQ ID NO: 65043 - DNA, 1587 bp, Homo sapiens
ccactccggcgtcgcagaacgcttggcgtatcgtccttcagccaatcagcgtggagctgctgcctcgccccgcctcacgccggcgtcctgggggcgcggagagggcgcccaggttcaccgcgctctcagcgcgcacttccgggcacggtcagggcgtgacgtcgggaggagggcagggtgaaaggaaaggggtcaacaagtactatcctccagacttcaaccctgagaagcatggctctctcaaccgataccacaacagccacccgcttcgggagcgggctcggaagctgtcacagggcatcctcatcatccgattcgaaatgccatataacatctggtgcgatggctgcaagaaccacatcggcatgggtgttcgttacaatgcagaaaagaagaaggtgggcaattactacacaaccccgatctacaggttccggatgaaatgccacctctgtgtcaactacatcgagatgcagacggaccccgccaactgcgactacgtgatcgtgagtggcgcccagcgcaaggaggagcgctgggacatggcggacaatgagcaggtgctgaccacagagcatgagaagaagcagaagctggagacggacgccatgttccggctggagcatggcgaggccgaccgcagcacactcaagaaggcgctgcccacactgagccacatccaggaggcccagagcgcctggaaggacgacttcgccctcaacagcatgctgcggagaaggttccgggaaaagaaaaaagccatccaggaggaggaggagagagaccaggccttgcaggccaaggcgagcctgaccatcccgctggtgcccgagacggaagatgaccgcaagctggcggctctgctgaagttccacaccctggactcctacgaggacaagcagaaactcaagcggaccgagatcatcagccgctcctggttcccctctgcccccggatccgcctccagcagcaaggtcagcggcgtcctgaagaagctggcacagagccgcagaaccgcgcttgccacctcccccatcaccgtcggggacctgggcatcgtgcggcggaggtctcgggacgtcccggagagcccccagcatgcggccgacacccccaagtctggggaaccgcgggtaccagaggaggctgcccaggaccggcccatgtcccccggagactgtcctccggaaacaactgagacccccaagtgcagcagcccgagggggcaggaagggagccgtcaggacaagcccctgtcgccagcaggctcctcccaggaggcagctgacacccccgacacgcggcacccctgcagtctcggctcctccctcgtggcggactactccgactcggagagtgagtgagcgatccccatcctggagactggacccgctctagaggcccggacacacccaggaggcccctcacagactgcagacccccggctcgcccaccagccctgggagagctcagatgccgcatcctccccagaccgcgccttcctgcaaccgtggagttatttatttggtcctggtgagggtgtttgtgccttgtgagactccgtacattaaagacctgtctcttctt

SEQ ID NO: 65044 - DNA, 1220 bp, Homo sapiens
gtagtactggatacttgggaggctgacatgagagaatcgcttgagcccaggagttcgaggctgcagtgagctatgattgtgccactgcactccagtctgggcgacagaatgaaactgtctcaaaaagagtaaatgagaccccgagagttggagcagtgccccctagtacacagaagagacagggctttgacaccccctatctctggtgttcttggccctcaacacaggaaaagaaaaaagccatccaggaggaggaggagagagaccaggccttgcaggccaaggcgagcctgaccatcccgctggtgcccgagacggaagatgaccgcaagctggcggctctgctgaagttccacaccctggactgtgcgtaggaggccagggggaaaaggggacagggaggctcagagttgcctggagatggggggtcctcagccatgagtggactctggtctaccagagggcagttctggaccccctcccctgccgcccctgaaatgtcctctcctctcctctagcctacgaggacaagcagaaactcaagcggaccgagatcatcagccgctcctggttcccctctgcccccggatccgcctccagcagcaaggtcagcggcgtcctgaagaagctggcacagagccgcagaaccgcgcttgccacctcccccatcaccgtcggggacctgggcatcgtgcggcggaggtctcgggacgtcccggagagcccccagcatgcggccgacacccccaagtctggggaaccgcgggtaccagaggaggctgcccaggaccggcccatgtcccccggagactgtcctccggaaacaactgagacccccaagtgcagcagcccgagggggcaggaagggagccgtcaggacaagcccctgtcgccagcaggctcctcccaggaggcagctgacacccccgacacgcggcacccctgcagtctcggctcctccctcgtggcggactactccgactcggagagtgagtgagcgatccccatcctggagactggacccgctctagaggcccggacacacccaggaggcccctcacagactgcagacccccggctcgcccaccagccctgggagagctcagatgccgcatcctccccagaccgcgccttcctgcaaccgtggagttatttatttggtcctggtgagggtgtttgtgccttgtgagactccgtacattaaagacctgtctcttctt

SEQ ID NO: 65045 - DNA, 949 bp, Homo sapiens
cggcactaggattttaatctttacaacaaacccttaaagaaggcaaggcatatgaaattacccttgtattcagtaaactgttgaggtcaaggtgtttattaagacccatgccttctggatagactaacagggatcaaaacaaaaactgactcttagtcaataagtcaaacacttttgattcctattacaagtaaccatttttatattaatatatacttattggccacccttccttcttttgtgaaatgcctattcatttattttgcccattcaaaatttggaaagctcattatgttggtactgttttgtaagggctctctataaaatatattttatttcttttacttttttaataatttgaactttgactttgttttattaatttattaacaaattttaattcaaaataagtgaatattaattccatatctggcaacaggtggactagatgtctggcgaataacacctaatataaaacacctgtcacggtgattgaaaaaaatcaacagctatctcattaaatgcatggcaagtaaaatatatcttctggggccaaaaatagaccagaattatctgctacttgaatgtttggcaaaactctcctagaaaactgagtctgatgtttgatttgtgtaaagacttctttaacttttctaactcaatttttactaagttataggactactcagattttgtttcttttttgctcaattttggtcaattttgtttttgtctatgtcacctaagttttcaaatgtattggcatgaatattttcataatattcccttattatcttttacatttctgggatatctttagcgatgtttccctttttatccctaaaattgtttattcatgctttcttttttcttaatcaaacttgttagagatttgtcaattgtactcggtgttcaaaaaataaatcttggctttgtgagcttcaaaatt

SEQ ID NO: 65046 - DNA, 677 bp, Homo sapiens
aaaaacacatctatacatagcacttgtctaaaagctctttcgataactctgtgtgtgtgtgtgcaggcacatgcgggctcattcagtcttcatgataaccctaggaggtgctattactgttcccattatataaataaaagaaattgaagcacggagaggttaaataaccaaatcaaggttacacatctactaaaagagcattagtcatcacacaaaaaaagtaatgaaataaagaatttgtttttctctttggcttatcttatggagattatgacaattaccaaaatctttattacctagaatcttttatttggtgacttatagtttaagttccaaagaaaaatattgccatataaggaaagggtatgacatagaatacacctgaaagagagttttcttaatatgactcgtttgtgagataatttctggggctaccacatccctggttttacactagagtccagtgacctgaacctccaatactgaagtcactaaattttcttcacaaaataactgtatcctactagcatcaagacagcacattacactgccatcttgcctccatccttgaaattttagaaagcaaaatatggcctcatacaaatatcatttggaattctgaaactgcaaagatacccaggactcaaatgtttaaaaacccaaatgcatttctaagt

SEQ ID NO: 65047 - DNA, 400 bp, Homo sapiens
aaagtcataatgcaactttgtctatttttattcttcacatagtgactatgtcttgtttaacagaatttgaacatattaaaatagatgaccaaatactaaatatttagactatgtagtggaacacatgatttatatcagtcatttcttgaaaacttatgagtacttcattgacattacatgcataaagcaaatatctagctgaaacattgctgaaaaaaaaatacgtcattttgccagtaaattaaataaactgcagaaagaaactacttctcaacatgaaagtaaagagaagagaatcaaggcaatgggctttgccacagacagggaatacacagggaacagggaaaggatcaggccccccttgcttgaggcttgctttcctcatctgtagatttagggg

SEQ ID NO: 65048 - DNA, 2505 bp, Homo sapiens
  misc_feature (1302)..(1302): n is a, c, g, or t
gatttgctttgggagccagagtagctggcgcaccagagtccggagccatgagcgggtttaattttggaggcactggggcccctacaggcgggttcacgtttggcactgcaaagacggcaacaaccacacctgctacagggttttctttctccacctctggcactggagggtttaattttggggctcccttccaaccagccacaagtaccccttccaccggcctgttctcacttgccacccagactccggccacacagacgacaggcttcacttttggaacagcgactcttgcttcggggggaactggattttctttggggatcggtgcttcaaagctcaacttgagcaacacagctgccaccccagccatggcaaaccccagcggctttgggctgggcagcagcaacctcactaatgccatatcgagcaccgtcacctccagccagggcacagcacccaccggctttgtgtttggcccctccaccacctctgtggctccagctaccacatctggaggcttctcattcactggtggaagcacggcccaaccctccggtttcaacattggctcagcagggaattcagcccagcccacggcacctgccacgttgcccttcactccggccacgccagcagccaccacagcaggtgccacacagccagctgctcccacacccacagccaccatcaccagtactgggcccagcctctttgcgtcaatagcaactgctccaacctcatctgccaccactggactctccctctgtacccctgtgaccacagcgggcgcccccactgctgggacacagggcttcagcttaaaggcacctggagcagcttccggcacctccacaacaacatccaccgttgcaccgccaccgccaccaccaccagcagcagcagcaccaccggctttgccttgaatttaaaaccactggcgccagccgggatccccagcaatacagcagctgccgtgaccgctccacctggccctggcacaactgcaggggcggctgcaagctccgccatgacctacgcgcacgtggagagcctgatcaacaaatggagcctggagctagaggaccaggagcggcacttcctccagcaggccacccaggtcaacgcctgggaccgcacgctgatcgagaatggagaaaagatcaccagcctgcaccgcgaggtgaagaaggtgaagctggaccagaagaggctggaccaggagctcgacttcatcctgtcccagcagaaggagctggaagacctgctgagcccactggaggagttggtcaaggagcagagcgngaccatctacctgcagcacgcggatgaggagcgtgagaaaacctacaagctggctgagaacatcgacgcacagctcaagcgcatggcccaggatctcaaggacatcatcgagcacctgaacacgtccggggcccccgccgacaccagtgacccactgcagcagatctgcaagatcctcaatgcgcacatggactcactgcagtggatcgaccagaactcggccctgctgcagaggaaggtggaggaggtgaccaaggtgtgcgagggccggcgcaaggagcaggagcgcagcttccggatcacctttgactgagcgacagcaagccctggggcccgcaggtccctagggagttcatgaggggaatgcgccctgttgtctgtagtttggggttgtggcaagatacttgtttgtttgtttctttctttcacatgactgcccttgacatgatcgctgtgtgctttgcgtttttccatttaggagggtattctgggccttctgcccaggcagcagcctcatgggtgtggcttctgtggctttcatttgagtatctttggccccttttcacctactgcgaccacccacctcatcctggctcagcctggtgatggagaagtgctgatggtcttggtcccagccagggtcgtgggggcagccactctctccaaagcatagtcataggtgtcatgaaaaaataccaaatgtaagagaacctccaagtcagggcgcagtggctcacccctgtaatctcagcactttgggtggccaaggcgggcagatgacttgaggtcaggagttcgagaccagcctggccaacatggtgaaaccccgtctctactaaaaatacaaaaattagtcaggtgtggtggacgcctgtgatctcaatctcagctactcgggaggctgaggcaggagaatcacttgaacccaggaggtgttgcagtgaaccaagatcacaccactgcactccagcctaggcaacagagactctgtctcaaaaaaaaaaaaaaaaaaaagaaactcccaggagacagcagcctagttttcgagtgtgagcttgtgcttgtgaaagctaaccatgctaaccaccaaggcaaagcagcacagtgtgaatagaacagagcgggatcaagaatttcacagaagacaggtcagctgaggggcctgcacacacagggtgttgaggaaccacagatgggcgccga

SEQ ID NO: 65049 - DNA, 1885 bp, Homo sapiens
gatttgctttgggagccagagtagctggcgcaccagagtccggagccatgagcgggtttaattttggaggcactggggcccctacaggcgggttcacgtttggcactgcaaagacggcaacaaccacacctgctacagggttttctttctccacctctggcactggagggtttaattttggggctcccttccaaccagccacaagtaccccttccaccggcctgttctcacttgccacccagactccggccacacagacgacaggcttcacttttggaacagcgactcttgcttcggggggaactggattttctttggggatcggtgcttcaaagctcaacttgagcaacacagctgccaccccagccatggcaaaccccagcggctttgggctgggcagcagcaacctcactaatgccatatcgagcaccgtcacctccagccagggcacagcacccaccggctttgtgtttggcccctccaccacctctgtggctccagctaccacatctggaggcttctcattcactggtggaagcacggcccaaccctccggtttcaacattggctcagcagggaattcagcccagcccacggcacctgccacgttgcccttcactccggccacgccagcagccaccacagcaggtgccacacagccagctgctcccacacccacagccaccatctacctgcagcacgcggatgaggagcgtgagaaaacctacaagctggctgagaacatcgacgcacagctcaagcgcatggcccaggatctcaaggacatcatcgagcacctgaacacgtccggggcccccgccgacaccagtgacccactgcagcagatctgcaagatcctcaatgcgcacatggactcactgcagtggatcgaccagaactcggccctgctgcagaggaaggtggaggaggtgaccaaggtgtgcgagggccggcgcaaggagcaggagcgcagcttccggatcacctttgactgagcgacagcaagccctggggcccgcaggtccctagggagttcatgaggggaatgcgccctgttgtctgtagtttggggttgtggcaagatacttgtttgtttgtttctttctttcacatgactgcccttgacatgatcgctgtgtgctttgcgtttttccatttaggagggtattctgggccttctgcccaggcagcagcctcatgggtgtggcttctgtggctttcatttgagtatctttggccccttttcacctactgcgaccacccacctcatcctggctcagcctggtgatggagaagtgctgatggtcttggtcccagccagggtcgtgggggcagccactctctccaaagcatagtcataggtgtcatgaaaaaataccaaatgtaagagaacctccaagtcagggcgcagtggctcacccctgtaatctcagcactttgggtggccaaggcgggcagatgacttgaggtcaggagttcgagaccagcctggccaacatggtgaaaccccgtctctactaaaaatacaaaaattagtcaggtgtggtggacgcctgtgatctcaatctcagctactcgggaggctgaggcaggagaatcacttgaacccaggaggtgttgcagtgaaccaagatcacaccactgcactccagcctaggcaacagagactctgtctcaaaaaaaaaaaaaaaaaaaagaaactcccaggagacagcagcctagttttcgagtgtgagcttgtgcttgtgaaagctaaccatgctaaccaccaaggcaaagcagcacagtgtgaatagaacagagcgggatcaagaatttcacagaagacaggtcagctgaggggcctgcacacacagggtgttgaggaaccacagatgggcgccga

SEQ ID NO: 65050 - DNA, 165 bp, Homo sapiens
aagtactcccaggacaagccagtgtcagagtagggggagctagacatggagggtgaggccagttgaaactgacctgtggggggctccggagtataagttacacctcagagtttgtgcccaactgcaggccagggatctgggcttctatgcttctgcatgtgcacc

SEQ ID NO: 65051 - DNA, 691 bp, Homo sapiens
tgagtgtctcactttccctttgaatgttctggaggcatcccacatcatcatgtgatcacaattactcacctgcagctgtggcagtgggcaccccatttataccctatgaccatttcagtacagccagcccaacttccaagtctactttcttctcctgaagctctttctggcctctaaaggcagctttgcccatacatggagcagatcagaagtgaaaagaaccggctttctctgtggttataacttgatttgcaaacggcaagtgaaaggcagttctccctgaaaagaatcctgttcatgcatcacccaggatcctggaacagctgcctcctctctaagcagaagagccctggtggcctctgtgcatgaagaccatttggggcctaatgaagtgcaaagttgggaaattcagctcctaaccaactcatcaccagaaacacagtggcagacagctgttagggccgaacattatcatcatcataatacctatcacggagtgaacccctgctatgtgccaggcactgtccaggcatcttcactaagattacagcctttgacactcactacagtctaatacagtgtaatttcttgccttcattttctagtggaggagagaaaatgggatttccccaaagatgtactgctgtaagtggtagaatcaagatttattataaaatgaggttgatctgat

SEQ ID NO: 65052 - DNA, 584 bp, Homo sapiens
tgagtgtctcactttccctttgaatgttctggaggcatcccacatcatcatgtgatcacaattactcacctgcagctgtggcagtgggcaccccatttataccctatgaccatttcagtacagccagcccaacttccaagtctactttcttctcctgaagctctttctggcctctaaaggcagctttgcccatacatggagcagatcagaagtgaaaagaaccggctttctctgtggttataacttgatttgcaaacggcaagtgaaaggcagttctccctgaaaagaatcctgttcatgcatcacccaggatcctggaacagctgcctcctctctaagcagaagagccctggtggcctctgtgcatgaagaccatttggggcctaatgaagtgcaaaggtattttgtgctctggacccaggagtgcaacagttactggctgctgaaggcagacattaaggagaaccattttaattgattagaatgtgcatatgctgtattggtttcgtctgagggcattttggaacaaatagcactgtcattgtgagccttaattagataataaattaatagataaatggatt

SEQ ID NO: 65053 - DNA, 310 bp, Homo sapiens
ggcgtgagccactgcacccagcctcacgttacattttcatagctagcagggtaatggtggagttattggcactcaggtcacattctagggaatgtttattgggcaatctcaatggcaccgcaagctaaatgacttccagtgtttctcgtctttgtgctttcttcattgcaacctttgcccaagacatctgtttcttctggatcacccttgtacagccactgatggaatgatcttctgaaagtgaatcttcagtagacacattggccacaccatctttgccagccatcacattgcccaggtctccgacatg

SEQ ID NO: 65054 - DNA, 612 bp, Homo sapiens
ccagggacacaatacactgtggaaggctacagggacctctgcccaggaaagccaggtattgtccaaggtttctccccatgtaatagcctgagagatggccttgtgggaacggaaagacctgaccatcccctagcccaacacccataaatggtctgtgctgaggaggattagtgaaagaggaaggcctctttgcagttgagataagaggaaggcatctgtctcctgctcgtccctggtaatggaatgtcttggtgtaaaacctgattgtatgttctgtttactgagataggagaaaaccaccttagggctggaggtgagacatgctggcggcaatactgctctttaatgaactgagatgtttgtgtacgtgcacatcaaagcacagcacctttccttaaacttatttatgacacagagatctttgttcacatgttttcctgctgaccctctccccactattaccctattctccggccacatcctcctctccgagatggtagagatagtgatcaataaatactgagggaactcagagaccagggccagcgcgggtcctctgtatgctgagtgctggtcccctgggcccactgttctttctctatactttgtctg

SEQ ID NO: 65055 - DNA, 382 bp, Homo sapiens
attcgtccttcagtctacgcttgaaattgccagggatggataaatctgaagatgaatgaaaaaaagaaactactgggaacggaacagaaacaaaaaaaaaggatgggaaatctgaagctgctatttcttattctgatcttaatagcaggatacagttgaataataacattatctattggagatcactgaaatgtagggagggaattccattttgaaaactttaatatgtagagagtcagtacatcattttcacaagcaatatccttagaagaaaggattttttttagaactatcatgctacagaaaactgcatttttatagtaactgaaagatgcaaagttactgaaaaaataaaactgccattttattgtattgccattaa

SEQ ID NO: 65056 - DNA, 339 bp, Homo sapiens
tcccacaacgggaggaatggatgtaggccgggccaggccccagcagtcctgggggctcaggcacttgccgtggcctcttgaagagacctttctcagaatcccccaggaaagctttatgaaaatgccagggccacagcatcccagccccggagagactggcttagtggagctaacagccttgtgtattttgaatgctcccagtcagtagtgatggacgcccattgagatctactggcttagacaaggcagagcgtgtgcagctggccctggggtcatctccccaggcttgcttggctgtgtggagaaggaggagcagacgaaacaaaacttaggggcctg

SEQ ID NO: 65057 - DNA, 428 bp, Homo sapiens
ttgagaaaaagattaagactaatttgtccttaaatattgacatgttttgggtgcaatctagagttgggaattgggtccatcataatactgttttaaaaatactttgtgtagaatcatgctctttccatatacttttcatttgcccctcacaagaactctgcactagcagggcaggtatctttatttgactattgaagaaacaaatttagagagtttgtaaatttatttgctgagtcgcaaggccaagactcgctcttctaactctactctttttgttacacccagaacttgagacactcctctcctaggcagcttcgtgttagtgttagtcagtgcctcttaggtcaggtcagattcagaaaccgcaattacttttgcaccaacctaatagttttaggtccagaaggaatcttagacatcattttgtg

SEQ ID NO: 65058 - DNA, 209 bp, Homo sapiens
cgagactccatctcaaaaaaaaaaaaaaaaaaagaaaacctaaacttgaaaaaagttaaaagttaaaatatactgcaaaaaataataccccaagaaaggatgtgaaacagtcagtcttcagttagaatttctgacatggtactgggaacagccatctgtgaaggtcatggctctaccaggccaccattctatctggggcactgacactg

SEQ ID NO: 65059 - DNA, 411 bp, Homo sapiens
ctgttgtccaggctggagtgcactggcatgatctcagctcactgcaacctcttccttccaggtacaagtaatttctgcctcagcctcccaagtagctgggattacaggtgtctgccaccatgcccagctaatttttgtatttttagtggagtcaaggttccactatattggccaggctagtctcgaactcctgacctcaagtgatccaccctccttggcctaccaaagtgctgggtatcatgttatttttaaaccatagcattgtcacacattccttttttattatatctgctcgattcagtctgacaaagactactattaggtatccacccaatatccattcttttcttattccttgctaaacaaaaacacctatgttattggggctgggagtgtgctcagttaatataa

SEQ ID NO: 65060 - DNA, 506 bp, Homo sapiens
acatacttctcctttaatcccagagttagtttttaaaactacatgattgctgtttttgcatattaatagtactctaaaattatccttgcctatgtgcagaaatgggtaagggccacttaaaccaaaatggagttagttatgttagctcttgtgctgtttcactgttacactgctgctgtgctgacactaagcagagtttcagcttcactaatataatttgggtgagagtgagaaatggtttaacagttaaatcacatcagttgattgagaaagtaaatctgagaaaaaaaatgcattgggatgcgagtccatttgtcaagtcctggttggattgccaccatatgttggctacggataaaagttgaccataaaaatcagtgaaagaattctgtgagaatcaattgacctaatataatttacaatagagagtattgtatgttttattatttgtaaattgttactcatcttttatatcagtaaattcttaatttatgtacgtaaataca

SEQ ID NO: 65061 - DNA, 1173 bp, Homo sapiens
tttctgtctccgcatcttttcaaagagaggctggcctgtgcttttgagaactgagagttagcatgggttttgtcagatattgagtagatctctgttcaagtgtctcaggcttgggtggatgtagacggtaaacttctcggtgtgttgtttcatctgccaggttctaggacaatcagggaagtgtggagaaggtcacgctggttggcagcagccttgtgggcagggctgctcctctgcgggccccacagctggcaggggtcaggtgccttccctgggctcacaacccctctgcacaccccatagctggctgggtcaggcgccttccctgggctcacaaaccctggggcagcaggcaggctcgggctgtggttgtgttctggggtgtgagaagggatgaggtactgctgcctctgggaagctcccagcttgttccagcctcctgcctgcccctctgtggctgacagtcgactcccctggagtcactgccctgagtctcaagggtacttctctgcaagctccaggccaccaatgccaccagaaatctctgaagtcgctccagtggcttaaccgcatcacaaagtcaccagactggataaagttattccgctgacctaaagcctgtcagatgtgctggcccctccccgacagggtgcaccggggcaagctggccaaggctccttcaccagccacccccgaagtcactgctgaccacctaccgcatctcaacacggggccgggcagctcgcaccacggggctcctgcctagggctgcacccctgcctcagagcttcccgttcctctcgcaacaccagctgaacgcctctactccacagaacctccctcccgcggggggagcccactgctgctccacgaggttcctggctaagggcctgctctggcctttgcttctgtctgctttttaattacactgactttgtatttttacgtgcctgtctgtcctgtgacatcaaagtcttgctccaagaacataacaaagtaactgaaatcgagtgagtgaagtattgcctggtagagattctcaaggaatctgctttgacaaattaataaatgaatttcactggtacaacagtttgcatataaatagtttcagaagtcccagggagtacaaaggattatttgaaactttctgtacaaatgtccagtacactgaac

SEQ ID NO: 65062 - DNA, 1589 bp, Homo sapiens
tttctgtctccgcatcttttcaaagagaggctggcctgtgcttttgagaactgagagttagcatgggttttgtcagatattgagtagatctctgttcaagtgtctcaggcttgggtggatgtagacggtaaacttctcggtgtgttgtttcatctgccaggttctaggacaatcagggaagtgtggagaaggtcacgctggttggcagcagccttgtgggcagggctgctcctctgcgggccccacagctggcaggggtcaggtgccttccctgggctcacaacccctctgcacaccccatagctggctgggtcaggcgccttccctgggctcacaaaccctggggcagcaggcaggctcgggctgtggttgtgttctggggtgtgagaagggatgaggtactgctgcctctgggaagctcccagcttgttccagcctcctgcctgcccctctgtggctgacagtcgactcccctggagtcactgccctgagtctcaagggtacttctctgcaagctccaggtatgctgccttaccctgacctatagacagtacctctccccgggtttctagagcagtaaccattttcctcctctacttattacattcctttgattatcccagtgagagtatgcgggtggccgggaagggtgagagctggatcacttgtgctcaggtaacctactcgaatgagaggcccaaagacacatatagtgaattgcctagttagcggttcatccacatggatttggtttcgctgaatgatcaccattctcatacaacaaggcatctttatgcaaaggacggtcctcttatcaccccagcccacttcctcaatctcttgtctccactctgcctttccttctgacccaagagctgtcgcctcgccccactgccacacctcaccccactgccacacctgtcacactccattccaggccaccaatgccaccagaaatctctgaagtcgctccagtggcttaaccgcatcacaaagtcaccagactggataaagttattccgctgacctaaagcctgtcagatgtgctggcccctccccgacagggtgcaccggggcaagctggccaaggctccttcaccagccacccccgaagtcactgctgaccacctaccgcatctcaacacggggccgggcagctcgcaccacggggctcctgcctagggctgcacccctgcctcagagcttcccgttcctctcgcaacaccagctgaacgcctctactccacagaacctccctcccgcggggggagcccactgctgctccacgaggttcctggctaagggcctgctctggcctttgcttctgtctgctttttaattacactgactttgtatttttacgtgcctgtctgtcctgtgacatcaaagtcttgctccaagaacataacaaagtaactgaaatcgagtgagtgaagtattgcctggtagagattctcaaggaatctgctttgacaaattaataaatgaatttcactggtacaacagtttgcatataaatagtttcagaagtcccagggagtacaaaggattatttgaaactttctgtacaaatgtccagtacactgaac

SEQ ID NO: 65063 - DNA, 540 bp, Homo sapiens
agaaatgaaaaagcaatcatattatgctgcagtggctcacatgtgaggtaggggtcatgatatatttttttttcctatgctgatattcttgttgcagcatcgtttgcagaaaagactgtcctttcactcttgattggttttgaaatctttcctgaaagtcaattgcccataaatgtataaatccaatactagcatctgtattctgtccattgatgattatatctatccatatgctcataccatactgtctttattattgtaagttttgaaacctggcgtgacaaggttttcaactttgttattctttttagaatttattttgggtattctaagtatttagcatttgcacataaatttttgaatcagtttgtgagtttcaacaaaaagcctactgggattttgatggagattaccttaactctacagttagatcattttgaggaaaaatgacatcttaaaaatgttgactcctttagttcatgaataaggtatatctttacatgttttaaaatttctttagcaatgttttatagttttcag

SEQ ID NO: 65064 - DNA, 387 bp, Homo sapiens
tgtatggtttatttgttcattgttttttttttaatcagctgaatttaagattcaaagatcctgtctttaattcttttggatctatacccagaagtgggattgttgggtcatatagtacattttatttttaattttttgaggaccccccgtactgttttccagagcggcctcatcattttacattcccatgtgcaaggcacaaaggtcccaatttcaccacattcttgtcaatacttgttattttctgtttatttgatagtggccatcctaacaggtgtgaggtaatagctcattatggttttgatttgcattttcctaatgactggtaatattgctcatattaccatatgcttgttggcatttgcatatctttttctgagaaatgtc

SEQ ID NO: 65065 - DNA, 332 bp, Homo sapiens
atgtcaaataggtatgagtagaaatctcaaagggtgaaagatacagctgtttctagaagctaacaatttgaaggattaatctattacttgctgaaactgaactttcttttccaattagtcagacttttaacatccaggcaaaacattccatttccctgaataaaacaaagtaaatgaaaaaaaaaatgttagcactcattagcaaatgctcaaaagattttctgccttctttgaagggaaaaataatgtccttgattttgagtgattttgctgtgatctcatcagtagtttgaatacaggctctaattaaagacatagtatcatatatttga

SEQ ID NO: 65066 - DNA, 315 bp, Homo sapiens
aggcagagagtacttgagacctcatggatataaaaccagcttacaaactacattgcactatatgaagaaattatcactgggggcaaagcaccaagcagagagcacagtacacagtgtgtggatgttaatgttattccctagccttcccattcctttctcttggtcctttatgcatatggaacggttccattattaaactttgtaataataactgagaacctgactcccagcaagggagtcgttcagaagttgagggagttgaaatctgactgagtaaataaaacaattaaatcattagcttaacatttcatcaat

SEQ ID NO: 65067 - DNA, 792 bp, Homo sapiens
ccctaaatgaacactggtaggctaaaaggcaacactggcgtacacgcaggcttttctcttcccactatgcaatacttactaagatctaactattgtgttctcaaacctacttaatgccggtggctcataattacaattacataattgtcatgaaatattaatactggctgggcatggtggctgacacctgtaatcctaatctttattgaatgcttactataggccaggaactatactaataatgcaattttatatgcattatcaaaaatcttcacaaaaactctgttaggtaaaagaaacatacttctgaaacaaacaaaaagacaaaaataactagagggaagattaaggaggtcataccaaatgactgcaactttttagttatggaaacagaaggaaaaaaaagcaggaaggcttgagggcttgagaggaacagataagaaactaacatttactgcctactatgtgccagccactgtaacatccattacatacatgtcatgtaattctgtgaagtacttatcattcatttaactgaagaacttgaggtttgcgagtttcccaagaacaaagagctggtaagtggtgaggtggtgattcaaacctagctccatgaaactacaaattatatttctttctgctatatcaacatcaggaatgtgctagagaataaatatgagatgaataaaaagatcataaagcagcaaaggcccagttaaaatcacacagcatgaaattagagcagataatgccaactctgtgccctctgctccctgagttcagccacccagg

SEQ ID NO: 65068 - DNA, 260 bp, Homo sapiens
  misc_feature (26)..(26): n is a, c, g, or t
ttctatctgcaacgactctcttaatntccaccgctcaggccactgtgcagatggagggcgggaagctggtggtgaatttccccaactatcaccagacctcagagatcgtgggtgacaagctggtggaggtctccaccatcggaggcgtgacctatgagcgcgtgagcaagagactggcctaagcagccaggcccggcccagggagctacaaacccaccaataaaactgatataaggacagatgctgatagctccagaacc

SEQ ID NO: 65069 - DNA, 593 bp, Homo sapiens
ggctattttttcctttattattatttttcttaggtccatgaaggttcatattgcaagaagtccacagggtatagagcaatgtggctccctctttctcttccccagagggagctgctgcatggtttccgtgtgctgtcttccactttgctgcatcttcacttcagggaggcctgcagtctgcagccctcttgggacccgagggcaccactccctgttggaacagaagagtcagttctggcatcagcagtatcactctgtagctgggtccaggcagaggggacatgggccaggaggatttattccaggctgtaagatgcccaagtgcagggcagctggagaagcccatgccgagagagcaggcagtgcccacagtcctcctttacagggtgtctactggatctcatgtcaaagcaccaagatgccaggtggcttgatgatgcctggggagccaccatggcactcaaggggaaagggtctcactccacggggagacctggagagggacatcccctatccaaccccttctgccaggtctagcccaagccttccccaggagggttgagaaggcggtgacaacctcaactacagcttct

SEQ ID NO: 65070 - DNA, 617 bp, Homo sapiens
gaagaagtggggtgacttaggggctgagcctcagcaactgggagagtttataagctgggatagcagacccctcagcaccacccattctcctcatccctctgctctctggcctccagcctcccagcagcatggctttcaccggcaagttcgagatggagagtgagaagaattatgatgagttcatgaagctccttgggatctccagcgatgtaatcgaaaaggcccgcaacttcaagatcgtcacggaggtgcagcaggatgggcaggacttcacttggtcccagcactactccgggggccacaccatgaccaacaagttcactgttggcaaggaaagcaacatacagacaatggggggcaagacgttcaaggccactgtgcagatggagggcgggaagctggtggtgaatttccccaactatcaccagacctcagagatcgtgggtgacaagctggtggaggtctccaccatcggaggcgtgacctatgagcgcgtgagcaagagactggcctaagcagccaggcccggcccagggagctacaaacccaccaataaaactctcgatgcggccggaaaacaacctgtcaaaacacctacccgaagcagaacagcaaaa

SEQ ID NO: 65071 - DNA, 609 bp, Homo sapiens
gaagaagtggggtgacttaggggctgagcctcagcaactgggagagtttataagctgggatagcagacccctcagcaccacccattctcctcatccctctgctctctggcctccagcctcccagcagcatggctttcaccggcaagttcgagatggagagtgagaagaattatgatgagttcatgaagctccttgggatctccagcgatgtaatcgaaaaggcccgcaacttcaagatcgtcacggaggtgcagcaggatgggcaggacttcacttggtcccagcactactccgggggccacaccatgaccaacaagttcactgttggcaaggaaagcaacatacagacaatggggggcaagacgttcaaggccactgtgcagatggagggcgggaagctggtggtgaatttccccaactatcaccagacctcagagatcgtgggtgacaagctggtggaggtctccaccatcggaggcgtgacctatgagcgcgtgagcaagagactggcctaagcagccaggcccggcccagggagctacaaacccaccaataaaacgcgcccaactccctctcttcctacacactaaacgaccccaccatacacac

SEQ ID NO: 65072 - DNA, 1311 bp, Homo sapiens
ggctattttttcctttattattatttttcttaggtccatgaaggttcatattgcaagaagtccacagggtatagagcaatgtggctccctctttctcttccccagagggagctgctgcatggtttccgtgtgctgtcttccactttgctgcatcttcacttcagggaggcctgcagtctgcagccctcttgggacccgagggcaccactccccatcatcctgttgttctttacagcacttttgactttatcttcttaattcctggagggcagggacctcacgtgtttcttctgtatctccagggcccatgtgtctggcacacagtgagcagtcaataaaatggattgaatagacaaatgaatgaacaatgagatggtctccagagcccctcccagcgtgctggctttttgtgtcattgcagactttgcacctctggctccagggagctcacaggcaggggctggtccagcccagaggcgatgaagacagtgacgatgatgatggtggtggagatgcaggcgctgactcaggttctgagagctgtgttgtctgcgtgcacatgggtgagccggaaaggagacctgcagagaatgaaacagacacataaaggaaagaggacattctcacaagatgggtaggccggagtgatcacggaggagatagagtccctgcatgtgaagtggtactgagagacacagcaggaaatggaagtcaagattctgaacccctaaccccttccagctctgaagcttgaacaaaataaaactcatccagcatccagcccagtgcctggtgcacaggcatcttcaaggcacctggcaccttctcctccagcctcccagcagcatggctttcaccggcaagttcgagatggagagtgagaagaattatgatgagttcatgaagctccttgggatctccagcgatgtaatcgaaaaggcccgcaacttcaagatcgtcacggaggtgcagcaggatgggcaggacttcacttggtcccagcactactccgggggccacaccatgaccaacaagttcactgttggcaaggaaagcaacatacagacaatggggggcaagacgttcaaggccactgtgcagatggagggcgggaagctggtggtgaatttccccaactatcaccagacctcagagatcgtgggtgacaagctggtggaggtctccaccatcggaggcgtgacctatgagcgcgtgagcaagagactggcctaagcagccaggcccggcccagggagctacaaacccaccaataaaactgatataaggacagatgctgatagctccagaacc

SEQ ID NO: 65073 - DNA, 1091 bp, Homo sapiens
ggctattttttcctttattattatttttcttaggtccatgaaggttcatattgcaagaagtccacagggtatagagcaatgtggctccctctttctcttccccagagggagctgctgcatggtttccgtgtgctgtcttccactttgctgcatcttcacttcagggaggcctgcagtctgcagccctcttgggacccgagggcaccactccccatcatcctgttgttctttacagcacttttgactttatcttcttaattcctggagggcagggacctcacgtgtttcttctgtatctccagggcccatgtgtctggcacacagtgagcagtcaataaaatggattgaatagacaaatgaatgaacaatgagatggtctccagagcccctcccagcgtgctggctttttgtgtcattgcagactttgcacctctggctccagggagctcacaggcaggggctggtccagcccagaggcgatgaagacagtgacgatgatgatggtggtggagatgcaggcgctgactcaggttctgagagctgtgttgtctgcgtgcacatgggtgagccggaaaggagacctgcagagaatgaaacagacacataaaggaaagcctcccagcagcatggctttcaccggcaagttcgagatggagagtgagaagaattatgatgagttcatgaagctccttgggatctccagcgatgtaatcgaaaaggcccgcaacttcaagatcgtcacggaggtgcagcaggatgggcaggacttcacttggtcccagcactactccgggggccacaccatgaccaacaagttcactgttggcaaggaaagcaacatacagacaatggggggcaagacgttcaaggccactgtgcagatggagggcgggaagctggtggtgaatttccccaactatcaccagacctcagagatcgtgggtgacaagctggtggaggtctccaccatcggaggcgtgacctatgagcgcgtgagcaagagactggcctaagcagccaggcccggcccagggagctacaaacccaccaataaaactgatataaggacagatgctgatagctccagaacc

SEQ ID NO: 65074 - DNA, 593 bp, Homo sapiens
gaagaagtggggtgacttaggggctgagcctcagcaactgggagagtttataagctgggatagcagacccctcagcaccacccattctcctcatccctctgctctctggcctccagcctcccagcagcatggctttcaccggcaagttcgagatggagagtgagaagaattatgatgagttcatgaagctccttgggatctccagcgatgtaatcgaaaaggcccgcaacttcaagatcgtcacggaggtgcagcaggatgggcaggacttcacttggtcccagcactactccgggggccacaccatgaccaacaagttcactgttggcaaggaaagcaacatacagacaatggggggcaagacgttcaaggccactgtgcagatggagggcgggaagctggtggtgaatttccccaactatcaccagacctcagagatcgtgggtgacaagctggtggaggtctccaccatcggaggcgtgacctatgagcgcgtgagcaagagactggcctaagcagccaggcccggcccagggagctacaaacccaccaataaaactgatataaggacagatgctgatagctccagaacc

SEQ ID NO: 65075 - DNA, 611 bp, Homo sapiens
gaagaagtggggtgacttaggggctgagcctcagcaactgggagagtttataagctgggatagcagacccctcagcaccacccattctcctcatccctctgctctctggcctccagcctcccagcagcatggctttcaccggcaagttcgagatggagagtgagaagaattatgatgagttcatgaagctccttgggatctccagcgatgtaatcgaaaaggcccgcaacttcaagatcgtcacggaggtgcagcaggatgggcaggacttcacttggtcccagcactactccgggggccacaccatgaccaacaagttcactgttggcaaggaaagcaacatacagacaatggggggcaagacgttcaaggccactgtgcagatggagggcgggaagctggtggtgaatttccccaactatcaccagacctcagagatcgtgggtgacaagctggtggaggtctccaccatcggaggcgtgacctatgagcgcgtgagcaagagactggcctaagcagccaggcccggcccagggagctacaaacccaccaataaaacagatgcggccgagcattgaaggactcgcacaaatagtgaaatgagaagagtg

SEQ ID NO: 65076 - DNA, 1287 bp, Homo sapiens
tgtccttccttctattccttgcctgcaccatccccctagctttttaccaactgaggcgttatctgaaattcctctgcctgcttttctcagccccatgtcctaagcattaaggtgtccacaaagattcctttctcagacatgccttccctgcccaccccatctgaaaacgacctcttcaaatactggcccatcatcctgttgttctttacagcacttttgactttatcttcttaattcctggagggcagggacctcacgtgtttcttctgtatctccagggcccatgtgtctggcacacagtgagcagtcaataaaatggattgaatagacaaatgaatgaacaatgagatggtctccagagcccctcccagcgtgctggctttttgtgtcattgcagactttgcacctctggctccagggagctcacaggcaggggctggtccagcccagaggcgatgaagacagtgacgatgatgatggtggtggagatgcaggcgctgactcaggttctgagagctgtgttgtctgcgtgcacatgggtgagccggaaaggagacctgcagagaatgaaacagacacataaaggaaagaggacattctcacaagatgggtaggccggagtgatcacggaggagatagagtccctgcatgtgaagtggtactgagagacacagcaggaaatggaagtcaagattctgaacccctaaccccttccagctctgaagcttgaacaaaataaaactcatccagcatccagcccagtgcctggtgcacaggcatcttcaaggcacctggcaccttctcctccagcctcccagcagcatggctttcaccggcaagttcgagatggagagtgagaagaattatgatgagttcatgaagctccttgggatctccagcgatgtaatcgaaaaggcccgcaacttcaagatcgtcacggaggtgcagcaggatgggcaggacttcacttggtcccagcactactccgggggccacaccatgaccaacaagttcactgttggcaaggaaagcaacatacagacaatggggggcaagacgttcaaggccactgtgcagatggagggcgggaagctggtggtgaatttccccaactatcaccagacctcagagatcgtgggtgacaagctggtggaggtctccaccatcggaggcgtgacctatgagcgcgtgagcaagagactggcctaagcagccaggcccggcccagggagctacaaacccaccaataaaactgatataaggacagatgctgatagctccagaacc

SEQ ID NO: 65077 - DNA, 461 bp, Homo sapiens
tttcccaaaccacagggttaaaagcagctcttatatggctactctgcttgtccccgggtccagggatctccagcgatgtaatcgaaaaggcccgcaacttcaagatcgtcacggaggtgcagcaggatgggcaggacttcacttggtcccagcactactccgggggccacaccatgaccaacaagttcactgttggcaaggaaagcaacatacagacaatggggggcaagacgttcaaggccactgtgcagatggagggcgggaagctggtggtgaatttccccaactatcaccagacctcagagatcgtgggtgacaagctggtggaggtctccaccatcggaggcgtgacctatgagcgcgtgagcaagagactggcctaagcagccaggcccggcccagggagctacaaacccaccaataaaactgatataaggacagatgctgatagctccagaacc

SEQ ID NO: 65078 - DNA, 180 bp, Homo sapiens
taaaatataacaggtgaaatttaaaactcagtgaatagattagcatattagatagtgtagaagagaactagaagatctgaagatactgttcagattacagcacggggcgacaaaggacatgaaaactgcaagtggttaagagacatggagggtaagataccacgaaataactagaaagac

SEQ ID NO: 65079 - DNA, 577 bp, Homo sapiens
agataggtttattttctccttctctcctttaactattgtctactgaagtctttaagacttccttcatgggttttggaacacaaaagatttccttcttatcttcattggtctgtgaaggattctctcttctgtaatagatttttattttcttggtacattttcttgtaactgaaatcctcaagctaaaaaaggtggatggaagcacattttgcaaattcattctcatgtctctggcattgattcaaatctctaattgaaaaactagtttccaaggggcactaattaggtctcgagattgatgctttgtgcaaagtttagactttttctagtctgccacattatgtagtttccttttttcatcatctctagtttgtagctaaggaattttatatttctattggtctgggctatgggcaacaatttttatgcagtgattacttttatgtaagtgaaaatgttggcactttagaataaattttgacacatttccaatatctactactgtatctaatgaattatgtagcatttttcttaatgtgcttgagagccaattatatatttgttgtatattcatttg

SEQ ID NO: 65080 - DNA, 514 bp, Homo sapiens
gagacaatggttacttcttttcatggattctaaattctatctgccagtcactttttgtgtgtgcattcattgagggtgtacagaatggaattacagaggcagaaaaaaatgaggtctctgccaaattgatagtttaaaaaacattttagtggcctacttaactgtaatttgttttagttttaaacaagaaaaacctcagcatgtaagcaaagcagactggacttgaacagatatggaatgcaaagcacacaggagagtcatggggatcctgaagggggattagaagttggacaactttttatgcaatgaacaacactgcattgaggcagtggattaaacagtagtgcatatcacttggctgaagtgacaggaataaagaacagaatgcatccactcctccagtctcattaagctgcctctttctcctgaaattggattgggattccaggacacctctcaacctacaggaaacactggatctaaagctgaaacaggtacccagtgccatttgaaa

SEQ ID NO: 65081 - DNA, 585 bp, Homo sapiens
agcgggtgggcgcgagtcggcctcccgcggtgccgccgcagcgtggcgcggagaggcaggggcatccagtggttcaaggttacaataagctgtgatcgtgccactgcattctacctgggatgacagagtgggaccctgtgccacagagtgagaccctgtctcaaaaaaaaaaaaactatgtaaatccaagaaaaaaagaaaacagctcctgttgccttttgcctctcatccagaaaggtatccatttgcctttctaatatctcttcatcctgtcaggccacaaatggagacgactcacctgtattgtacctctccaagttctggaaagtcgatggagggtttactcagaacttcaatctatccagaactgagttttgtttatggtgtgtgccagaggcagtggattaaacagtagtgcatatcacttggctgaagtgacaggaataaagaacagaatgcatccactcctccagtctcattaagctgcctctttctcctgaaattggattgggattccaggacacctctcaacctacaggaaacactggatctaaagctgaaacaggtacccagtgccatttgaaa

SEQ ID NO: 65082 - DNA, 631 bp, Homo sapiens
acgctctctctgtggggggtttaaaaatatttaccactacccctctctcacctgccacaatgtgaagaaagtccttgtacccttcgccttccgccataatggcaggggcatccagtggttcaaggttacaataagctgtgatcgtgccactgcattctacctgggatgacagagtgggaccctgtgccacagagtgagaccctgtctcaaaaaaaaaaaaactatgtaaatccaagaaaaaaagaaaacagctcctgttgccttttgcctctcatccagaaaggtatccatttgcctttctaatatctcttcatcctgtcaggccacaaatggagacgactcacctgtattgtacctctccaagttctggaaagtcgatggagggtttactcagaacttcaatctatccagaactgagttttgtttatggtgtgtgccagaggcagtggattaaacagtagtgcatatcacttggctgaagtgacaggaataaagaacagaatgcatccactcctccagtctcattaagctgcctctttctcctgaaattggattgggattccaggacacctctcaacctacaggaaacactggatctaaagctgaaacaggtacccagtgccatttgaaa

SEQ ID NO: 65083 - DNA, 375 bp, Homo sapiens
ataacctttagttctaagcagggcccattagggattttaaaatattcacttttgaagctgattcctgcattggtagacactttgcatgacattaaataagctttgcctgttctaggaggcagtggattaaacagtagtgcatatcacttggctgaagtgacaggaataaagaacagaatgcatccactcctccagtctcattaagctgcctctttctcctgaaattggattgggattccaggacacctctcaacctacaggaaacactggatctaaagctgaaacaggtacccagtgccatttgaaaaattaactgctctattgaaatgtaatctacataccataacccagtacagtttctacccacaacaaaat

SEQ ID NO: 65084 - DNA, 1718 bp, Homo sapiens
gctagtcaagtgaaacagtgggagtgaagaagaaacaaagacatctataactggttgtgatcaattagttgtaaacactgcactcagaccagcctgggaagattttaaggatatggtgtggtctgatgggttccaaggcagaggttacaatagcctggaagagggagactgcttaggcagtggcatcctggtgggatagggtctccagcccactggaattttctcttccaagcgtggccccgccctctccgctcgtgattggccctaagttccgggccccagtttcattggatgagcggtcgggggaccgggccaggtgactaagtttccgcggcgccttctccccggccactgcttgagccgctgagagggtggcgacgtcggggccatggggctgggcccggtcttcctgcttctggctggcatcttcccttttgcacctccgggagctgctgctgagccccacagtcttcgttataacctcacggtgctgtcctgggatggatctgtgcagtcagggtttcttgctgaggtacatctggatggtcagcccttcctgcgctatgacaggcagaaatgcagggcaaagccccagggacagtgggcagaagatgtcctgggaaataagacatgggacagagagaccagggacttgacagggaacggaaaggacctcaggatgaccctggctcatatcaaggaccagaaagaaggcttgcattccctccaggagattagggtctgtgagatccatgaagacaacagcaccaggagctcccagcatttctactacgatggggagctcttcctctcccaaaacctggagactgaggaatggacagtgccccagtcctccagagctcagaccttggccatgaacgtcaggaatttcttgaaggaagatgccatgaagaccaagacacactatcacgctatgcatgcagactgcctgcaggaactacggcgatatctagaatccggcgtagtcctgaggagaacagtgccccccatggtgaatgtcacccgcagcgaggcctcagagggcaacatcaccgtgacatgcagggcttccagcttctatccccggaatatcacactgacctggcgtcaggatggggtatctttgagccacgacacccagcagtggggggatgtcctgcctgatgggaatggaacctaccagacctgggtggccaccaggatttgccgaggagaggagcagaggttcacctgctacatggaacacagcgggaatcacagcactcaccctgtgccctctgggaaagtgctggtgcttcagagtcattggcagacattccatgtttctgctgttgctgctgctgctgctatttttgttattattattttctatgtccgttgttgtaagaagaaaacatcagctgcagagggtccagagctcgtgagcctgcaggtcctggatcaacacccagttgggacgagtgaccacagggatgccacacagctcggatttcagcctctgatgtcagctcttgggtccactggctccactgagggcacctagactctacagccaggcggctggaattgaattccctgcctggatctcacaagcactttccctcttggtgcctcagtttcctgacctatgaaacagagaaaataaaagcacttatttattgttgttggaggctgcaaaatgttagtagatatgaggcatttgcagctgtgccatatta

SEQ ID NO: 65085 - DNA, 1992 bp, Homo sapiens
gctagtcaagtgaaacagtgggagtgaagaagaaacaaagacatctataactggttgtgatcaattagttgtaaacactgcactcagaccagcctgggaagattttaaggatatggtgtggtctgatgggttccaaggcagaggttacaatagcctggaagagggagactgcttaggcagtggcatcctggtgggatagggtctccagcccactggaattttctcttccaagcgtggccccgccctctccgctcgtgattggccctaagttccgggccccagtttcattggatgagcggtcgggggaccgggccaggtgactaagtttccgcggcgccttctccccggccactgcttgagccgctgagagggtggcgacgtcggggccatggggctgggcccggtcttcctgcttctggctggcatcttcccttttgcacctccgggagctgctgctgagccccacagtcttcgttataacctcacggtgctgtcctgggatggatctgtgcagtcagggtttcttgctgaggtacatctggatggtcagcccttcctgcgctatgacaggcagaaatgcagggcaaagccccagggacagtgggcagaagatgtcctgggaaataagacatgggacagagagaccagggacttgacagggaacggaaaggacctcaggatgaccctggctcatatcaaggaccagaaagaaggtgagagtcggcaggggcaagagtgactggagaggccttttccagaaaagttaggggcagagagcagggacctgtctcttcccactggatctggctcaggctgggggtgaggaatgggggtcagtggaactcagcagggaggtgagccggcactcagcccacacagggaggcatggaggagggccagggaggcataccccctgggctgagttcctcacttgggtggaaaggtgatgggttcgggaatggagaagtcactgctgggtgggggcaggcttgcattccctccaggagattagggtctgtgagatccatgaagacaacagcaccaggagctcccagcatttctactacgatggggagctcttcctctcccaaaacctggagactgaggaatggacagtgccccagtcctccagagctcagaccttggccatgaacgtcaggaatttcttgaaggaagatgccatgaagaccaagacacactatcacgctatgcatgcagactgcctgcaggaactacggcgatatctagaatccggcgtagtcctgaggagaacagtgccccccatggtgaatgtcacccgcagcgaggcctcagagggcaacatcaccgtgacatgcagggcttccagcttctatccccggaatatcacactgacctggcgtcaggatggggtatctttgagccacgacacccagcagtggggggatgtcctgcctgatgggaatggaacctaccagacctgggtggccaccaggatttgccgaggagaggagcagaggttcacctgctacatggaacacagcgggaatcacagcactcaccctgtgccctctgggaaagtgctggtgcttcagagtcattggcagacattccatgtttctgctgttgctgctgctgctgctatttttgttattattattttctatgtccgttgttgtaagaagaaaacatcagctgcagagggtccagagctcgtgagcctgcaggtcctggatcaacacccagttgggacgagtgaccacagggatgccacacagctcggatttcagcctctgatgtcagctcttgggtccactggctccactgagggcacctagactctacagccaggcggctggaattgaattccctgcctggatctcacaagcactttccctcttggtgcctcagtttcctgacctatgaaacagagaaaataaaagcacttatttattgttgttggaggctgcaaaatgttagtagatatgaggcatttgcagctgtgccatatta

SEQ ID NO: 65086 - DNA, 1671 bp, Homo sapiens
ggcggagcggagccccgccctgggttatgtaagcgaccgcgctgggccgtttctctttcttttccggaccctgcagtggcgcctaaagtctgagagagggaagtcgcctctgtgctcgtgagtgcatggggtataagagccccacagtcttcgttataacctcacggtgctgtcctgggatggatctgtgcagtcagggtttcttgctgaggtacatctggatggtcagcccttcctgcgctatgacaggcagaaatgcagggcaaagccccagggacagtgggcagaagatgtcctgggaaataagacatgggacagagagaccagggacttgacagggaacggaaaggacctcaggatgaccctggctcatatcaaggaccagaaagaaggtgagagtcggcaggggcaagagtgactggagaggccttttccagaaaagttaggggcagagagcagggacctgtctcttcccactggatctggctcaggctgggggtgaggaatgggggtcagtggaactcagcagggaggtgagccggcactcagcccacacagggaggcatggaggagggccagggaggcataccccctgggctgagttcctcacttgggtggaaaggtgatgggttcgggaatggagaagtcactgctgggtgggggcaggcttgcattccctccaggagattagggtctgtgagatccatgaagacaacagcaccaggagctcccagcatttctactacgatggggagctcttcctctcccaaaacctggagactgaggaatggacagtgccccagtcctccagagctcagaccttggccatgaacgtcaggaatttcttgaaggaagatgccatgaagaccaagacacactatcacgctatgcatgcagactgcctgcaggaactacggcgatatctagaatccggcgtagtcctgaggagaacagtgccccccatggtgaatgtcacccgcagcgaggcctcagagggcaacatcaccgtgacatgcagggcttccagcttctatccccggaatatcacactgacctggcgtcaggatggggtatctttgagccacgacacccagcagtggggggatgtcctgcctgatgggaatggaacctaccagacctgggtggccaccaggatttgccgaggagaggagcagaggttcacctgctacatggaacacagcgggaatcacagcactcaccctgtgccctctgggaaagtgctggtgcttcagagtcattggcagacattccatgtttctgctgttgctgctgctgctgctatttttgttattattattttctatgtccgttgttgtaagaagaaaacatcagctgcagagggtccagagctcgtgagcctgcaggtcctggatcaacacccagttgggacgagtgaccacagggatgccacacagctcggatttcagcctctgatgtcagctcttgggtccactggctccactgagggcacctagactctacagccaggcggctggaattgaattccctgcctggatctcacaagcactttccctcttggtgcctcagtttcctgacctatgaaacagagaaaataaaagcacttatttattgttgttggaggctgcaaaatgttagtagatatgaggcatttgcagctgtgccatatta

SEQ ID NO: 65087 - DNA, 1430 bp, Homo sapiens
gctagtcaagtgaaacagtgggagtgaagaagaaacaaagacatctataactggttgtgatcaattagttgtaaacactgcactcagaccagcctgggaagattttaaggatatggtgtggtctgatgggttccaaggcagaggttacaatagcctggaagagggagactgcttaggcagtggcatcctggtgggatagggtctccagcccactggaattttctcttccaagcgtggccccgccctctccgctcgtgattggccctaagttccgggccccagtttcattggatgagcggtcgggggaccgggccaggtgactaagtttccgcggcgccttctccccggccactgcttgagccgctgagagggtggcgacgtcggggccatggggctgggcccggtcttcctgcttctggctggcatcttcccttttgcacctccgggagctgctgctgagccccacagtcttcgttataacctcacggtgctgtcctgggatggatctgtgcagtcagggtttcttgctgaggtacatctggatggtcagcccttcctgcgctatgacaggcagaaatgcagggcaaagccccagggacagtgggcagaagatgtcctgggaaataagacatgggacagagagaccagggacttgacagggaacggaaaggacctcaggatgaccctggctcatatcaaggaccagaaagaagtgccccccatggtgaatgtcacccgcagcgaggcctcagagggcaacatcaccgtgacatgcagggcttccagcttctatccccggaatatcacactgacctggcgtcaggatggggtatctttgagccacgacacccagcagtggggggatgtcctgcctgatgggaatggaacctaccagacctgggtggccaccaggatttgccgaggagaggagcagaggttcacctgctacatggaacacagcgggaatcacagcactcaccctgtgccctctgggaaagtgctggtgcttcagagtcattggcagacattccatgtttctgctgttgctgctgctgctgctatttttgttattattattttctatgtccgttgttgtaagaagaaaacatcagctgcagagggtccagagctcgtgagcctgcaggtcctggatcaacacccagttgggacgagtgaccacagggatgccacacagctcggatttcagcctctgatgtcagctcttgggtccactggctccactgagggcacctagactctacagccaggcggctggaattgaattccctgcctggatctcacaagcactttccctcttggtgcctcagtttcctgacctatgaaacagagaaaataaaagcacttatttattgttgttggaggctgcaaaatgttagtagatatgaggcatttgcagctgtgccatatta

SEQ ID NO: 65088 - DNA, 1397 bp, Homo sapiens
ggcggagcggagccccgccctgggttatgtaagcgaccgcgctgggccgtttctctttcttttccggaccctgcagtggcgcctaaagtctgagagagggaagtcgcctctgtgctcgtgagtgcatggggtataagagccccacagtcttcgttataacctcacggtgctgtcctgggatggatctgtgcagtcagggtttcttgctgaggtacatctggatggtcagcccttcctgcgctatgacaggcagaaatgcagggcaaagccccagggacagtgggcagaagatgtcctgggaaataagacatgggacagagagaccagggacttgacagggaacggaaaggacctcaggatgaccctggctcatatcaaggaccagaaagaaggcttgcattccctccaggagattagggtctgtgagatccatgaagacaacagcaccaggagctcccagcatttctactacgatggggagctcttcctctcccaaaacctggagactgaggaatggacagtgccccagtcctccagagctcagaccttggccatgaacgtcaggaatttcttgaaggaagatgccatgaagaccaagacacactatcacgctatgcatgcagactgcctgcaggaactacggcgatatctagaatccggcgtagtcctgaggagaacagtgccccccatggtgaatgtcacccgcagcgaggcctcagagggcaacatcaccgtgacatgcagggcttccagcttctatccccggaatatcacactgacctggcgtcaggatggggtatctttgagccacgacacccagcagtggggggatgtcctgcctgatgggaatggaacctaccagacctgggtggccaccaggatttgccgaggagaggagcagaggttcacctgctacatggaacacagcgggaatcacagcactcaccctgtgccctctgggaaagtgctggtgcttcagagtcattggcagacattccatgtttctgctgttgctgctgctgctgctatttttgttattattattttctatgtccgttgttgtaagaagaaaacatcagctgcagagggtccagagctcgtgagcctgcaggtcctggatcaacacccagttgggacgagtgaccacagggatgccacacagctcggatttcagcctctgatgtcagctcttgggtccactggctccactgagggcacctagactctacagccaggcggctggaattgaattccctgcctggatctcacaagcactttccctcttggtgcctcagtttcctgacctatgaaacagagaaaataaaagcacttatttattgttgttggaggctgcaaaatgttagtagatatgaggcatttgcagctgtgccatatta

SEQ ID NO: 65089 - DNA, 1377 bp, Homo sapiens
ggcggagcggagccccgccctgggttatgtaagcgaccgcgctgggccgtttctctttcttttccggaccctgcagtggcgcctaaagtctgagagagggaagtcgcctctgtgctcagccccacagtcttcgttataacctcacggtgctgtcctgggatggatctgtgcagtcagggtttcttgctgaggtacatctggatggtcagcccttcctgcgctatgacaggcagaaatgcagggcaaagccccagggacagtgggcagaagatgtcctgggaaataagacatgggacagagagaccagggacttgacagggaacggaaaggacctcaggatgaccctggctcatatcaaggaccagaaagaaggcttgcattccctccaggagattagggtctgtgagatccatgaagacaacagcaccaggagctcccagcatttctactacgatggggagctcttcctctcccaaaacctggagactgaggaatggacagtgccccagtcctccagagctcagaccttggccatgaacgtcaggaatttcttgaaggaagatgccatgaagaccaagacacactatcacgctatgcatgcagactgcctgcaggaactacggcgatatctagaatccggcgtagtcctgaggagaacagtgccccccatggtgaatgtcacccgcagcgaggcctcagagggcaacatcaccgtgacatgcagggcttccagcttctatccccggaatatcacactgacctggcgtcaggatggggtatctttgagccacgacacccagcagtggggggatgtcctgcctgatgggaatggaacctaccagacctgggtggccaccaggatttgccgaggagaggagcagaggttcacctgctacatggaacacagcgggaatcacagcactcaccctgtgccctctgggaaagtgctggtgcttcagagtcattggcagacattccatgtttctgctgttgctgctgctgctgctatttttgttattattattttctatgtccgttgttgtaagaagaaaacatcagctgcagagggtccagagctcgtgagcctgcaggtcctggatcaacacccagttgggacgagtgaccacagggatgccacacagctcggatttcagcctctgatgtcagctcttgggtccactggctccactgagggcacctagactctacagccaggcggctggaattgaattccctgcctggatctcacaagcactttccctcttggtgcctcagtttcctgacctatgaaacagagaaaataaaagcacttatttattgttgttggaggctgcaaaatgttagtagatatgaggcatttgcagctgtgccatatta

SEQ ID NO: 65090 - DNA, 1665 bp, Homo sapiens
gctagtcaagtgaaacagtgggagtgaagaagaaacaaagacatctataactggttgtgatcaattagttgtaaacactgcactcagaccagcctgggaagattttaaggatatggtgtggtctgatgggttccaaggcagaggttacaatagcctggaagagggagactgcttaggcagtggcatcctggtgggatagggtctccagcccactggaattttctcttccaagcgtggccccgccctctccgctcgtgattggccctaagttccgggccccagtttcattggatgagcggtcgggggaccgggccaggtgactaagtttccgcggcgccttctccccggccactgcttgagccgctgagagggtggcgacgtcggggccatggggctgggcccggtcttcctgcttctggctggcatcttcccttttgcacctccgggagctgctgctgagccccacagtcttcgttataacctcacggtgctgtcctgggatggatctgtgcagtcagggtttcttgctgaggtacatctggatggtcagcccttcctgcgctatgacaggcagaaatgcagggcaaagccccagggacagtgggcagaagatgtcctgggaaataagacatgggacagagagaccagggacttgacagggaacggaaaggacctcaggatgaccctggctcatatcaaggaccagaaagaaggcttgcattccctccaggagattagggtctgtgagatccatgaagacaacagcaccaggagctcccagcatttctactacgatggggagctcttcctctcccaaaacctggagactgaggaatggacagtgccccagtcctccagagctcagaccttggccatgaacgtcaggaatttcttgaaggaagatgccatgaagaccaagacacactatcacgctatgcatgcagactgcctgcaggaactacggcgatatccgcagcgaggcctcagagggcaacatcaccgtgacatgcagggcttccagcttctatccccggaatatcacactgacctggcgtcaggatggggtatctttgagccacgacacccagcagtggggggatgtcctgcctgatgggaatggaacctaccagacctgggtggccaccaggatttgccgaggagaggagcagaggttcacctgctacatggaacacagcgggaatcacagcactcaccctgtgccctctgggaaagtgctggtgcttcagagtcattggcagacattccatgtttctgctgttgctgctgctgctgctatttttgttattattattttctatgtccgttgttgtaagaagaaaacatcagctgcagagggtccagagctcgtgagcctgcaggtcctggatcaacacccagttgggacgagtgaccacagggatgccacacagctcggatttcagcctctgatgtcagctcttgggtccactggctccactgagggcacctagactctacagccaggcggctggaattgaattccctgcctggatctcacaagcactttccctcttggtgcctcagtttcctgacctatgaaacagagaaaataaaagcacttatttattgttgttggaggctgcaaaatgttagtagatatgaggcatttgcagctgtgccatatta

SEQ ID NO: 65091 - DNA, 2649 bp, Homo sapiens
gcagctgatgctgtcggtgagtctagaggattccgggtatcgacagattgcactaattgtgaatttagattgtttatgatgctgagtatatagcgtgctcatgccaaaatcttgtagatgtcaaataaaaagttattatactaaacaagaagtggagtcttgtttaggccctcactggtgaccttcagaagtagtctgtgacggggactcagcagaatttgtgtgttgtctcagcattccaggtagccttatagtttggcttaaaacttatccctaaaatgtaagatggcattgagggaaagggtataatgatagtacttctgaatgttttttaagttgaattgtttgtaaacttcttgcagaattgggtgagatgtgtgttaaaactgacaaacctggctgaaagcttagggcgttcatcctcttgtgtctcctttagcctgagtttggttatgtcaagcttaccgtaagttttcttaggatttatttattcttggtgcctaaaagaataaattgaaagtactttctgttctttggcacattttgcccagcggatgcaacttctatcctcagtccagttcatatatctcaggcagtgatccattttgtatcagccagtttcccttgttagggccgctagacccggctggcagccaagagcagcactctccccaccttcagcagaacttctcagctcatgtgtgtgtttttaaaagcagtaggcagcttccatcagcaatggaagtgtcccccactccagtggtggaggtgcagtcgctggacctgaggaagtggggaagcattacaaaccctcctgcagtaagaatggcagagttgggaaggatcttctctcgcaggctgttggcccaactcctcttttctgtgtatgagggcatcttagttttttatggcgttttcaaagcagcatatgaggattcttagcatgcagctaagtgacaacccccatggcctatgatgtaatgtttgctctggactagccatcttgataaataggagtgtatgtatcttaggttctttgtagaacagctatttttttttctcattaaaaaggcctctgaaagccctctcaaaatggacctcacaaaggcaaccagtgtgaatggatgggagctggggtgctgcatgcccaggctggtcatggtgtgtgcagcacccagagagttgcacccaccccttcttcaggtggacatccgacctttacactgtggtcttgcaaaaatcagcgagttagtttggccgccctgtgaagcttcagcattcaaggtcctcttctgttaaaacccaactcgtagccgggcgtggtggctcactcctataatcccagcacttcgggaggccaaggcaggtgcatcacttgaggccaggagttcgagaccagcctggtccacatggcaaaaccccatctgtaccaaaaaatacaaaaaatttgccgctgacttctgtaaaataggtccattcattgcaggatctaaatgccacacctgaattcagaggccttgtttaattaaccccatgtccactttgcctctgcaatgcctttttctttttagcaatatggctctgagcacaaagatttggttggaaatcatgttcgtgttttcagagtttacagcgtcaattgtactgaaaaccacttccagagtctaaagcagctcagatgttatctctgggggaattagtgttcccctcatttagcaacctccataccacaaggtctctgtctgtagttactgggattatccagatacactatcaatgatacaaattcataggagtattaatgcatttctttaaacacaacttgattaagaagcaaatatgttaagcagttttctttttctgctgctaaattacagttagacacttcagtatcttctctttacatgtgtatataaattagtaagaacctgcatccaaagcaatgtagtgtgtgtatgtatctatatatatttattctaactcagcacttcagaagcctttttgagttacaacaatattttagtttgcctcatctgtagaggtaaaatttctatattaccaagctccagaggaatatgatattttacaggcacaattttctggctgtagtccctggggcattcatttgctggcctccatgggatgctgttagaacaattgttagccggcaagagaagaaaggctaccaggacagcatttataattgtagaatgggagccttcttccctctcccctccactttcattttagcatgagataaaaaaatagattggaaatgattgttgcatctcacttcatggaagtaggggcagaagttccctctggatccttttcttgacaagcagtcaagaggaaggtccccatacacatgtacctgtgtgatacttggtagtttctaagaatggtgctacataagcgttgctgttaggctgggatcctattaatgaacgtttgattagttcaggcctcccaatggcaaaggcagacaccgtggagatggacatttactgactccccttctgtgtggcttcggtctccctggctaacaccacacctgtgcgtactgcgctcggcccactttgctgcagaaacgtagcaagcgtttcatgtcagggctacagctgagagcaaaaactgcaaaaaaaaaaa

SEQ ID NO: 65092 - DNA, 461 bp, Homo sapiens
gaggatccccctcggatcgaggtttcgtgaagaaataactcgagaagccaaaaaagcacgaaaagtaggtggccttactggtagcagttctgacgacagtggaagtgaatctgatgcctctgataatgaagaaagtgactatgagagctctaaaaacatgagttctggagatgatgacgatttcaacccatttttagatgagtctaatgaggatgatgaaaatggtaagttcagtatattaaatatacacgaaagcatataatatttcagtatatttgaaaatgggatatgaaaccttttcttctgtacagtacaaatgatcacacagattataatctttgcttggtggaaagctccaggcttatctaccttctggaagtttgagcctcatatatgtgagaagataacctcaattttgtgcagttatttttaacttgaaaacatggatttgtaccccatgg

SEQ ID NO: 65093 - DNA, 5689 bp, Homo sapiens
  misc_feature (180)..(180): n is a, c, g, or t
aagatggcggcggggaggtaggcagagcaggacgccgctgctgccgccgccaccgccgcctccgctccagtcgcctctggtccttcaaactcacacctcccgggaggagctgtcctggcgccgggtcccgcggggaaaatggtggagccagggcaagatttactgcttgctgctttgagngagagtggaattagtccgaatgacctctttgatattgatggtggagatgcagggcttgcaactccaatgcctaccccgtcagttcagcagtcagtgccacttagtgcattagaactaggtttggagaccgaagcagcagttcctgttaaacaagaaccagagactgtacctactccagcactattaaatgtgaggcagcctccatctactacaacatttgtgctgaatcaaataaatcatcttccacccttgggatctacaattgtaatgactaaaacaccacctgtaacaaccaacaggcaaaccatcactttaactaagtttatccagactactgcaagcacacgcccgtcagtctcagcaccaacagtacgaaatgccatgacctctgcaccttcaaaagaccaagttcagcttaaagatctactgaaaaataatagtcttaatgaactgatgaaactaaagccacctgctaatattgctcagccagtagcaacagcagctactgatgtaagcaatggtacagtaaagaaagagtcttctaataaagaaggagctagaatgtggataaacgacatgaagatgaggagtttttccccaaccatgaaggttcctgttgtaaaagaagatgatgaaccagaggaagaagatgaagaagaaatgggtcatgcagaaacctatgcagaatacatgccaataaaattaaaaattggcctacgtcatccagatgctgtagtggaaaccagctctttatccagtgttactcctcctgatgtttggtacaaaacatccatttctgaggaaaccattgataatggctggttatcagcattgcagcttgaggcaattacatatgcagcccagcaacatgaaactttcctacctaatggagatcgtgctggcttcttaataggtgatggtgccggtgtaggaaaaggaaggacgatagcaggaatcatctatgaaaattatttgttgagtagaaaacgagcattgtggtttagtgtttcaaatgacttaaagtatgatgctgaaagagatttaagggatattggagcaaaaaacattttggttcattcgttaaataagtttaaatacggaaaaatttcttccaaacataatgggagtgtgaaaaagggtgttatttttgctacttactcttcacttattggtgaaagccagtctggcggcaagtataaaactaggttaaaacaacttctgcattggtgcggtgatgacttcgatggagtgatagtgtttgatgagtgtcataaagccaaaaacttatgtcctgttggttcttcaaagccaaccaagacaggcttagcagttttagagcttcagaacaaattgccaaaagccagagttgtttatgctagtgcaactggtgcttctgaaccacgcaacatggcctatatgaaccgtcttggcatatggggtgagggtactccatttagagaattcagtgattttattcaagcagtagaacggagaggagttggtgccatggaaatagttgctatggatatgaagcttagaggaatgtacattgctcgacaactgagctttactggagtgaccttcaaaattgaggaagttcttctttctcagagctacgttaaaatgtataacaaagctgtcaagctgtgggtcattgccagagagcggtttcagcaagctgcagatctgattgatgctgagcaacgaatgaagaagtccatgtggggtcagttctggtctgctcaccagaggttcttcaaatacttatgcatagcatccaaagttaaaagggttgtgcaactagctcgagaggaaatcaagaatggaaaatgtgttgtaattggtctgcagtctacaggagaagctagaacattagaagctttggaagagggcgggggagaattgaatgattttgtttcaactgccaaaggtgtgttgcagtcactcattgaaaaacattttcctgctccagacaggaaaaaactttatagtttactaggaatcgatttgacagctccaagtaacaacagttcgccaagagatagtccttgtaaagaaaataaaataaagaagcggaaaggtgaagaaataactcgagaagccaaaaaagcacgaaaagtaggtggccttactggtagcagttctgacgacagtggaagtgaatctgatgcctctgataatgaagaaagtgactatgagagctctaaaaacatgagttctggagatgatgacgatttcaacccatttttagatgagtctaatgaggatgatgaaaatgatccctggttaattagaaaagaccacaagaaaaacaaagagaaaaaaaagaagaaaagtatagatccagattctattcaaagtgccttattagcatcaggtcttggatcaaaacgacctagtttttcatctacaccagttatctcacctgctcctaacagtacaccagctaacagtaacaccaacagtaacagtagccttataacaagtcaggatgctgtggaaagggctcagcagatgaagaaagacctgcttgataagctagaaaaattagctgaagacctcccccctaataccctggatgaacttatcgatgaacttggtggccctgagaacgttgctgagatgactggccgcaagggacgggttgtgagcaatgatgatggaagcatatcttatgagtcaagatctgaacttgatgtgcctgtggaaatactaaacatcacagaaaaacaacgatttatggatggagataagaatattgctatcatctcagaagctgccagctcgggtatttcattacaagcagataggagagctaaaaatcaaaggcgaagagttcatatgactttagaattaccttggagcgctgatagagcaattcaacagttcggacgtactcatagatcaaaccaagttactgctcctgagtatgtctttctgatatctgaactggcaggagaacaaagatttgcatctattgttgctaaaagacttgagagtttgggggcacttacacatggcgatagaagggcaacagaatctagagatctgagcaggttcaactttgataataagtatggaagaaatgctttagaaattgtcatgaaatccattgtaaacttggattctcctatggtatcaccacctccagactatcctggagaattttttaaagatgttcgacaaggactgataggcgttggcctgataaatgtagaagatcgctcgggaattcttactctcgataaagattataacaacataggaaaattcttaaatagaattttaggcatggaggtgcatcagcagaatgcgttatttcagtattttgcggacacacttactgcagttgttcaaaatgccaaaaaaaatggaagatatgatatgggaatcttagatcttggttctggagatgaaaaagtgcggaaaagtgatgttaaaaagtttctgactccaggatattcaacctctggccacgtagaattatacacaattagtgtagagaggggaatgtcatgggaggaagctaccaagatttgggctgagctgacaggaccagacgatggcttttacttgtcattgcaaataaggaacaacaagaaaactgccatcttagttaaagaagtgaatcctaaaaagaaacttttcttagtttatcgaccaaatactgggaagcagctcaaattagaaatttatgctgatctaaaaaagaaatataagaaggtcgtctcagatgatgccctgatgcactggttagatcagtataattcatctgcagatacttgtactcatgcttattggcgcggcaattgcaaaaaagcaagcttggggctagtttgtgaaataggtcttcgttgccgtacatattatgtattatgtggttcagtgctgagtgtctggacaaaagttgagggtgttctagcatctgtcagtggcacaaacgtgaagatgcagatcgtgcggctaagaacggaagatgggcaacggattgtaggtttgatcattccggcaaattgtgtgtctcctcttgtaaatctcctatcaacttcagaccagtctcaacagcttgcggtccaacagaaacagctatggcaacagcatcaccctcagagcatcaccaacttgagcaacgcatgaagaacagacaggtttcaacatggatggatctgaaatgctgttgaagcatatcatttgcataaaaatcagggacagtttccaaagaattatatatttttttcagttgtgctctctagttagtttttttgggagtaaggacaaacctggaatagatagcaaaactgaaaatcagcagtgctgatggtggtacatatgtctttcctttagcttctcccctgataattcccatctgcttttacttcgggtgagcagagggggatgtgtgtgtgcgtgtgtgtcagtctgtttgtgagtgtgttaaaggctacagaccacagttggtttaaaatgcttggaacttcccaaactggctttactttatgtttatacagtgctcagggttaacgcagtacatccatgccattgctgtgggaggtatccccggatgcatgtgttttgagtctataaatatagaaaatatatattggtttctttttccaacttaataggtttattaaagcatgaaatgaaaggttgcatatcatgcattcaggttattttctaatttttgttctgacagtgcatgtctttggaagcatgctgaaacaagattaacacaggagtcgagtaacagagagaaacatttgttagatgtacagcattggttattgcatttttatagtgtttatacctgggtattgcttcaaaccctgcagacccctccttccccttctccctgccctgggtttctggtcaaggtaatgaatacatacatttttctgtgataaaactcttaaaagttaattttaatgtattaatagtattcctaatgtgtgctgcagaaatggctatgagcctcttaaatttacatttgcaacttaaaggtagttttagaaggaagtacaaattggctttcatcttgcaaacaatcgttttttacttcattatcttaatttgctttgtcactcataaaaaggaaaccatacctgagttgtagacaatgaggaaacacttgaggcttctgctgtgtgttcttttgttattgttgttattgttgttactcagtaacttgaatattgtttaatgtgttgtaagacgtagagtttatctcaagctgttaaaaatggtaatgtacaaatgtgaatagacacttatctatataatatgggtaagttttgtttcgcctataatagatgtttataaaaacaagtgaggggacagttggtctttttatcttttctttctttttctttcttttctttttttcttttttttctttttttttttttttgcttccacaggttgcactattgaaaaatcgagattgtataaacctggtaaaaagctgcaagatgccaaaatcttgtagatgtcaaataaaaagttattatac

SEQ ID NO: 65094 - DNA, 5529 bp, Homo sapiens
  misc_feature (180)..(180): n is a, c, g, or t
aagatggcggcggggaggtaggcagagcaggacgccgctgctgccgccgccaccgccgcctccgctccagtcgcctctggtccttcaaactcacacctcccgggaggagctgtcctggcgccgggtcccgcggggaaaatggtggagccagggcaagatttactgcttgctgctttgagngagagtggaattagtccgaatgacctctttgatattgatggtggagatgcagggcttgcaactccaatgcctaccccgtcagttcagcagtcagtgccacttagtgcattagaactaggtttggagaccgaagcagcagttcctgttaaacaagaaccagagactgtacctactccagcactattaaatgtgaggcagcctccatctactacaacatttgtgctgaatcaaataaatcatcttccacccttgggatctacaattgtaatgactaaaacaccacctgtaacaaccaacaggcaaaccatcactttaactaagtttatccagactactgcaagcacacgcccgtcagtctcagcaccaacagtacgaaatgccatgacctctgcaccttcaaaagaccaagttcagcttaaagatctactgaaaaataatagtcttaatgaactgatgaaactaaagccacctgctaatattgctcagccagtagcaacagcagctactgatgtaagcaatggtacagtaaagaaagagtcttctaataaagaaggagctagaatgtggataaacgacatgaagatgaggagtttttccccaaccatgaaggttcctgttgtaaaagaagatgatgaaccagaggaagaagatgaagaagaaatgggtcatgcagaaacctatgcagaatacatgccaataaaattaaaaattggcctacgtcatccagatgctgtagtggaaaccagctctttatccagtgttactcctcctgatgtttggtacaaaacatccatttctgaggaaaccattgataatggctggttatcagcattgcagcttgaggcaattacatatgcagcccagcaacatgaaactttcctacctaatggagatcgtgctggcttcttaataggtgatggtgccggtgtaggaaaaggaaggacgatagcaggaatcatctatgaaaattatttgttgagtagaaaacgagcattgtggtttagtgtttcaaatgacttaaagtatgatgctgaaagagatttaagggatattggagcaaaaaacattttggttcattcgttaaataagtttaaatacggaaaaatttcttccaaacataatgggagtgtgaaaaagggtgttatttttgctacttactcttcacttattggtgaaagccagtctggcggcaagtataaaactaggttaaaacaacttctgcattggtgcggtgatgacttcgatggagtgatagtgtttgatgagtgtcataaagccaaaaacttatgtcctgttggttcttcaaagccaaccaagacaggcttagcagttttagagcttcagaacaaattgccaaaagccagagttgtttatgctagtgcaactggtgcttctgaaccacgcaacatggcctatatgaaccgtcttggcatatggggtgagggtactccatttagagaattcagtgattttattcaagcagtagaacggagaggagttggtgccatggaaatagttgctatggatatgaagcttagaggaatgtacattgctcgacaactgagctttactggagtgaccttcaaaattgaggaagttcttctttctcagagctacgttaaaatgtataacaaagctgtcaagctgtgggtcattgccagagagcggtttcagcaagctgcagatctgattgatgctgagcaacgaatgaagaagtccatgtggggtcagttctggtctgctcaccagaggttcttcaaatacttatgcatagcatccaaagttaaaagggttgtgcaactagctcgagaggaaatcaagaatggaaaatgtgttgtaattggtctgcagtctacaggagaagctagaacattagaagctttggaagagggcgggggagaattgaatgattttgtttcaactgccaaaggtgtgttgcagtcactcattgaaaaacattttcctgctccagacaggaaaaaactttatagtttactaggaatcgatttgacagctccaagtaacaacagttcgccaagagatagtccttgtaaagaaaataaaataaagaagcggaaaggtgaagaaataactcgagaagccaaaaaagcacgaaaagtaggtggccttactggtagcagttctgacgacagtggaagtgaatctgatgcctctgataatgaagaaagtgactatgagagctctaaaaacatgagttctggagatgatgacgatttcaacccatttttagatgagtctaatgaggatgatgaaaatgatccctggttaattagaaaagaccacaagaaaaacaaagagaaaaaaaagaagaaaagtatagatccagattctattcaaagtgccttattagcatcaggtcttggatcaaaacgacctagtttttcatctacaccagttatctcacctgctcctaacagtacaccagctaacagtaacaccaacagtaacagtagccttataacaagtcaggatgctgtggaaagggctcagcagatgaagaaagacctgcttgataagctagaaaaattagctgaagacctcccccctaataccctggatgaacttatcgatgaacttggtggccctgagaacgttgctgagatgactggccgcaagggacgggttgtgagcaatgatgatggaagcatatcttatgagtcaagatctgaacttgatgtgcctgtggaaatactaaacatcacagaaaaacaacgatttatggatggagataagaatattgctatcatctcagaagctgccagctcgggtatttcattacaagcagataggagagctaaaaatcaaaggcgaagagttcatatgactttagaattaccttggagcgctgatagagcaattcaacagttcggacgtactcatagatcaaaccaagttactgctcctgagtatgtctttctgatatctgaactggcaggagaacaaagatttgcatctattgttgctaaaagacttgagagtttgggggcacttacacatggcgatagaagggcaacagaatctagagatctgagcaggttcaactttgataataagtatggaagaaatgctttagaaattgtcatgaaatccattgtaaacttggattctcctatggtatcaccacctccagactatcctggagaattttttaaagatgttcgacaaggactgataggcgttggcctgataaatgtagaagatcgctcgggaattcttactctcgataaagattataacaacataggaaaattcttaaatagaattttaggcatggaggtgcatcagcagaatgcgttatttcagtattttgcggacacacttactgcagttgttcaaaatgccaaaaaaaatggaagatatgatatgggaatcttagatcttggttctggagatgaaaaagtgcggaaaagtgatgttaaaaagtttctgactccaggatattcaacctctggccacgtagaattatacacaattagtgtagagaggggaatgtcatgggaggaagctaccaagatttgggctgagctgacaggaccagacgatggcttttacttgtcattgcaaataaggaacaacaagaaaactgccatcttagttaaagaagtgaatcctaaaaagaaacttttcttagtttatcgaccaaatactgggaagcagctcaaattagaaatttatgctgatctaaaaaagaaatataagaaggtcgtctcagatgatgccctgatgcactggttagatcagtataattcatctgcagatacttgtactcatgcttattggcgcggcaattgcaaaaaagcaagcttggggctagtttgtgaaataggtcttcgttgccgtacatattatgtattatgtggttcagtgctgagtgtctggacaaaagttgagggtgttctagcatctgtcagtggcacaaacgtgaagatgcagatcgtgcggctaagaacggaagatgggcaacggattgtaggtttgatcattccggcaaattgtgtgtctcctcttgtaaatctcctatcaacttcagaccagtctcaacagcttgcggtccaacagaaacagctatggcaacagcatcaccctcagagcatcaccaacttgagcaacgcatgaagaacagacaggtttcaacatggatggatctgaaatgctgttgaagcatatcatttgcataaaaatcagggacagtttccaaagaattatatatttttttcagttgtgctctctagttagtttttttgggagtaaggacaaacctggaatagatagcaaaactgaaaatcagcagtgctgatggtggtacatatgtctttcctttagcttctcccctgataattcccatctgcttttacttcgggtgagcagagggggatgtgtgtgtgcgtgtgtgtcagtctgtttgtgagtgtgttaaaggctacagaccacagttggtttaaaatgcttggaacttcccaaactggctttactttatgtttatacagtgctcagggttaacgcagtacatccatgccattgctgtgggaggtatccccggatgcatgtgttttgagtctataaatatagaaaatatatattggtttctttttccaacttaataggtttattaaagcatgaaatgaaaggttgcatatcatgcattcaggttattttctaatttttgttctgacagtgcatgtctttggaagcatgctgaaacaagattaacacaggagtcgagtaacagagagaaacatttgttagatgtacagcattggttattgcatttttatagtgtttatacctgggtattgcttcaaaccctgcagacccctccttccccttctccctgccctgggtttctggtcaaggtaatgaatacatacatttttctgtgataaaactcttaaaagttaattttaatgtattaatagtattcctaatgtgtgctgcagaaatggctatgagcctcttaaatttacatttgcaacttaaaggtagttttagaaggaagtacaaattggctttcatcttgcaaacaatcgttttttacttcattatcttaatttgctttgtcactcataaaaaggaaaccatacctgagttgtagacaatgaggaaacacttgaggcttctgctgtgtgttcttttgttattgttgttattgttgttactcagtaacttgaatattgtttaatgtgttgtaagacgtagagtttatctcaagctgttaaaaatggtaatgtacaaatgtgaatagacacttatctatataatatatacgccttgttcgcctatatcagtgatgcagctgttattatccggctgcgcgtgggcgggaggcgg

SEQ ID NO: 65095 - DNA, 3527 bp, Homo sapiens
attctattcaaagtgccttattagcatcaggtcttggatcaaaacgacctagtttttcatctacaccagttatctcacctgctcctaacagtacggaggtgaagaaataactcgagaagccaaaaaagcacgaaaagtaggtggccttactggtagcagttctgacgacagtggaagtgaatctgatgcctctgataatgaagaaagtgactatgagagctctaaaaacatgagttctggagatgatgacgatttcaacccatttttagatgagtctaatgaggatgatgaaaatgatccctggttaattagaaaagaccacaagaaaaacaaagagaaaaaaaagaagaaaagtatagatccagattctattcaaagtgccttattagcatcaggtcttggatcaaaacgacctagtttttcatctacaccagttatctcacctgctcctaacagtacaccagctaacagtaacaccaacagtaacagtagccttataacaagtcaggatgctgtggaaagggctcagcagatgaagaaagacctgcttgataagctagaaaaattagctgaagacctcccccctaataccctggatgaacttatcgatgaacttggtggccctgagaacgttgctgagatgactggccgcaagggacgggttgtgagcaatgatgatggaagcatatcttatgagtcaagatctgaacttgatgtgcctgtggaaatactaaacatcacagaaaaacaacgatttatggatggagataagaatattgctatcatctcagaagctgccagctcgggtatttcattacaagcagataggagagctaaaaatcaaaggcgaagagttcatatgactttagaattaccttggagcgctgatagagcaattcaacagttcggacgtactcatagatcaaaccaagttactgctcctgagtatgtctttctgatatctgaactggcaggagaacaaagatttgcatctattgttgctaaaagacttgagagtttgggggcacttacacatggcgatagaagggcaacagaatctagagatctgagcaggttcaactttgataataagtatggaagaaatgctttagaaattgtcatgaaatccattgtaaacttggattctcctatggtatcaccacctccagactatcctggagaattttttaaagatgttcgacaaggactgataggcgttggcctgataaatgtagaagatcgctcgggaattcttactctcgataaagattataacaacataggaaaattcttaaatagaattttaggcatggaggtgcatcagcagaatgcgttatttcagtattttgcggacacacttactgcagttgttcaaaatgccaaaaaaaatggaagatatgatatgggaatcttagatcttggttctggagatgaaaaagtgcggaaaagtgatgttaaaaagtttctgactccaggatattcaacctctggccacgtagaattatacacaattagtgtagagaggggaatgtcatgggaggaagctaccaagatttgggctgagctgacaggaccagacgatggcttttacttgtcattgcaaataaggaacaacaagaaaactgccatcttagttaaagaagtgaatcctaaaaagaaacttttcttagtttatcgaccaaatactgggaagcagctcaaattagaaatttatgctgatctaaaaaagaaatataagaaggtcgtctcagatgatgccctgatgcactggttagatcagtataattcatctgcagatacttgtactcatgcttattggcgcggcaattgcaaaaaagcaagcttggggctagtttgtgaaataggtcttcgttgccgtacatattatgtattatgtggttcagtgctgagtgtctggacaaaagttgagggtgttctagcatctgtcagtggcacaaacgtgaagatgcagatcgtgcggctaagaacggaagatgggcaacggattgtaggtttgatcattccggcaaattgtgtgtctcctcttgtaaatctcctatcaacttcagaccagtctcaacagcttgcggtccaacagaaacagctatggcaacagcatcaccctcagagcatcaccaacttgagcaacgcatgaagaacagacaggtttcaacatggatggatctgaaatgctgttgaagcatatcatttgcataaaaatcagggacagtttccaaagaattatatatttttttcagttgtgctctctagttagtttttttgggagtaaggacaaacctggaatagatagcaaaactgaaaatcagcagtgctgatggtggtacatatgtctttcctttagcttctcccctgataattcccatctgcttttacttcgggtgagcagagggggatgtgtgtgtgcgtgtgtgtcagtctgtttgtgagtgtgttaaaggctacagaccacagttggtttaaaatgcttggaacttcccaaactggctttactttatgtttatacagtgctcagggttaacgcagtacatccatgccattgctgtgggaggtatccccggatgcatgtgttttgagtctataaatatagaaaatatatattggtttctttttccaacttaataggtttattaaagcatgaaatgaaaggttgcatatcatgcattcaggttattttctaatttttgttctgacagtgcatgtctttggaagcatgctgaaacaagattaacacaggagtcgagtaacagagagaaacatttgttagatgtacagcattggttattgcatttttatagtgtttatacctgggtattgcttcaaaccctgcagacccctccttccccttctccctgccctgggtttctggtcaaggtaatgaatacatacatttttctgtgataaaactcttaaaagttaattttaatgtattaatagtattcctaatgtgtgctgcagaaatggctatgagcctcttaaatttacatttgcaacttaaaggtagttttagaaggaagtacaaattggctttcatcttgcaaacaatcgttttttacttcattatcttaatttgctttgtcactcataaaaaggaaaccatacctgagttgtagacaatgaggaaacacttgaggcttctgctgtgtgttcttttgttattgttgttattgttgttactcagtaacttgaatattgtttaatgtgttgtaagacgtagagtttatctcaagctgttaaaaatggtaatgtacaaatgtgaatagacacttatctatataatatgggtaagttttgtttcgcctataatagatgtttataaaaacaagtgaggggacagttggtctttttatcttttctttctttttctttcttttctttttttcttttttttctttttttttttttttgcttccacaggttgcactattgaaaaatcgagattgtataaacctggtaaaaagctgcaagatgccaaaatcttgtagatgtcaaataaaaagttattatac

SEQ ID NO: 65096 - DNA, 234 bp, Homo sapiens
cttttcaaatggcgttcagattcagttaatagcaagggttaggctttttgtgtagagattattttaaattggctacctctagaattacagaccagactaggtaaccagtttatttaaagcaatactgttttcaatgaaattcttctcatttttacaggtcgtctcagatgatgccctgatgcactggttagatcagtataattcatctgcagatacttgtactcatgcttattg

SEQ ID NO: 65097 - DNA, 324 bp, Homo sapiens
agagcaaaactccatctcaacaaaaaaaaaagaaaagaaaagaaatttgagttgaccttgtaaatcttttagaaacgtgtctgtgtgcatatatagacactcatatgtatttctttcccatttttcttaggcgcggcaattgcaaaaaagcaagcttggggctagtttgtgaaataggtcttcgttgccgtacatattatgtattatgtggttcagtgctgagtgtctggacaaaagttgagggtgttctagcatctgtcagtggcacaaacgtgaagatgcagatcgtgcggctaagaacggaagatgggcaacggattgtag

SEQ ID NO: 65098 - DNA, 8197 bp, Homo sapiens
  misc_feature (180)..(180): n is a, c, g, or t
aagatggcggcggggaggtaggcagagcaggacgccgctgctgccgccgccaccgccgcctccgctccagtcgcctctggtccttcaaactcacacctcccgggaggagctgtcctggcgccgggtcccgcggggaaaatggtggagccagggcaagatttactgcttgctgctttgagngagagtggaattagtccgaatgacctctttgatattgatggtggagatgcagggcttgcaactccaatgcctaccccgtcagttcagcagtcagtgccacttagtgcattagaactaggtttggagaccgaagcagcagttcctgttaaacaagaaccagagactgtacctactccagcactattaaatgtgaggcagcctccatctactacaacatttgtgctgaatcaaataaatcatcttccacccttgggatctacaattgtaatgactaaaacaccacctgtaacaaccaacaggcaaaccatcactttaactaagtttatccagactactgcaagcacacgcccgtcagtctcagcaccaacagtacgaaatgccatgacctctgcaccttcaaaagaccaagttcagcttaaagatctactgaaaaataatagtcttaatgaactgatgaaactaaagccacctgctaatattgctcagccagtagcaacagcagctactgatgtaagcaatggtacagtaaagaaagagtcttctaataaagaaggagctagaatgtggataaacgacatgaagatgaggagtttttccccaaccatgaaggttcctgttgtaaaagaagatgatgaaccagaggaagaagatgaagaagaaatgggtcatgcagaaacctatgcagaatacatgccaataaaattaaaaattggcctacgtcatccagatgctgtagtggaaaccagctctttatccagtgttactcctcctgatgtttggtacaaaacatccatttctgaggaaaccattgataatggctggttatcagcattgcagcttgaggcaattacatatgcagcccagcaacatgaaactttcctacctaatggagatcgtgctggcttcttaataggtgatggtgccggtgtaggaaaaggaaggacgatagcaggaatcatctatgaaaattatttgttgagtagaaaacgagcattgtggtttagtgtttcaaatgacttaaagtatgatgctgaaagagatttaagggatattggagcaaaaaacattttggttcattcgttaaataagtttaaatacggaaaaatttcttccaaacataatgggagtgtgaaaaagggtgttatttttgctacttactcttcacttattggtgaaagccagtctggcggcaagtataaaactaggttaaaacaacttctgcattggtgcggtgatgacttcgatggagtgatagtgtttgatgagtgtcataaagccaaaaacttatgtcctgttggttcttcaaagccaaccaagacaggcttagcagttttagagcttcagaacaaattgccaaaagccagagttgtttatgctagtgcaactggtgcttctgaaccacgcaacatggcctatatgaaccgtcttggcatatggggtgagggtactccatttagagaattcagtgattttattcaagcagtagaacggagaggagttggtgccatggaaatagttgctatggatatgaagcttagaggaatgtacattgctcgacaactgagctttactggagtgaccttcaaaattgaggaagttcttctttctcagagctacgttaaaatgtataacaaagctgtcaagctgtgggtcattgccagagagcggtttcagcaagctgcagatctgattgatgctgagcaacgaatgaagaagtccatgtggggtcagttctggtctgctcaccagaggttcttcaaatacttatgcatagcatccaaagttaaaagggttgtgcaactagctcgagaggaaatcaagaatggaaaatgtgttgtaattggtctgcagtctacaggagaagctagaacattagaagctttggaagagggcgggggagaattgaatgattttgtttcaactgccaaaggtgtgttgcagtcactcattgaaaaacattttcctgctccagacaggaaaaaactttatagtttactaggaatcgatttgacagctccaagtaacaacagttcgccaagagatagtccttgtaaagaaaataaaataaagaagcggaaaggtgaagaaataactcgagaagccaaaaaagcacgaaaagtaggtggccttactggtagcagttctgacgacagtggaagtgaatctgatgcctctgataatgaagaaagtgactatgagagctctaaaaacatgagttctggagatgatgacgatttcaacccatttttagatgagtctaatgaggatgatgaaaatgatccctggttaattagaaaagaccacaagaaaaacaaagagaaaaaaaagaagaaaagtatagatccagattctattcaaagtgccttattagcatcaggtcttggatcaaaacgacctagtttttcatctacaccagttatctcacctgctcctaacagtacaccagctaacagtaacaccaacagtaacagtagccttataacaagtcaggatgctgtggaaagggctcagcagatgaagaaagacctgcttgataagctagaaaaattagctgaagacctcccccctaataccctggatgaacttatcgatgaacttggtggccctgagaacgttgctgagatgactggccgcaagggacgggttgtgagcaatgatgatggaagcatatcttatgagtcaagatctgaacttgatgtgcctgtggaaatactaaacatcacagaaaaacaacgatttatggatggagataagaatattgctatcatctcagaagctgccagctcgggtatttcattacaagcagataggagagctaaaaatcaaaggcgaagagttcatatgactttagaattaccttggagcgctgatagagcaattcaacagttcggacgtactcatagatcaaaccaagttactgctcctgagtatgtctttctgatatctgaactggcaggagaacaaagatttgcatctattgttgctaaaagacttgagagtttgggggcacttacacatggcgatagaagggcaacagaatctagagatctgagcaggttcaactttgataataagtatggaagaaatgctttagaaattgtcatgaaatccattgtaaacttggattctcctatggtatcaccacctccagactatcctggagaattttttaaagatgttcgacaaggactgataggcgttggcctgataaatgtagaagatcgctcgggaattcttactctcgataaagattataacaacataggaaaattcttaaatagaattttaggcatggaggtgcatcagcagaatgcgttatttcagtattttgcggacacacttactgcagttgttcaaaatgccaaaaaaaatggaagatatgatatgggaatcttagatcttggttctggagatgaaaaagtgcggaaaagtgatgttaaaaagtttctgactccaggatattcaacctctggccacgtagaattatacacaattagtgtagagaggggaatgtcatgggaggaagctaccaagatttgggctgagctgacaggaccagacgatggcttttacttgtcattgcaaataaggaacaacaagaaaactgccatcttagttaaagaagtgaatcctaaaaagaaacttttcttagtttatcgaccaaatactgggaagcagctcaaattagaaatttatgctgatctaaaaaagaaatataagaaggtcgtctcagatgatgccctgatgcactggttagatcagtataattcatctgcagatacttgtactcatgcttattggcgcggcaattgcaaaaaagcaagcttggggctagtttgtgaaataggtcttcgttgccgtacatattatgtattatgtggttcagtgctgagtgtctggacaaaagttgagggtgttctagcatctgtcagtggcacaaacgtgaagatgcagatcgtgcggctaagaacggaagatgggcaacggattgtaggtttgatcattccggcaaattgtgtgtctcctcttgtaaatctcctatcaacttcagaccagtctcaacagcttgcggtccaacagaaacagctatggcaacagcatcaccctcagagcatcaccaacttgagcaacgcatgaagaacagacaggtttcaacatggatggatctgaaatgctgttgaagcatatcatttgcataaaaatcagggacagtttccaaagaattatatatttttttcagttgtgctctctagttagtttttttgggagtaaggacaaacctggaatagatagcaaaactgaaaatcagcagtgctgatggtggtacatatgtctttcctttagcttctcccctgataattcccatctgcttttacttcgggtgagcagagggggatgtgtgtgtgcgtgtgtgtcagtctgtttgtgagtgtgttaaaggctacagaccacagttggtttaaaatgcttggaacttcccaaactggctttactttatgtttatacagtgctcagggttaacgcagtacatccatgccattgctgtgggaggtatccccggatgcatgtgttttgagtctataaatatagaaaatatatattggtttctttttccaacttaataggtttattaaagcatgaaatgaaaggttgcatatcatgcattcaggttattttctaatttttgttctgacagtgcatgtctttggaagcatgctgaaacaagattaacacaggagtcgagtaacagagagaaacatttgttagatgtacagcattggttattgcatttttatagtgtttatacctgggtattgcttcaaaccctgcagacccctccttccccttctccctgccctgggtttctggtcaaggtaatgaatacatacatttttctgtgataaaactcttaaaagttaattttaatgtattaatagtattcctaatgtgtgctgcagaaatggctatgagcctcttaaatttacatttgcaacttaaaggtagttttagaaggaagtacaaattggctttcatcttgcaaacaatcgttttttacttcattatcttaatttgctttgtcactcataaaaaggaaaccatacctgagttgtagacaatgaggaaacacttgaggcttctgctgtgtgttcttttgttattgttgttattgttgttactcagtaacttgaatattgtttaatgtgttgtaagacgtagagtttatctcaagctgttaaaaatggtaatgtacaaatgtgaatagacacttatctatataatatgggtaagttttgtttcgcctataatagatgtttataaaaacaagtgaggggacagttggtctttttatcttttctttctttttctttcttttctttttttcttttttttctttttttttttttttgcttccacaggttgcactattgaaaaatcgagattgtataaacctggtaaaaagctgcaagatgccaaaatcttgtagatgtcaaataaaaagttattatactaaacaagaagtggagtcttgtttaggccctcactggtgaccttcagaagtagtctgtgacggggactcagcagaatttgtgtgttgtctcagcattccaggtagccttatagtttggcttaaaacttatccctaaaatgtaagatggcattgagggaaagggtataatgatagtacttctgaatgttttttaagttgaattgtttgtaaacttcttgcagaattgggtgagatgtgtgttaaaactgacaaacctggctgaaagcttagggcgttcatcctcttgtgtctcctttagcctgagtttggttatgtcaagcttaccgtaagttttcttaggatttatttattcttggtgcctaaaagaataaattgaaagtactttctgttctttggcacattttgcccagcggatgcaacttctatcctcagtccagttcatatatctcaggcagtgatccattttgtatcagccagtttcccttgttagggccgctagacccggctggcagccaagagcagcactctccccaccttcagcagaacttctcagctcatgtgtgtgtttttaaaagcagtaggcagcttccatcagcaatggaagtgtcccccactccagtggtggaggtgcagtcgctggacctgaggaagtggggaagcattacaaaccctcctgcagtaagaatggcagagttgggaaggatcttctctcgcaggctgttggcccaactcctcttttctgtgtatgagggcatcttagttttttatggcgttttcaaagcagcatatgaggattcttagcatgcagctaagtgacaacccccatggcctatgatgtaatgtttgctctggactagccatcttgataaataggagtgtatgtatcttaggttctttgtagaacagctatttttttttctcattaaaaaggcctctgaaagccctctcaaaatggacctcacaaaggcaaccagtgtgaatggatgggagctggggtgctgcatgcccaggctggtcatggtgtgtgcagcacccagagagttgcacccaccccttcttcaggtggacatccgacctttacactgtggtcttgcaaaaatcagcgagttagtttggccgccctgtgaagcttcagcattcaaggtcctcttctgttaaaacccaactcgtagccgggcgtggtggctcactcctataatcccagcacttcgggaggccaaggcaggtgcatcacttgaggccaggagttcgagaccagcctggtccacatggcaaaaccccatctgtaccaaaaaatacaaaaaatttgccgctgacttctgtaaaataggtccattcattgcaggatctaaatgccacacctgaattcagaggccttgtttaattaaccccatgtccactttgcctctgcaatgcctttttctttttagcaatatggctctgagcacaaagatttggttggaaatcatgttcgtgttttcagagtttacagcgtcaattgtactgaaaaccacttccagagtctaaagcagctcagatgttatctctgggggaattagtgttcccctcatttagcaacctccataccacaaggtctctgtctgtagttactgggattatccagatacactatcaatgatacaaattcataggagtattaatgcatttctttaaacacaacttgattaagaagcaaatatgttaagcagttttctttttctgctgctaaattacagttagacacttcagtatcttctctttacatgtgtatataaattagtaagaacctgcatccaaagcaatgtagtgtgtgtatgtatctatatatatttattctaactcagcacttcagaagcctttttgagttacaacaatattttagtttgcctcatctgtagaggtaaaatttctatattaccaagctccagaggaatatgatattttacaggcacaattttctggctgtagtccctggggcattcatttgctggcctccatgggatgctgttagaacaattgttagccggcaagagaagaaaggctaccaggacagcatttataattgtagaatgggagccttcttccctctcccctccactttcattttagcatgagataaaaaaatagattggaaatgattgttgcatctcacttcatggaagtaggggcagaagttccctctggatccttttcttgacaagcagtcaagaggaaggtccccatacacatgtacctgtgtgatacttggtagtttctaagaatggtgctacataagcgttgctgttaggctgggatcctattaatgaacgtttgattagttcaggcctcccaatggcaaaggcagacaccgtggagatggacatttactgactccccttctgtgtggcttcggtctccctggctaacaccacacctgtgcgtactgcgctcggcccactttgctgcagaaacgtagcaagcgtttcatgtcagggctacagctgagagcaaaaactgcaaaaaaaaaaa

SEQ ID NO: 65099 - DNA, 3646 bp, Homo sapiens
tactactactactaaattcgcggccgcgtcgacattttttatgggagtccaaaaggttagtgctggtttgtgaattctgtttgttttttgacttaacctaaatacttttcctctgcacttttcatttgaattaattcatgaactaaatgtgatgtactggatcttaagaaacattgaatttgggctgactctcttgtttgtggcggagggtaggtgagtgaagaaataactcgagaagccaaaaaagcacgaaaagtaggtggccttactggtagcagttctgacgacagtggaagtgaatctgatgcctctgataatgaagaaagtgactatgagagctctaaaaacatgagttctggagatgatgacgatttcaacccatttttagatgagtctaatgaggatgatgaaaatgatccctggttaattagaaaagaccacaagaaaaacaaagagaaaaaaaagaagaaaagtatagatccagattctattcaaagtgccttattagcatcaggtcttggatcaaaacgacctagtttttcatctacaccagttatctcacctgctcctaacagtacaccagctaacagtaacaccaacagtaacagtagccttataacaagtcaggatgctgtggaaagggctcagcagatgaagaaagacctgcttgataagctagaaaaattagctgaagacctcccccctaataccctggatgaacttatcgatgaacttggtggccctgagaacgttgctgagatgactggccgcaagggacgggttgtgagcaatgatgatggaagcatatcttatgagtcaagatctgaacttgatgtgcctgtggaaatactaaacatcacagaaaaacaacgatttatggatggagataagaatattgctatcatctcagaagctgccagctcgggtatttcattacaagcagataggagagctaaaaatcaaaggcgaagagttcatatgactttagaattaccttggagcgctgatagagcaattcaacagttcggacgtactcatagatcaaaccaagttactgctcctgagtatgtctttctgatatctgaactggcaggagaacaaagatttgcatctattgttgctaaaagacttgagagtttgggggcacttacacatggcgatagaagggcaacagaatctagagatctgagcaggttcaactttgataataagtatggaagaaatgctttagaaattgtcatgaaatccattgtaaacttggattctcctatggtatcaccacctccagactatcctggagaattttttaaagatgttcgacaaggactgataggcgttggcctgataaatgtagaagatcgctcgggaattcttactctcgataaagattataacaacataggaaaattcttaaatagaattttaggcatggaggtgcatcagcagaatgcgttatttcagtattttgcggacacacttactgcagttgttcaaaatgccaaaaaaaatggaagatatgatatgggaatcttagatcttggttctggagatgaaaaagtgcggaaaagtgatgttaaaaagtttctgactccaggatattcaacctctggccacgtagaattatacacaattagtgtagagaggggaatgtcatgggaggaagctaccaagatttgggctgagctgacaggaccagacgatggcttttacttgtcattgcaaataaggaacaacaagaaaactgccatcttagttaaagaagtgaatcctaaaaagaaacttttcttagtttatcgaccaaatactgggaagcagctcaaattagaaatttatgctgatctaaaaaagaaatataagaaggtcgtctcagatgatgccctgatgcactggttagatcagtataattcatctgcagatacttgtactcatgcttattggcgcggcaattgcaaaaaagcaagcttggggctagtttgtgaaataggtcttcgttgccgtacatattatgtattatgtggttcagtgctgagtgtctggacaaaagttgagggtgttctagcatctgtcagtggcacaaacgtgaagatgcagatcgtgcggctaagaacggaagatgggcaacggattgtaggtttgatcattccggcaaattgtgtgtctcctcttgtaaatctcctatcaacttcagaccagtctcaacagcttgcggtccaacagaaacagctatggcaacagcatcaccctcagagcatcaccaacttgagcaacgcatgaagaacagacaggtttcaacatggatggatctgaaatgctgttgaagcatatcatttgcataaaaatcagggacagtttccaaagaattatatatttttttcagttgtgctctctagttagtttttttgggagtaaggacaaacctggaatagatagcaaaactgaaaatcagcagtgctgatggtggtacatatgtctttcctttagcttctcccctgataattcccatctgcttttacttcgggtgagcagagggggatgtgtgtgtgcgtgtgtgtcagtctgtttgtgagtgtgttaaaggctacagaccacagttggtttaaaatgcttggaacttcccaaactggctttactttatgtttatacagtgctcagggttaacgcagtacatccatgccattgctgtgggaggtatccccggatgcatgtgttttgagtctataaatatagaaaatatatattggtttctttttccaacttaataggtttattaaagcatgaaatgaaaggttgcatatcatgcattcaggttattttctaatttttgttctgacagtgcatgtctttggaagcatgctgaaacaagattaacacaggagtcgagtaacagagagaaacatttgttagatgtacagcattggttattgcatttttatagtgtttatacctgggtattgcttcaaaccctgcagacccctccttccccttctccctgccctgggtttctggtcaaggtaatgaatacatacatttttctgtgataaaactcttaaaagttaattttaatgtattaatagtattcctaatgtgtgctgcagaaatggctatgagcctcttaaatttacatttgcaacttaaaggtagttttagaaggaagtacaaattggctttcatcttgcaaacaatcgttttttacttcattatcttaatttgctttgtcactcataaaaaggaaaccatacctgagttgtagacaatgaggaaacacttgaggcttctgctgtgtgttcttttgttattgttgttattgttgttactcagtaacttgaatattgtttaatgtgttgtaagacgtagagtttatctcaagctgttaaaaatggtaatgtacaaatgtgaatagacacttatctatataatatgggtaagttttgtttcgcctataatagatgtttataaaaacaagtgaggggacagttggtctttttatcttttctttctttttctttcttttctttttttcttttttttctttttttttttttttgcttccacaggttgcactattgaaaaatcgagattgtataaacctggtaaaaagctgcaagatgccaaaatcttgtagatgtcaaataaaaagttattatac

SEQ ID NO: 65100 - DNA, 2345 bp, Homo sapiens
tgcagcccaaagcctggagagaggctgctgcgccattgacctgtggactccagagactcccgctgtgcattcctctgatctggaaggtttcctgaattacgtgacgagaaacctgggttcgagtcctaacttgtcaccaacttcctgagtgacctgggctggtcccgtcccctcttggaatctctgtcttccatctcttcagcgaaggggttgatttataagggtgttttctgctctgacactgtgatttgaattctgtgtttccacatgatattcgagaagtctggccggaaggatggaatctgaaatgacaatggttctggactgggctttgtgctcagcccagctcatctttgcctgagacctaggagtggccccaggctctcctgatgtgccaccacgcttggcatctgctcctctccctgcccccatattcccatgctctgaaggggagttctctttcatagcaaatccgagaggagccgaggagccaggtcctttgttccagacccagaagcagccatggggacctgtgacattgtgactgaagccaatatctcatctggccctgagagcaacaccacgggcatcacagccttctccatgcccagctggcagctggcactgtgggcaccagcctacctggccctggtgctggtggccgtgacgggtaatgccatcgtcatctggatcatcctggcccatcggaggatgcgcacagtcaccaactacttcatcgtcaatctggcgctggctgacctctgcatggctgccttcaatgccgccttcaactttgtctatgccagccacaacatctggtactttggccgtgccttctgctacttccagaacctcttccccatcacagccatgtttgtcagcatctactccatgaccgccattgctgccgacaggtacatggccatcgtccaccccttccagcctcggctttcagctcccagcaccaaggcggttattgctggcatctggctggtggctctcgccctggcctcccctcagtgcttctactccaccgtcaccatggaccagggtgccaccaagtgcgtggtggcctggcccgaagacagcgggggcaagacgctcctcctgtaccacctcgtggtgatcgccctcatctacttcctgccgctcgcggtgatgtttgtagcctacagcgtcatcggcctcacgctctggaggcgcgcagtgcccggacatcaggcgcacggtgccaacctgcgccacctgcaggccaagaagaagtttgtgaagaccatggtgctggtggtgctgacgtttgccatctgctggctgccctaccacctctacttcatcctgggcagcttccaggaggacatctactgccacaagttcatccagcaagtctacctggcactcttctggttggccatgagctctaccatgtacaatcccatcatctactgctgtctcaaccacaggtttcgctctggattccggcttgccttccgctgctgcccatgggtcacacccaccaaggaagataagctcgagctgactcccacgacctccctctccacgagagtcaacaggtgtcacactaaggagactttgttcatggctggggacacagccccctccgaggctaccagtggggaggcggggcgtccccaggatggatcagggctatggtttgggtatggtttgcttgcccccaccaaaactcatgttgaaatttgatcccaatgtggcagtgttgggaggtaggggttagtgggaggtgtttgggtattggggatggatcccttatgaatagattaatgccttccagttgaagtgaatcatcactcttgtgggaatggactagttcccaaaataacaagttgttagaaagagtgtggtgtcctcagtttccctgtcttgcttcctctctcaccatgtgatctctttgcacacaacacttcccttccactttccaccatgacaagaagcagcctgaggccttcaccagatgcagctgcccaatcttggatattccagccaccagaatcatgagccaaataaacctcttttctttataaattacctagtctcaggtattccatgaaagcaacacaaatggactgagataggtgcctattgaaccctgaagccttgtgcctggctgcagaatgaggtgtagcaccctttgagaagtagccaatcgagaagaccacatctgaaagttcagctcatgccccatccttcagtataccaatacaaagacaacatggggccagaactccagaaaggatgctgactttaagaggactcagccacccatctcagagagcacttcagaggatccagtaagggtcagaaaagac

SEQ ID NO: 65101 - DNA, 466 bp, Homo sapiens
aaaaaacaaaaaagaagaagaagccagtgcagtggcacacacctgtagccccagttactcaggatgttaaggcaggagggtcgttgaacccaggagttcagggccatagtatgtaatgatcttgcctgtgacttgccactgcactccagcctgggtggcagaaggagaccttgtctgaagaaaaaaaaaaaagagagagagagagagagaagtgttcagcaccatgctgcttcctctgattcctacagggagatgctgaatttgaccttgccccacctccttgaggcgcagaatcctcagacccgctgagtggaggtggacaaacagatctttgtcaccattatcttagactttgggacacaaaaatctttcagttccagagcctaaaatgctactaaaaatggaacaaatgataacctagactgtgggcacctcagaaaaagaacaagacttagttaaatttctc

SEQ ID NO: 65102 - DNA, 422 bp, Homo sapiens
cccagtaaaatttacaaactcagctcaagggcagctgtgttgctttcctttccttgactgctgagaaactttttgacagggaacaatggaaacacaccttctgagctgaaacaaacaaacagaaacaaaacatactaaccagcaaaatccccaaatcatcaatcttgggttctcttgaagggcaggagtgtgttttatcttctcccgtcggagcaaacactatagatgtcctccctaaaattctgtcttccctagagcagccttgtaaattagctagggtcctagggttgaggcctaaatcaacttaaaattgtctctaaatatgtacctggatgtgtttgtacttgcagagcatgccctcttcatgtgcctagggctagtaactccctgtggcagaggcatgtaaagtattctgacttttt

SEQ ID NO: 65103 - DNA, 2071 bp, Homo sapiens
  misc_feature (65)..(65): n is a, c, g, or t
gaaaggaaggaagcaagcaagcaaggaaggaactgcaggaggaaaagaacaggcagaacagcganaagaataaagggaaagggggggaaacaccaaatctatgattggacctgggcttctttttcgccaatgcaaaaaggaatatgcagcacatttttgccttcttctgcaccggtttcctaggcgcggtagtaggtgccaatttccccaacaatatccagatcgggggattatttccaaaccagcagtcacaggaacatgctgcttttagatttgctttgtcgcaactcacagagcccccgaagctgctcccccagattgatattgtgaacatcagcgacagctttgagatgacctatagattctgttcccagttctccaaaggagtctatgccatctttgggttttatgaacgtaggactgtcaacatgctgacctccttttgtggggccctccacgtctgcttcattacgccgagctttcccgttgatacatccaatcagtttgtccttcagctgcgccctgaactgcaggatgccctcatcagcatcattgaccattacaagtggcagaaatttgtctacatttatgatgccgaccggggcttatccgtcctgcagaaagtcctggatacagctgctgagaagaactggcaggtgacagcagtcaacatcttgacaaccacagaggagggataccggatgctctttcaggacctggagaagaaaaaggagcggctggtggtggtggactgtgaatcagaacgcctcaatgctatcttgggccagattataaagctagagaagaatggcatcggctaccactacattcttgcaaatctgggcttcatggacattgacttaaacaaattcaaggagagtggcgccaatgtgacaggtttccagctggtgaactacacagacactattccggccaagatcatgcagcagtggaagaatagtgatgctcgagaccacacacgggtggactggaagagacccaagtacacctctgcgctcacctacgatggggtgaaggtgatggctgaggctttccagagcctgcggaggcagagaattgatatatctcgccgggggaatgctggggattgtctggctaacccagctgttccctggggccaagggatcgacatccagagagctctgcagcaggtgcgatttgaaggtttaacaggaaacgtgcagtttaatgagaaaggacgccggaccaactacacgctccacgtgattgaaatgaaacatgacggcatccgaaagattggttactggaatgaagatgataagtttgtccctgcagccaccgatgcccaagctgggggcgataattcaagtgttcagaacagaacatacatcgtcacaacaatcctagaagatccttatgtgatgctcaagaagaacgccaatcagtttgagggcaatgaccgttacgagggctactgtgtagagctggcggcagagattgccaagcacgtgggctactcctaccgtctggagattgtcagtgatggaaaatacggagcccgagaccctgacacgaaggcctggaatggcatggtgggagagctggtctatggaagagcagatgtggctgtggctcccttaactatcactttggtccgggaagaagttatagatttctccaaaccatttatgagtttggggatctccatcatgattaaaaaaccacagaaatccaagccgggtgtcttctccttccttgatcctttggcttatgagatttggatgtgcattgtttttgcctacattggagtgagtgttgtcctcttcctggtcagccgcttcagtccctatgaatggcacagtgaagagtttgaggaaggacgggaccagacaaccagtgaccagtccaatgagtttgggatattcaacagtttgtggttctccctgggagccttcatgcagcaaggatgtgacatttctcccaggtcagtcagctcttctcaatccctttgcctaatgctatggttttgtttgtttgtttgtttgtttgttttttaaatactgaaaagtaaagagatgaattatttcag

SEQ ID NO: 65104 - DNA, 706 bp, Homo sapiens
  misc_feature (65)..(65): n is a, c, g, or t
gaaaggaaggaagcaagcaagcaaggaaggaactgcaggaggaaaagaacaggcagaacagcganaagaataaagggaaagggggggaaacaccaaatctatgattggacctgggcttctttttcgccaatgcaaaaaggaatatgcagcacatttttgccttcttctgcaccggtttcctaggcgcggtagtaggtgccaatttccccaacaatatccagatcgggggattatttccaaaccagcagtcacaggaacatgctgcttttagatttgctttgtcgcaactcacagagcccccgaagctgctcccccagattgatattgtgaacatcagcgacagctttgagatgacctatagatcctagtgcagtgattctcagctgggagtgattttgcccctttcccttcctgggggacatgtggcaatgtctggagacacttttaagtgtcacaactcaggactggagaactactattgacatttaggtaaaagcaatggatgtgctaaccatcctgtaatgcacagaacaaacccctacaacaaataattatctgggctaaaatgtcaataatgctgaggttaagaaacctcattctattttttgtactcattaactatccccctcaaaacatctcatgtaccccataaatatatatacctactatgtaccacaaaattaaaaataaaaaagagtataaaatt

SEQ ID NO: 65105 - DNA, 3243 bp, Homo sapiens
  misc_feature (65)..(65): n is a, c, g, or t
gaaaggaaggaagcaagcaagcaaggaaggaactgcaggaggaaaagaacaggcagaacagcganaagaataaagggaaagggggggaaacaccaaatctatgattggacctgggcttctttttcgccaatgcaaaaaggaatatgcagcacatttttgccttcttctgcaccggtttcctaggcgcggtagtaggtgccaatttccccaacaatatccagatcgggggattatttccaaaccagcagtcacaggaacatgctgcttttagatttgctttgtcgcaactcacagagcccccgaagctgctcccccagattgatattgtgaacatcagcgacagctttgagatgacctatagattctgttcccagttctccaaaggagtctatgccatctttgggttttatgaacgtaggactgtcaacatgctgacctccttttgtggggccctccacgtctgcttcattacgccgagctttcccgttgatacatccaatcagtttgtccttcagctgcgccctgaactgcaggatgccctcatcagcatcattgaccattacaagtggcagaaatttgtctacatttatgatgccgaccggggcttatccgtcctgcagaaagtcctggatacagctgctgagaagaactggcaggtgacagcagtcaacatcttgacaaccacagaggagggataccggatgctctttcaggacctggagaagaaaaaggagcggctggtggtggtggactgtgaatcagaacgcctcaatgctatcttgggccagattataaagctagagaagaatggcatcggctaccactacattcttgcaaatctgggcttcatggacattgacttaaacaaattcaaggagagtggcgccaatgtgacaggtttccagctggtgaactacacagacactattccggccaagatcatgcagcagtggaagaatagtgatgctcgagaccacacacgggtggactggaagagacccaagtacacctctgcgctcacctacgatggggtgaaggtgatggctgaggctttccagagcctgcggaggcagagaattgatatatctcgccgggggaatgctggggattgtctggctaacccagctgttccctggggccaagggatcgacatccagagagctctgcagcaggtgcgatttgaaggtttaacaggaaacgtgcagtttaatgagaaaggacgccggaccaactacacgctccacgtgattgaaatgaaacatgacggcatccgaaagattggttactggaatgaagatgataagtttgtccctgcagccaccgatgcccaagctgggggcgataattcaagtgttcagaacagaacatacatcgtcacaacaatcctagaagatccttatgtgatgctcaagaagaacgccaatcagtttgagggcaatgaccgttacgagggctactgtgtagagctggcggcagagattgccaagcacgtgggctactcctaccgtctggagattgtcagtgatggaaaatacggagcccgagaccctgacacgaaggcctggaatggcatggtgggagagctggtctatggaagagcagatgtggctgtggctcccttaactatcactttggtccgggaagaagttatagatttctccaaaccatttatgagtttggggatctccatcatgattaaaaaaccacagaaatccaagccgggtgtcttctccttccttgatcctttggcttatgagatttggatgtgcattgtttttgcctacattggagtgagtgttgtcctcttcctggtcagccgcttcagtccctatgaatggcacagtgaagagtttgaggaaggacgggaccagacaaccagtgaccagtccaatgagtttgggatattcaacagtttgtggttctccctgggagccttcatgcagcaaggatgtgacatttctcccaggtccctgtctggtcgcatcgttggtggcgtctggtggttcttcaccttaatcatcatctcctcatatacagccaatctggccgccttcctgaccgtggagaggatggtgtctcccattgagagtgcagaggacctagcgaagcagacagaaattgcctacgggacgctggaagcaggatctactaaggagttcttcaggaggtctaaaattgctgtgtttgagaagatgtggacatacatgaagtcagcagagccatcagtttttgtgcggaccacagaggaggggatgattcgagtgaggaaatccaaaggcaaatatgcctacctcctggagtccaccatgaatgagtacattgagcagcggaaaccctgtgacaccatgaaggtgggaggtaacttggattccaaaggctatggcattgcaacacccaaggggtctgccctgagaaatccagtaaacctggcagtgttaaaactaaacgagcaggggcttttggacaaattgaaaaacaaatggtggtacgacaagggcgagtgcggcagcgggggaggtgattccaaggacaagacaagcgctctgagcctcagcaatgtggcaggcgtgttctacatcctgatcggaggacttggactagccatgctggttgccttaatcgagttctgctacaaatcccgtagtgaatccaagcggatgaagggtttttgtttgatcccacagcaatccatcaacgaagccatacggacatcgaccctcccccgcaacagcggggcaggagccagcagcggcggcagtggagagaatggtcgggtggtcagccatgacttccccaagtccatgcaatcgattccttgcatgagccacagttcagggatgcccttgggagccacgggattgtaactggagcagatggagaccccttggggagcaggctcgggctccccagccccatcccaaacccttcagtgccaaaaacaacaacaaaatgaaacgcaaccaccaccaaccactgcgaccacaagaaggatgattcaacaggttttcctgaagaattgaaaaaccattttgctgtcccttttccttttttgatgttctttcacccttttctgtttgctaagtgaggatgaaaaaataacactgtactgcaataaggggagagtaaccctgtctaatgaaacctgtgtctctgagagtagagtcactggaacactaatgaggaaactgcactgttttattttaattcagttgttagtgtgtcttagtgtgtgcaatttttccc

SEQ ID NO: 65106 - DNA, 3352 bp, Homo sapiens
  misc_feature (7)..(7): n is a, c, g, or t
  misc_feature (9)..(9): n is a, c, g, or t
  misc_feature (11)..(11): n is a, c, g, or t
ccaattngncnttggccgggccattaaattcagctgaaaggaaacctggtgtgaagcatgcaccatatataaggtgatgatcctcctgcaagctgtgtgtttagtcaagttatgaacatggcagccttcctagcccttgtggtagctgttctgcgcttcatacaactgaaaccgaaggttttaaacccgtggctgaatattagtggattggtggctctgtgtctggcttccttcggaatgaccttacttggtaattttcagctcacaaatgatgaagaaatccataacgtcggaacttccttgacctttggatttggcacattgacctgctggatccaggctgcgctgacactcaaggtcaacatcaagaatgaaggacggagagttggaattccacgggttattctgtcggcatctatcactctctgtgtggtcctctacttcatcctcatggcccaaagcatccacatgtatgcagccagggtccagtggggcctggtcatgtgcttcctgtcttattttggcacctttgccgtggagttccggcattaccgctatgagattgtttgctctgagtaccaggagaatttcctaagcttctcagaaagcctgtcagaagcttctgaatatcagactgaccaggtgtaaaccatcagtttttccttgctggtgaggtgggtgtgacagtgggggaggggccagtaggacacactcacaggacttgacatagaacctcatttcacacacacacacacacacacattcatggccacatttgccaaatgagcttttcagggcgagttatttctttaatgaaaaagcacaagcccttatgtgtcgaaatacacgctgttacactgaaaatatatgcacgacagagcaagaagcttgtgcatgatcacttcttatccgtccccttcccagcactccctcctcttcccattctctccacatgtctcaagcaccctaccgagtagggcaggccaaatgttccttgggagtaatgccaactcccgacgttgccttcaggtccaaagggcttggaaccagctcgtgaggaagttctgaatctggcactaatattcttgagtggataatagtgtatcatagaataggacggaaattgtattgagatgtgaccctgtgtcgcctgtggaaaggcatagtgagaagaactttcccacgaaagcccccttcatcgttgttcagtggtcggctgtgtggatcccaggagagacatatgccacagactgtgagagcaaagcccgccgctgtgatctggacttgatgcactgtgactgagaatgatttccaaatgtgaatatgtgtagggacgtggtctatcaggcctggaacaagatgggggcagtgaaggtatggtttagtgtttgctttcatagtatgccatgtacaatgttttatatttcatagtttcttttaagtaactaccatgagtctctctaagcctcatggacaaagatgtagaccaaatgcaagagctgagcttgctttgggttcaaccatgatcaaagaaaaactgaggtcacctgcaggcttacgtgggaagctaagaaaatatcacagaaaaatggaaagaaatatggatgtgcagaggtaataaaaagagctgctgctggacatttatcaaagataggcaccttacagtatcttgttgcaagtccaaatcaggggagactttgttaatatgtatcttttgctcaaatttagtagggttttttttttttttggattaagggcttttcaaatttggaatttgtagaagccaattaaaagaatacccttcctaaaaaccaaattgacacagctggcccccctgctagccaacccgcagttcccagttcccacctgctgagagttcagaactcagaccgtaggtgtgggcttatgagactgtgcttcatgaagaaaagcagaattccaaattcaaactgttggagtgagccaagtggacagaccctccatgagtgcactttcttccaagaaatccccagatttaccccatagaggtctgggattacctggaatataatatgaaaaacattttttaggctgggtgtggggctcacacctgtaatcccagcactttgggaggctgaggcgggcggatcacctgaggttgggagctcgagaccagcctgaccaatgtgaagaaaccccgtctctactaaaaaaaatacaaaattagcctggtgtggtggcgcatgcctgtaatcccggctactcaggaggcggaggcaggagaatcacttgaacccgggaggcaggttgcggtgagacgagatcacgccattgcactccagcctgggcaaaaagagctaaaaactcccctcaaaaaaaaaaagaaaaaaagaaaaacgttttttaattcaacccaaagtctgaatttcttgaggaaaaggtcaatgtcttttcatctctgtattgttccccacctcttaacacagtgcctggcacatactaggtgctcaataaatgtctgttgaatagaattattaataatttaagagtaggaaaaaggagtgtcagagagagactcaaagatgagtgagagagcatggaagatggctgtttcatgtgagacaggaatggaagaagttatgaatagggatcagatgggggagtgagaatccctgtaagtaaaatgtgaggaaaagaacaagctgagaacaagattctcctgtcaaaaaggcgtcttactgtaaatagtccaaggtgacatttgttagttttgaatactgcttttgggtttctttttttcatttttatattttaaaatttttatcaaagaacaaagacttatgtagttttcttttattctacacaatccaaattaaacagcttttggtgatgcaattgtacactttcttaagaatatatctaataccacattttagcagaaccaagcaatgactgacattattcattgggatctggccactaaataaaattcttttatgcataattgttatttctttgtctcttacaccaccatttcttctctaatattaaaacatctgaaaacccagtcagatattatgctaaaaatgaacttaagtgttatattggtagggtgttttccaacaccatcaaccaattctctgattcttccggacaccaattgagtatctacaattcaattgtgacactaactacccggagttagtgtcaggttccacaagaaaaaaaggcgagccaccaccccccccacaccccaccccacccacacaccaaaaaaaaggagacctcacttctgtccatattggctacaaagtcgaaggggctcccacacactgcccgcttaaggttcaaataatttgctagaacagctcac

SEQ ID NO: 65107 - DNA, 2835 bp, Homo sapiens
  misc_feature (7)..(7): n is a, c, g, or t
  misc_feature (9)..(9): n is a, c, g, or t
  misc_feature (11)..(11): n is a, c, g, or t
ccaattngncnttggccgggccattaaattcagctgaaaggaaacctggtgtgaagcatgcaccatatataaggtgatgatcctcctgcaagctgtgtgtttagtcaagttatgaacatggcagccttcctagcccttgtggtagctgttctgcgcttcatacaactgaaaccgaaggttttaaacccgtggctgaatattagtggattggtggctctgtgtctggcttccttcggaatgaccttacttggtaattttcagctcacaaatgatgaagaaatccataacgtcggaacttccttgacctttggatttggcacattgacctgctggatccaggctgcgctgacactcaaggtcaacatcaagaatgaaggacggagagttggaattccacgggttattctgtcggcatctatcactctctgtgtggtcctctacttcatcctcatggcccaaagcatccacatgtatgcagccagggtccagtggggcctggtcatgtgcttcctgtcttattttggcacctttgccgtggagttccggcattaccgctatgagattgtttgctctgagtaccaggagaatttcctaagcttctcagaaagcctgtcagaagcttctgaatatcagactgaccaggtgtaaaccatcagtttttccttgctggtgaggtgggtgtgacagtgggggaggggccagtaggacacactcacaggacttgacatagaacctcatttcacacacacacacacacacacattcatggccacatttgccaaatgagcttttcagggcgagttatttctttaatgaaaaagcacaagcccttatgtgtcgaaatacacgctgttacactgaaaatatatgcacgacagagcaagaagcttgtgcatgatcacttcttatccgtccccttcccagcactccctcctcttcccattctctccacatgtctcaagcaccctaccgagtagggcaggccaaatgttccttgggagtaatgccaactcccgacgttgccttcaggtccaaagggcttggaaccagctcgtgaggaagttctgaatctggcactaatattcttgagtggataatagtgtatcatagaataggacggaaattgtattgagatgtgaccctgtgtcgcctgtggaaaggcatagtgagaagaactttcccacgaaagcccccttcatcgttgttcagtggtcggctgtgtggatcccaggagagacatatgccacagactgtgagagcaaagcccgccgctgtgatctggacttgatgcactgtgactgagaatgatttccaaatgtgaatatgtgtagggacgtggtctatcaggcctgctgagagttcagaactcagaccgtaggtgtgggcttatgagactgtgcttcatgaagaaaagcagaattccaaattcaaactgttggagtgagccaagtggacagaccctccatgagtgcactttcttccaagaaatccccagatttaccccatagaggtctgggattacctggaatataatatgaaaaacattttttaggctgggtgtggggctcacacctgtaatcccagcactttgggaggctgaggcgggcggatcacctgaggttgggagctcgagaccagcctgaccaatgtgaagaaaccccgtctctactaaaaaaaatacaaaattagcctggtgtggtggcgcatgcctgtaatcccggctactcaggaggcggaggcaggagaatcacttgaacccgggaggcaggttgcggtgagacgagatcacgccattgcactccagcctgggcaaaaagagctaaaaactcccctcaaaaaaaaaaagaaaaaaagaaaaacgttttttaattcaacccaaagtctgaatttcttgaggaaaaggtcaatgtcttttcatctctgtattgttccccacctcttaacacagtgcctggcacatactaggtgctcaataaatgtctgttgaatagaattattaataatttaagagtaggaaaaaggagtgtcagagagagactcaaagatgagtgagagagcatggaagatggctgtttcatgtgagacaggaatggaagaagttatgaatagggatcagatgggggagtgagaatccctgtaagtaaaatgtgaggaaaagaacaagctgagaacaagattctcctgtcaaaaaggcgtcttactgtaaatagtccaaggtgacatttgttagttttgaatactgcttttgggtttctttttttcatttttatattttaaaatttttatcaaagaacaaagacttatgtagttttcttttattctacacaatccaaattaaacagcttttggtgatgcaattgtacactttcttaagaatatatctaataccacattttagcagaaccaagcaatgactgacattattcattgggatctggccactaaataaaattcttttatgcataattgttatttctttgtctcttacaccaccatttcttctctaatattaaaacatctgaaaacccagtcagatattatgctaaaaatgaacttaagtgttatattggtagggtgttttccaacaccatcaaccaattctctgattcttccggacaccaattgagtatctacaattcaattgtgacactaactacccggagttagtgtcaggttccacaagaaaaaaaggcgagccaccaccccccccacaccccaccccacccacacaccaaaaaaaaggagacctcacttctgtccatattggctacaaagtcgaaggggctcccacacactgcccgcttaaggttcaaataatttgctagaacagctcac

SEQ ID NO: 65108 - DNA, 1647 bp, Homo sapiens
  misc_feature (7)..(7): n is a, c, g, or t
  misc_feature (9)..(9): n is a, c, g, or t
  misc_feature (11)..(11): n is a, c, g, or t
ccaattngncnttggccgggccattaaattcagctgaaaggaaacctggtgtgaagcatgcaccatatataaggtgatgatcctcctgcaagctgtgtgtttagtcaagttatgaacatggcagccttcctagcccttgtggtagctgttctgcgcttcatacaactgaaaccgaaggttttaaacccgtggctgaatattagtggattggtggctctgtgtctggcttccttcggaatgaccttacttggtaattttcagctcacaaatgatgaagaaatccataacgtcggaacttccttgacctttggatttggcacattgacctgctggatccaggctgcgctgacactcaaggtcaacatcaagaatgaaggacggagagttggaattccacgggttattctgtcggcatctatcactctctgtgtggtcctctacttcatcctcatggcccaaagcatccacatgtatgcagccagggtccagtggggcctggtcatgtgcttcctgtcttattttggcacctttgccgtggagttccggcattaccgctatgagattgtttgctctgagtaccaggagaatttcctaagcttctcagaaagcctgtcagaagcttctgaatatcagactgaccaggtgtaaaccatcagtttttccttgctggtgaggtgggtgtgacagtgggggaggggccagtaggacacactcacaggacttgacatagaacctcatttcacacacacacacacacacacattcatggccacatttgccaaatgagcttttcagggcgagttatttctttaatgaaaaagcacaagcccttatgtgtcgaaatacacgctgttacactgaaaatatatgcacgacagagcaagaagcttgtgcatgatcacttcttatccgtccccttcccagcactccctcctcttcccattctctccacatgtctcaagcaccctaccgagtagggcaggccaaatgttccttgggagtaatgccaactcccgacgttgccttcaggtccaaagggcttggaaccagctcgtgaggaagttctgaatctggcactaatattcttgagtggataatagtgtatcatagaataggacggaaattgtattgagatgtgaccctgtgtcgcctgtggaaaggcatagtgagaagaactttcccacgaaagcccccttcatcgttgttcagtggtcggctgtgtggatcccaggagagacatatgccacagactgtgagagcaaagcccgccgctgtgatctggacttgatgcactgtgactgagaatgatttccaaatgtgaatatgtgtagggacgtggtctatcaggcctggaacaagatgggggcagtgaaggtatggtttagtgtttgctttcatagtatgccatgtacaatgttttatatttcatagtttcttttaagtaactaccatgagtctctctaagcctcatggacaaagatgtagaccaaatgcaagagctgagcttgctttgggttcaaccatgatcaaagaaaaactgaggtcacctgcaggcttacgtgggaagctaagaaaatatcacagaaaaatggaaagaaatatggatgtgcagaggtaataaaaagagctgctgctggacatttatca

SEQ ID NO: 65109 - DNA, 506 bp, Homo sapiens
tctcatttagggaagctgggttacctggcacttcctggagtccagcagagagcaaggaaagggactcaccatttcagcagcaggaggcacaaaacctcccagcggctgtcagggccgtgaaagcttaagaccccgcaggtgtgagccaagtccaaccatccaggaacattcgggactggaagctaattcagagagccgggtagaccccgtgcgtggagaacgcaggacccgctgggactggttgggctgcgctggccccggctgaggctcctgcactgaccacgccctgtctctccccggcccacgccccggctggaccaccaggtcttcctgaagagcgacagcctgtgtctgatggaagggcggcgcttccgggcgcagcccaccctgccctcggcccacctcctggccatgcacatccagcagctggagacaggcggcttcaccatgaccaacggggcccacaggtggagcaagctcaggtgaggaggggctcaggcggccgc

SEQ ID NO: 65110 - DNA, 902 bp, Homo sapiens
ggatgcaggccatggacccggccgcggcggatctttacgaggaggacggcaaagacctggacttctacgacttcgagccgctgcccaccctccccgaggacgaggagaacgtgtctctggctgacatcctctccctgcgggaccgcggcctcagcgagcaggaagcctgggccgtgtgcctggagtgcagcctgtccatgcggagcgtggcccacgccgccatcttccagagcctgtgcatcacgcccgacaccctggccttcaacaccagcgggaacgtgtgtttcatggagcagctcagcgacgaccctgagggtgccttcgttccccccgagttcgacgtgaccgggaacacctttgagccgtcagcagccaccatgaatcctgcgagccgccacagtagtcctcaccttggttcgtgagcagggctcccgctctcaggagagccgccctcatcgacgctgggcagccgcagcagacagtccctgtggacagagaggtgggaggctcgactccttctcttcatccacctgttttcaaagcagtgagtgcatccagcgtcctccaacgtggaccagtgagcttggttttatgatcttatgaatttaagattcgcacgtctttgatgggattttgtctgttctgctgattccacctgaagctcagaaggcaccccggtccttgggacgcagctctgctgggctctgacccacttcctggtgtggcaggatgctccagccccttctatggggttcctgccccgaaatctgatcaaccatttgtctgcagagccctggccagtgaggccctgtctgggcccaggcggtcctgggagcccccaggtgcgtgttcacagtgtcctcctgaggcccgggctgtggtggacccaccacgctgagtgc

SEQ ID NO: 65111 - DNA, 475 bp, Homo sapiens
ggatgcaggccatggacccggccgcggcggatctttacgaggaggacggcaaagacctggacttctacgacttcgagccgctgcccaccctccccgaggacgaggagaacgtgtctctggctgacatcctctccctgcgggaccgcggcctcagcgagcaggaagcctgggccgtgtgcctggagtgcagcctgtccatgcggagcgtggcccacgccgccatcttccagagcctgtgcatcacgcccgacaccctggccttcaacaccagcgggaacgtgtgtttcatggagcagctcagcgacgaccctgagggtgccttcgttccccccgagttcgacgtgaccgggaacacctttgagagccctggccagtgaggccctgtctgggcccaggcggtcctgggagcccccaggtgcgtgttcacagtgtcctcctgaggcccgggctgtggtggacccaccacgctgagtgc

SEQ ID NO: 65112 - DNA, 394 bp, Homo sapiens
gtttcgacctctggtcgagttccgcacctcgtgagctgagttccccccccgagtacgacgtgaccgggaacacctttgagcctccaccccatgaggctcccctctccaccccgctgccctgagcaccaatgggctccagtggcccggcctggaagactccgacccctcccccatcgctggcctgtttgcttggcattcatccacgacatgcaggcttagcaagcgtctgggctcacagacagcagggtgagtggggtcctgcctcttgctggttctggtctacacaagtgacagacttgatgtgagacccacaggctggggatccaataatgctgggacatgagaatggggccccaaggctcttgtttgcatcagaggcctccagaggccactg

SEQ ID NO: 65113 - DNA, 4515 bp, Homo sapiens
  misc_feature (2245)..(2245): n is a, c, g, or t
gttccgtggctctgacgtccagggaacagcaggacgactcttgaaacaaaatgagacgtggtctaaagccctttccctgacccacgcgttgaaacgctgccacgagtcgtccgtttccccagggaatcgtctcggtgggggtgccggggcctggctgggggtcctgccgggctcacggccagggccggtcttggcaggagaacgtgtctctggctgacatcctctccctgcgggaccgcggcctcagcgagcaggaagcctgggccgtgtgcctggagtgcagcctgtccatgcggagcgtggcccacgccgccatcttccagagcctgtgcatcacgcccgacaccctggccttcaacaccagcgggaacgtgtgtttcatggagcagctcagcgacgaccctgagggtgccttcgttccccccgagttcgacgtgaccgggaacacctttgaggcgcacatctactctctgggggccacgctgaaggccgccctcgagtacgtggcagagcccacactggaacccaggctgagccaagacctcgaggcgctgctgagccggatgcaggcggaggaccccggggaccggccggaccttgagagcatcatcgcgctgtgtgaagagaagctgcagctcacatcctcctgtcgcgtgtgccggagcctctctgctgtggggaggagggtcctctccatcgagtccttcggagcgctgcaggatgtcagcgagagcagctggcgggagagacctgccccaggaaacgctgggcccaggaggccgcccggggaccccagcactgacccggaggttctgccgacccccgaaggcccggagtctgagaccagccggggccccagagcctccccaaccaaggctctgctgtccaccccggtgagaaatggcgagagccacagccgggaggggctggccggcctcgtcctggatgccgagcgcaccctcggggagctggacagagacgccctcaggagaagccgcctgcggaaggtgcagacgttccctaggctgctgtccgacagccccgaggccaccctctgcctgccgctgacccgcgggaaaagccagctgcccatatcggaattattctctccggaccccaggaaggcctttctggacaggaaaaatggcctttctagcttccaggctcagcccaaatgcaggctgtggccggagcaggagccggaacaccagctgggacgggttccctgtgcaggccgcagcacggacaggggccctggggtgcccggcagtccaggacagcccgagacttcacaccccagccaggggccagcagaggcccctgcagaccctcgagatgctagcggtgaagcccagactcccagggacgatgagagaattccagaaggagctaggcagctggaaagtgcagccgcggagcagtgggtgtccctgcaggacctcctgtcccagctgggccggcccttccgggagtacgagctgtgggccctgtgcctggcctgcctccgcgcactgcagacacgccctgagcacccagcctacctgtgtctggactccgtgctggttgctgaggacggggctgtgctcttccagccaccccctgccaacggttcctatgactcgttctttctggctcccgagctggcagaggagaggctggtaactgaaaaggcctctgtgtactgtgtggccgccgttctgtggaccgcagccaagttcagcgtcccccgcaaccacaagctggccctgccacgcaggctcaagaccctcctcctggacatggccaggcgcagtgccccggagcggccgtccgcggctgaggccatcaaggtgtgcggcagctacctcctccagcgaggcatggacagccggaaaatccttgcccacctcagagcttccatctgccaggtgtaccaggaggaagagaccatcagcctccaaaacgccttctcagtggttgaactgaagcccagtgtggcaccagccccagagcccagcccaggcttcctgccggtgaacagcgacaccgggcttgtggctgtgccagggcccgtgcccggccagcacccctgcggtgaagaagccacccagctgcctgcagcgttcacctccgaggccacgcacttcaagcccattgtcctcgcgcagaacgcaagtgtggccagggaccagcctgccttggcccaggaggagtccgaggagaggggcggccagagggagggagaaggtgaggagaagctctcccnggaggcccacgctgggtcccccagcctgaagacgcctgacgggccggtgcctggtccggggccacagggagcagccccagagcctcttggggcgtcagtgcagcgtgactcagcccagggccgcccctgccctccaccccaggccccagcaaaccagccagagggggcctcatcggcagctcccggctctccagtccccgccccgcccacgaaggcatctgcgctgcccgtagagcaagggccggctgagccgatcccacctggagttgcttccgggggcctcaggcccgacgccctggggcccaccacggcccaccacggcccacgccacccgcccaagcccccacgaagcaaggccaccgagcgcccgggccaggagccagagggccccggggccacccctgccggggaacgtgatgaccagagtccagacagtgtcccagagaggccgcggcccgcagaccggaggctctgtctgccctgcgtggacgcctcgccactcccagggaggacggcctgcccgtcgctgcaggaggccacgcgcctcatccaggaggaatttgccttcgatggctacctggacaatgggctggaggctctgatcatgggggagtacatcttcgccttgaaagatctcacctttgccactttctgtggcgccatttccgagaagttctgtgacctgtactgggatgagaagttgctgcagaacctctttaaggtggtcaacgggcaggcgtcaccctccccaagcacggccgaggaggctgggtcacagctcgagggcagccaaagcccccgctccccgtccagcaagaggccgtcgctgcaccgcctgggaaaagagaagccagccatggccaggaccagcagcagggccccctgctcacccacctcggtgtcggatgtggactcggacgcactgtcacggggaaacttcgaggtggggtttcggcctcagaggtccgtaaaagccgagagagcgcagcagcctgaggctggcgaggacagacggccagctggcggggcctcagacgtggaggcagtgacccgactggccaggtccaaaggggtcggcccagccttgtcccccggcccagccggattccagagctgcagccccggctggtgcagcgccttctacgaggccgactgcttcggggccgacgtccacaactacgtgaaggacctggggcggcagcaggcggacggggccctgcccgacgcccagagcccggagctggaacagcagctcatgatggagaaaagaaactaccgcaagaccctgaagttctaccagaaactcttacagaaggaaaagaggaacaaaggttccgacgtcaagaccatgctgtccaagctgaaagggcagctagaagaaatgaaatccagggtgcaattcctcagcttggtcaagaagtatctgcaggcaagtgggctccgggccccgctctgccccgtgaggcagtagcttcagacgggcctcccactgttggatgctgtaaatctgtccgtgtgaagttataaaaggggccctgatttgagggtccaatgccaggaagccctggggcgaggggcagagtgaccaagcgcccgtgtcccgctccggcaggtcatgtacgcggaacgctggggcctggagccctgcaccctcccagtgatcgtgaacatcgcggccgcaccctgcgacacgctggacttcagccccctggacgagtcctcctcgctcatcttctacaacgtcaacaagcacccgggcggccggcagaaggcccgcatcctgcaggccggcacgccgctggggctcatggcctacctgtactccagtgatgccttcctggagggttatgtgcagcaattcctctacaccttccgctacttctgcacaccccacgacttcctgcacttcctcctcgaccgcatcaacagcacgctgaccagggcccaccaggaccccacctcgaccttcaccaagatctacaggcggagcctctgcgtcctgcaggcctgggtggaggactgctacgctgtggacttccctcggaacagcgggctgctggggaagctagaggacttcatctcctccaagatcctacccctggacggctctgccaagcacctgctgggcctcctggaggtgggcatggaccggcgggccgagggcaaccctcgcggcacagacctggagaaccccagggaggccgaggaggatgccagacccttcaacgccctctgtaagaggctctcagaggacggcatctccaggaagg

SEQ ID NO: 65114 - DNA, 868 bp, Homo sapiens
aacaggtcttaggtggtccctgctctcagacctaccccatggctcacccaggcacgccctgctagggatggagaacgtgtctctggctgacatcctctccctgcgggaccgcggcctcagcgagcaggaagcctgggccgtgtgcctggagtgcagcctgtccatgcggagcgtggcccacgccgccatcttccagagcctgtgcatcacgcccgacaccctggccttcaacaccagcgggaacgtgtgtttcatggagcagctcagcgacgaccctgagggtgccttcgttccccccgagttcgacgtgaccgggaacacctttgagccgtcagcagccaccatgaatcctgcgagccgccacagtagtcctcaccttggttcgtgagcagggctcccgctctcaggagagccgccctcatcgacgctgggcagccgcagcagacagtccctgtggacagagaggtgggaggctcgactccttctcttcatccacctgttttcaaagcagtgagtgcatccagcgtcctccaacgtggaccagtgagcttggttttatgatcttatgaatttaagattcgcacgtctttgatgggattttgtctgttctgctgattccacctgaagctcagaaggcaccccggtccttgggacgcagctctgctgggctctgacccacttcctggtgtggcaggatgctccagccccttctatggggttcctgccccgaaatctgatcaaccatttgtctgcagagccctggccagtgaggccctgtctgggcccaggcggtcctgggagcccccaggtgcgtgttcacagtgtcctcctgaggcccgggctgtggtggacccaccacgctgagtgc

SEQ ID NO: 65115 - DNA, 1528 bp, Homo sapiens
tctcatttagggaagctgggttacctggcacttcctggagtccagcagagagcaaggaaagggactcaccatttcagcagcaggaggcacaaaacctcccagcggctgtcagggccgtgaaagcttaagaccccgcaggtgtgagccaagtccaaccatccaggaacattcgggactggaagctaattcagagagccgggtagaccccgtgcgtggagaacgcaggacccgctgggactggttgggctgcgctggccccggctgaggctcctgcactgaccacgccctgtctctccccggcccacgccccggctggaccaccaggtcttcctgaagagcgacagcctgtgtctgatggaagggcggcgcttccgggcgcagcccaccctgccctcggcccacctcctggccatgcacatccagcagctggagacaggcggcttcaccatgaccaacggggcccacaggtggagcaagctcaggaacatcgcaaaggtggtgagccaggtgcacgcgttccaggagaacccttacaccttcagccccgaccccaagctccagtcgtacctcaagcagaggattgcccgcttcagcggtgccgacatttccacactcgccgcagatagcagggccaacttccaccaggtctccagcgagaagcactcacggaagattcaggacaagctacggaggatgaaggctacattccagtagccgagctcgggcctggtgtggaattccagatccgaatccgactgtggggggcgggctgggaggtgggagccgcgtctcaggcccggccgttatcaaggcccctccgcccccgaaccctggggagctggaccaggaggtggaggctcaggggaccccatggggacaggcagagctggtctcctcccagcagacggagccaggacgggcacaagagtcttggaggtttgcgtgtttctgctagaattaaaaagttaaatttaaaaatgaaaatgaaagacagcttcccaggagttttgtgcctgtctgcgcctctcacacacagataagtggctcttacccagctctcagtgactcccccacaaaacagcaacagcctccaccgccaactcaacaaacttcagagtagctcctccctgagcaggtttctgagccagcctcggttggctgagcaacgaagggccaaagctgacctctgagtggccaactgcagctcccagggactccgagacctccggtccgagaccctgcctgggttcaccccccacaacccagacccagaaccgctctccccttccctgcccagtgcccctcttccccagcccagacccccaggtgcccaaggcctgctgctggagcaggcaccttgggctgggcctgctcccccagggcccagggccccccagcttagaacagccttggtgaggtggtcatgcccgggcaaaggccctgcttcctggaaaggacactcagagcagctccaagacagaggctctgtggcgggggtccctgagagtgcccccacccatctcatgcc

SEQ ID NO: 65116 - DNA, 676 bp, Homo sapiens
ggatgcaggccatggacccggccgcggcggatctttacgaggaggacggcaaagacctggacttctacgacttcgagccgctgcccaccctccccgaggacgaggagaacgtgtctctggctgacatcctctccctgcgggaccgcggcctcagcgagcaggaagcctgggccgtgtgcctggagtgcagcctgtccatgcggagcgtggcccacgccgccatcttccagagcctgtgcatcacgcccgacaccctggccttcaacaccagcgggaacgtgtgtttcatggagcagctcagcgacgaccctgagggtgccttcgttccccccgagttcgacgtgaccgggaacacctttgagcctccaccccatgaggctcccctctccaccccgctgccctgagcaccaatgggctccagtggcccggcctggaagactccgacccctcccccatcgctggcctgtttgcttggcattcatccacgacatgcaggcttagcaagcgtctgggctcacagacagcagggtgagtggggtcctgcctcttgctggttctggtctacacaagtgacagacttgatgtgagacccacaggctggggatccaataatgctgggacatgagaatggggccccaaggctcttgtttgcatcagaggcctccagaggccactg

SEQ ID NO: 65117 - DNA, 5223 bp, Homo sapiens
  misc_feature (2245)..(2245): n is a, c, g, or t
gttccgtggctctgacgtccagggaacagcaggacgactcttgaaacaaaatgagacgtggtctaaagccctttccctgacccacgcgttgaaacgctgccacgagtcgtccgtttccccagggaatcgtctcggtgggggtgccggggcctggctgggggtcctgccgggctcacggccagggccggtcttggcaggagaacgtgtctctggctgacatcctctccctgcgggaccgcggcctcagcgagcaggaagcctgggccgtgtgcctggagtgcagcctgtccatgcggagcgtggcccacgccgccatcttccagagcctgtgcatcacgcccgacaccctggccttcaacaccagcgggaacgtgtgtttcatggagcagctcagcgacgaccctgagggtgccttcgttccccccgagttcgacgtgaccgggaacacctttgaggcgcacatctactctctgggggccacgctgaaggccgccctcgagtacgtggcagagcccacactggaacccaggctgagccaagacctcgaggcgctgctgagccggatgcaggcggaggaccccggggaccggccggaccttgagagcatcatcgcgctgtgtgaagagaagctgcagctcacatcctcctgtcgcgtgtgccggagcctctctgctgtggggaggagggtcctctccatcgagtccttcggagcgctgcaggatgtcagcgagagcagctggcgggagagacctgccccaggaaacgctgggcccaggaggccgcccggggaccccagcactgacccggaggttctgccgacccccgaaggcccggagtctgagaccagccggggccccagagcctccccaaccaaggctctgctgtccaccccggtgagaaatggcgagagccacagccgggaggggctggccggcctcgtcctggatgccgagcgcaccctcggggagctggacagagacgccctcaggagaagccgcctgcggaaggtgcagacgttccctaggctgctgtccgacagccccgaggccaccctctgcctgccgctgacccgcgggaaaagccagctgcccatatcggaattattctctccggaccccaggaaggcctttctggacaggaaaaatggcctttctagcttccaggctcagcccaaatgcaggctgtggccggagcaggagccggaacaccagctgggacgggttccctgtgcaggccgcagcacggacaggggccctggggtgcccggcagtccaggacagcccgagacttcacaccccagccaggggccagcagaggcccctgcagaccctcgagatgctagcggtgaagcccagactcccagggacgatgagagaattccagaaggagctaggcagctggaaagtgcagccgcggagcagtgggtgtccctgcaggacctcctgtcccagctgggccggcccttccgggagtacgagctgtgggccctgtgcctggcctgcctccgcgcactgcagacacgccctgagcacccagcctacctgtgtctggactccgtgctggttgctgaggacggggctgtgctcttccagccaccccctgccaacggttcctatgactcgttctttctggctcccgagctggcagaggagaggctggtaactgaaaaggcctctgtgtactgtgtggccgccgttctgtggaccgcagccaagttcagcgtcccccgcaaccacaagctggccctgccacgcaggctcaagaccctcctcctggacatggccaggcgcagtgccccggagcggccgtccgcggctgaggccatcaaggtgtgcggcagctacctcctccagcgaggcatggacagccggaaaatccttgcccacctcagagcttccatctgccaggtgtaccaggaggaagagaccatcagcctccaaaacgccttctcagtggttgaactgaagcccagtgtggcaccagccccagagcccagcccaggcttcctgccggtgaacagcgacaccgggcttgtggctgtgccagggcccgtgcccggccagcacccctgcggtgaagaagccacccagctgcctgcagcgttcacctccgaggccacgcacttcaagcccattgtcctcgcgcagaacgcaagtgtggccagggaccagcctgccttggcccaggaggagtccgaggagaggggcggccagagggagggagaaggtgaggagaagctctcccnggaggcccacgctgggtcccccagcctgaagacgcctgacgggccggtgcctggtccggggccacagggagcagccccagagcctcttggggcgtcagtgcagcgtgactcagcccagggccgcccctgccctccaccccaggccccagcaaaccagccagagggggcctcatcggcagctcccggctctccagtccccgccccgcccacgaaggcatctgcgctgcccgtagagcaagggccggctgagccgatcccacctggagttgcttccgggggcctcaggcccgacgccctggggcccaccacggcccaccacggcccacgccacccgcccaagcccccacgaagcaaggccaccgagcgcccgggccaggagccagagggccccggggccacccctgccggggaacgtgatgaccagagtccagacagtgtcccagagaggccgcggcccgcagaccggaggctctgtctgccctgcgtggacgcctcgccactcccagggaggacggcctgcccgtcgctgcaggaggccacgcgcctcatccaggaggaatttgccttcgatggctacctggacaatgggctggaggctctgatcatgggggagtacatcttcgccttgaaagatctcacctttgccactttctgtggcgccatttccgagaagttctgtgacctgtactgggatgagaagttgctgcagaacctctttaaggtggtcaacgggcaggcgtcaccctccccaagcacggccgaggaggctgggtcacagctcgagggcagccaaagcccccgctccccgtccagcaagaggccgtcgctgcaccgcctgggaaaagagaagccagccatggccaggaccagcagcagggccccctgctcacccacctcggtgtcggatgtggactcggacgcactgtcacggggaaacttcgaggtggggtttcggcctcagaggtccgtaaaagccgagagagcgcagcagcctgaggctggcgaggacagacggccagctggcggggcctcagacgtggaggcagtgacccgactggccaggtccaaaggggtcggcccagccttgtcccccggcccagccggattccagagctgcagccccggctggtgcagcgccttctacgaggccgactgcttcggggccgacgtccacaactacgtgaaggacctggggcggcagcaggcggacggggccctgcccgacgcccagagcccggagctggaacagcagctcatgatggagaaaagaaactaccgcaagaccctgaagttctaccagaaactcttacagaaggaaaagaggaacaaaggttccgacgtcaagaccatgctgtccaagctgaaagggcagctagaagaaatgaaatccagggtgcaattcctcagcttggtcaagaagtatctgcaggcaagtgggctccgggccccgctctgccccgtgaggcagtagcttcagacgggcctcccactgttggatgctgtaaatctgtccgtgtgaagttataaaaggggccctgatttgagggtccaatgccaggaagccctggggcgaggggcagagtgaccaagcgcccgtgtcccgctccggcaggtcatgtacgcggaacgctggggcctggagccctgcaccctcccagtgatcgtgaacatcgcggccgcaccctgcgacacgctggacttcagccccctggacgagtcctcctcgctcatcttctacaacgtcaacaagcacccgggcggccggcagaaggcccgcatcctgcaggccggcacgccgctggggctcatggcctacctgtactccagtgatgccttcctggagggttatgtgcagcaattcctctacaccttccgctacttctgcacaccccacgacttcctgcacttcctcctcgaccgcatcaacagcacgctgaccagggcccaccaggaccccacctcgaccttcaccaagaacccttacaccttcagccccgaccccaagctccagtcgtacctcaagcagaggattgcccgcttcagcggtgccgacatttccacactcgccgcagatagcagggccaacttccaccaggtctccagcgagaagcactcacggaagattcaggacaagctacggaggatgaaggctacattccagtagccgagctcgggcctggtgtggaattccagatccgaatccgactgtggggggcgggctgggaggtgggagccgcgtctcaggcccggccgttatcaaggcccctccgcccccgaaccctggggagctggaccaggaggtggaggctcaggggaccccatggggacaggcagagctggtctcctcccagcagacggagccaggacgggcacaagagtcttggaggtttgcgtgtttctgctagaattaaaaagttaaatttaaaaatgaaaatgaaagacagcttcccaggagttttgtgcctgtctgcgcctctcacacacagataagtggctcttacccagctctcagtgactcccccacaaaacagcaacagcctccaccgccaactcaacaaacttcagagtagctcctccctgagcaggtttctgagccagcctcggttggctgagcaacgaagggccaaagctgacctctgagtggccaactgcagctcccagggactccgagacctccggtccgagaccctgcctgggttcaccccccacaacccagacccagaaccgctctccccttccctgcccagtgcccctcttccccagcccagacccccaggtgcccaaggcctgctgctggagcaggcaccttgggctgggcctgctcccccagggcccagggccccccagcttagaacagccttggtgaggtggtcatgcccgggcaaaggccctgcttcctggaaaggacactcagagcagctccaagacagaggctctgtggcgggggtccctgagagtgcccccacccatctcatgcc

SEQ ID NO: 65118 - DNA, 4947 bp, Homo sapiens
  misc_feature (2152)..(2152): n is a, c, g, or t
ggatgcaggccatggacccggccgcggcggatctttacgaggaggacggcaaagacctggacttctacgacttcgagccgctgcccaccctccccgaggacgaggagaacgtgtctctggctgacatcctctccctgcgggaccgcggcctcagcgagcaggaagcctgggccgtgtgcctggagtgcagcctgtccatgcggagcgtggcccacgccgccatcttccagagcctgtgcatcacgcccgacaccctggccttcaacaccagcgggaacgtgtgtttcatggagcagctcagcgacgaccctgagggtgccttcgttccccccgagttcgacgtgaccgggaacacctttgaggcgcacatctactctctgggggccacgctgaaggccgccctcgagtacgtggcagagcccacactggaacccaggctgagccaagacctcgaggcgctgctgagccggatgcaggcggaggaccccggggaccggccggaccttgagagcatcatcgcgctgtgtgaagagaagctgcagctcacatcctcctgtcgcgtgtgccggagcctctctgctgtggggaggagggtcctctccatcgagtccttcggagcgctgcaggatgtcagcgagagcagctggcgggagagacctgccccaggaaacgctgggcccaggaggccgcccggggaccccagcactgacccggaggttctgccgacccccgaaggcccggagtctgagaccagccggggccccagagcctccccaaccaaggctctgctgtccaccccggtgagaaatggcgagagccacagccgggaggggctggccggcctcgtcctggatgccgagcgcaccctcggggagctggacagagacgccctcaggagaagccgcctgcggaaggtgcagacgttccctaggctgctgtccgacagccccgaggccaccctctgcctgccgctgacccgcgggaaaagccagctgcccatatcggaattattctctccggaccccaggaaggcctttctggacaggaaaaatggcctttctagcttccaggctcagcccaaatgcaggctgtggccggagcaggagccggaacaccagctgggacgggttccctgtgcaggccgcagcacggacaggggccctggggtgcccggcagtccaggacagcccgagacttcacaccccagccaggggccagcagaggcccctgcagaccctcgagatgctagcggtgaagcccagactcccagggacgatgagagaattccagaaggagctaggcagctggaaagtgcagccgcggagcagtgggtgtccctgcaggacctcctgtcccagctgggccggcccttccgggagtacgagctgtgggccctgtgcctggcctgcctccgcgcactgcagacacgccctgagcacccagcctacctgtgtctggactccgtgctggttgctgaggacggggctgtgctcttccagccaccccctgccaacggttcctatgactcgttctttctggctcccgagctggcagaggagaggctggtaactgaaaaggcctctgtgtactgtgtggccgccgttctgtggaccgcagccaagttcagcgtcccccgcaaccacaagctggccctgccacgcaggctcaagaccctcctcctggacatggccaggcgcagtgccccggagcggccgtccgcggctgaggccatcaaggtgtgcggcagctacctcctccagcgaggcatggacagccggaaaatccttgcccacctcagagcttccatctgccaggtgtaccaggaggaagagaccatcagcctccaaaacgccttctcagtggttgaactgaagcccagtgtggcaccagccccagagcccagcccaggcttcctgccggtgaacagcgacaccgggcttgtggctgtgccagggcccgtgcccggccagcacccctgcggtgaagaagccacccagctgcctgcagcgttcacctccgaggccacgcacttcaagcccattgtcctcgcgcagaacgcaagtgtggccagggaccagcctgccttggcccaggaggagtccgaggagaggggcggccagagggagggagaaggtgaggagaagctctcccnggaggcccacgctgggtcccccagcctgaagacgcctgacgggccggtgcctggtccggggccacagggagcagccccagagcctcttggggcgtcagtgcagcgtgactcagcccagggccgcccctgccctccaccccaggccccagcaaaccagccagagggggcctcatcggcagctcccggctctccagtccccgccccgcccacgaaggcatctgcgctgcccgtagagcaagggccggctgagccgatcccacctggagttgcttccgggggcctcaggcccgacgccctggggcccaccacggcccaccacggcccacgccacccgcccaagcccccacgaagcaaggccaccgagcgcccgggccaggagccagagggccccggggccacccctgccggggaacgtgatgaccagagtccagacagtgtcccagagaggccgcggcccgcagaccggaggctctgtctgccctgcgtggacgcctcgccactcccagggaggacggcctgcccgtcgctgcaggaggccacgcgcctcatccaggaggaatttgccttcgatggctacctggacaatgggctggaggctctgatcatgggggagtacatcttcgccttgaaagatctcacctttgccactttctgtggcgccatttccgagaagttctgtgacctgtactgggatgagaagttgctgcagaacctctttaaggtggtcaacgggcaggcgtcaccctccccaagcacggccgaggaggctgggtcacagctcgagggcagccaaagcccccgctccccgtccagcaagaggccgtcgctgcaccgcctgggaaaagagaagccagccatggccaggaccagcagcagggccccctgctcacccacctcggtgtcggatgtggactcggacgcactgtcacggggaaacttcgaggtggggtttcggcctcagaggtccgtaaaagccgagagagcgcagcagcctgaggctggcgaggacagacggccagctggcggggcctcagacgtggaggcagtgacccgactggccaggtccaaaggggtcggcccagccttgtcccccggcccagccggattccagagctgcagccccggctggtgcagcgccttctacgaggccgactgcttcggggccgacgtccacaactacgtgaaggacctggggcggcagcaggcggacggggccctgcccgacgcccagagcccggagctggaacagcagctcatgatggagaaaagaaactaccgcaagaccctgaagttctaccagaaactcttacagaaggaaaagaggaacaaaggttccgacgtcaagaccatgctgtccaagctgaaagggcagctagaagaaatgaaatccagggtgcaattcctcagcttggtcaagaagtatctgcaggtcatgtacgcggaacgctggggcctggagccctgcaccctcccagtgatcgtgaacatcgcggccgcaccctgcgacacgctggacttcagccccctggacgagtcctcctcgctcatcttctacaacgtcaacaagcacccgggcggccggcagaaggcccgcatcctgcaggccggcacgccgctggggctcatggcctacctgtactccagtgatgccttcctggagggttatgtgcagcaattcctctacaccttccgctacttctgcacaccccacgacttcctgcacttcctcctcgaccgcatcaacagcacgctgaccagggcccaccaggaccccacctcgaccttcaccaagaacccttacaccttcagccccgaccccaagctccagtcgtacctcaagcagaggattgcccgcttcagcggtgccgacatttccacactcgccgcagatagcagggccaacttccaccaggtctccagcgagaagcactcacggaagattcaggacaagctacggaggatgaaggctacattccagtagccgagctcgggcctggtgtggaattccagatccgaatccgactgtggggggcgggctgggaggtgggagccgcgtctcaggcccggccgttatcaaggcccctccgcccccgaaccctggggagctggaccaggaggtggaggctcaggggaccccatggggacaggcagagctggtctcctcccagcagacggagccaggacgggcacaagagtcttggaggtttgcgtgtttctgctagaattaaaaagttaaatttaaaaatgaaaatgaaagacagcttcccaggagttttgtgcctgtctgcgcctctcacacacagataagtggctcttacccagctctcagtgactcccccacaaaacagcaacagcctccaccgccaactcaacaaacttcagagtagctcctccctgagcaggtttctgagccagcctcggttggctgagcaacgaagggccaaagctgacctctgagtggccaactgcagctcccagggactccgagacctccggtccgagaccctgcctgggttcaccccccacaacccagacccagaaccgctctccccttccctgcccagtgcccctcttccccagcccagacccccaggtgcccaaggcctgctgctggagcaggcaccttgggctgggcctgctcccccagggcccagggccccccagcttagaacagccttggtgaggtggtcatgcccgggcaaaggccctgcttcctggaaaggacactcagagcagctccaagacagaggctctgtggcgggggtccctgagagtgcccccacccatctcatgcc

SEQ ID NO: 65119 - DNA, 4573 bp, Homo sapiens
  misc_feature (1830)..(1830): n is a, c, g, or t
  misc_feature (1888)..(1889): n is a, c, g, or t
  misc_feature (1956)..(1957): n is a, c, g, or t
  misc_feature (2333)..(2333): n is a, c, g, or t
  misc_feature (2404)..(2405): n is a, c, g, or t
atgtgtctggtggggctggcggaggctcaacgcggggaagggggtcccggcggcggcgccccgggcggccccggcctgggcctcggcagcctcggcgaggagcgcttcccggtggtgaacacggcctacgggcgagtgcgcggtgtgcggcgcgagctcaacaacgagatcctgggccccgtcgtgcagttcttgggcgtgccctacgccacgccgcccctgggcgcccgccgcttccagccgcctgaggcgcccgcctcgtggcccggcgtgcgcaacgccaccaccctgccgcccgcctgcccgcagaacctgcacggggcgctgcccgccatcatgctgcctgtgtggttcaccgacaacttggaggcggccgccacctacgtgcagaaccagagcgaggactgcctgtacctcaacctctacgtgcccaccgaggacggtccgctcacaaaaaaacgtgacgaggcgacgctcaatccgccagacacagatatccgtgaccctgggaagaagcctgtgatgctgtttctccatggcggctcctacatggaggggaccggaaacatgttcgatggctcagtcctggctgcctatggcaacgtcattgtagccacgctcaactaccgtcttggggtgctcggttttctcagcaccggggaccaggctgcaaaaggcaactatgggctcctggaccagatccaggccctgcgctggctcagtgaaaacatcgcccactttgggggcgaccccgagcgtatcaccatctttggttccggggcaggggcctcctgcgtcaaccttctgatcctctcccaccattcagaagggctgttccagaaggccatcgcccagagtggcaccgccatttccagctggtctgtcaactaccagccgctcaagtacacgcggctgctggcagccaaggtgggctgtgaccgagaggacagtgctgaagctgtggagtgtctgcgccggaagccctcccgggagctggtggaccaggacgtgcagcctgcccgctaccacatcgcctttgggcccgtggtggatggcgacgtggtccccgatgaccctgagatcctcatgcagcagggagaattcctcaactacgacatgctcatcggtgtcaaccagggagagggcctcaagttcgtggaggactctgcagagagcgaggacggtgtgtctgccagcgcctttgacttcactgtctccaactttgtggacaacctgtatggctacccggaaggcaaggatgtgcttcgggagaccatcaagtttatgtacacagactgggccgaccgggacaatggcgaaatgcgccgcaaaaccctgctggcgctctttactgaccaccaatgggtggcaccagctgtggccactgccaagctgcacgccgactaccagtctcccgtctacttttacaccttctaccaccactgccaggcggagggccggcctgagtgggcagatgcggcgcacggggatgaactgccctatgtctttggcgtgcccatggtgggtgccaccgacctcttcccctgtaacttctccaagaatgacgtcatgctcagtgccgtggtcatgacctactggaccaacttcgccaagactggggaccccaaccagccggtgccgcaggataccaagttcatccacaccaagcccaatcgcttcgaggaggtggtgtggagcaaattcaacagcaaggagaagcagtatctgcacataggcctgaagccacgcgtgcgtgacaactaccgcgccaacaaggtggccttctggctggagctcgtgccccacctgcacaacctgcacacggagctnttcaccaccaccacgcgcctgcctccctacgccacgcgctggccgcctcgtccccccnntggcgccccgggcacacgccgcccccgccgcctgccaccctgcctcccgagcccgagcccgagcccnncccaagggcctatgaccgcttccccggggactcacgggactactccacggagctgagcgtcaccgtggccgtgggtgcctccctcctcttcctcaacatcctggcctttgctgccctctactacaagcgggaccggcggcaggagctgcggtgcaggcggcttagcccacctggcggctcaggctctggcgtgcctggtgggggccccctgctccccgccgcgggccgtgagctgccaccagaggaggagctggtgtcactgcagctgaagcggggtggtggcgtcggggcggaccctgccgaggctctgcgccctgcctgcccgcccgactacaccctggccctgcgccgggcaccggacgatgtgcctctcttngccccggggccctgaccctgctgcccagtggcctggggccaccgccacccccaccgcccccctcccttcanncttcgggcccttccccccgccccctcccaccgctaccagccacaacaacacgctaccccacccccactccaccactcgggtatagggggtgggtggggaggccctcctccccggccctccctggcccggccactccgaaggcagggaggaggacttggcaactggcttttctcctgtggagtcgtcacacgccatccagcagcgctaaggtggacatgggattcctccctgcgatgcgtgtctttcccacgcagagaagcccagtctcttctctggatctgggcctttgaacaactggggggcgttttctcccccccattgggacaccagtcttcggtgtgtggaatgtggtattttcccgcgtggaggtgtgctttctcacaacggggtgtgttttcccatgtgcagggtgaggtttttttttgccaccctggacacatgttggccccctcaaagaatttctgtggggatttgtaccccagaatcctgttcccccatcccttctcccacctcctcccctctccctccccctggagaccctggaagtggtgtgttcacatacagtgacccttggccaccagaccacagaggatggagcctgggaagcagcgaggaaatcacagccccctcgcccctgcctcccttgcccctaccccggcgaagcatgtttccccccgacgccccccttggcacaagtcagatgaagcacgttctgccggggaggccctcaccttccagagaggacagacacagatttcctgctgggggagggaggagtccacgcatcctgatgctgcctggaagcttattttcccgtggccaggacgcatttctctgagtggaaacaggttcttgcatgtggatgtgtgtttccccaggcagacggcccctctcttcccagcacttccctgcctcccccaggcctcaggcccagcacccagttcctcctcacatggcaggtgagcacagacttctagttggcaggagctgaggagggtgaacaaaccccgagggaggcccggcccttgctcccgagttggggggagggggtgtggcaacgtgccccccgcagaggccacgcatgtttgaccaaagccctcattgtggtccgaggacagccttttccccaggcctcagagcattgctcatccgtgccaaactgggtaggtggatttgagcggaaagactcccaaaatgtgccaagaatttcccagtcccaggcagggcaggggaaactaagggcaagcaggatacagggcgagggatgtggcaggtgagggggctcccgcctgtgccccttctcctcaccatgtctcccccaccctgcctcagttctccgttccccttcatctccgtccccctctttgaagctgtccccatctcagtgtcagaccagccttctcctcagctgaccaccctcctctgacccacgccccctccttgtctgaaagaaaggagccttgaatggtggagggaggcagtggggagaaaggtctcaccggacaggttgggagaatgaggtcagcggtgctggggaacagatggagggggcagtggggacagggcttgggcagacaccagcaggaataatttgaaatgtgtgaggtgactccccggagggccttgggcttgggcatttgggaaaagaatgatgtctggaagggcttaagggacacagtggacgaggggagagtcctcatctgctggcattttgtggggtgttagtgccaaacttgaataggggctggggtgctgtcttccactgacacccaaatccagaatccctggtcttgagtccccagaactttgcctcttgactgtcccttctcttcctacctccatccatggaaaattagttattttctgatcctttcccctgcctggtctagctcctctccaaacagccatgccctccaaatgctagagacctgggccctgaaccctgtagacagatgccctcagaattggggcatgggaggggggctgggggaccccatgattcagccacggactccaatgcccagctcctctccccaaaacaatcccgacaatcccttatccctaccccaaccctttgcggctctgtacacatttttaaacctggcaaaagatgaagagaatattgtaaatataaaagtttaactgttaaaaaaaaaaaagcaaacaca

SEQ ID NO: 65120 - DNA, 4522 bp, Homo sapiens
  misc_feature (1779)..(1779): n is a, c, g, or t
  misc_feature (1837)..(1838): n is a, c, g, or t
  misc_feature (1905)..(1906): n is a, c, g, or t
  misc_feature (2282)..(2282): n is a, c, g, or t
  misc_feature (2353)..(2354): n is a, c, g, or t
atgtgtctggtggggctggcggaggctcaacgcggggaagggggtcccggcggcggcgccccgggcggccccggcctgggcctcggcagcctcggcgaggagcgcttcccggtggtgaacacggcctacgggcgagtgcgcggtgtgcggcgcgagctcaacaacgagatcctgggccccgtcgtgcagttcttgggcgtgccctacgccacgccgcccctgggcgcccgccgcttccagccgcctgaggcgcccgcctcgtggcccggcgtgcgcaacgccaccaccctgccgcccgcctgcccgcagaacctgcacggggcgctgcccgccatcatgctgcctgtgtggttcaccgacaacttggaggcggccgccacctacgtgcagaaccagagcgaggactgcctgtacctcaacctctacgtgcccaccgaggacgatatccgtgaccctgggaagaagcctgtgatgctgtttctccatggcggctcctacatggaggggaccggaaacatgttcgatggctcagtcctggctgcctatggcaacgtcattgtagccacgctcaactaccgtcttggggtgctcggttttctcagcaccggggaccaggctgcaaaaggcaactatgggctcctggaccagatccaggccctgcgctggctcagtgaaaacatcgcccactttgggggcgaccccgagcgtatcaccatctttggttccggggcaggggcctcctgcgtcaaccttctgatcctctcccaccattcagaagggctgttccagaaggccatcgcccagagtggcaccgccatttccagctggtctgtcaactaccagccgctcaagtacacgcggctgctggcagccaaggtgggctgtgaccgagaggacagtgctgaagctgtggagtgtctgcgccggaagccctcccgggagctggtggaccaggacgtgcagcctgcccgctaccacatcgcctttgggcccgtggtggatggcgacgtggtccccgatgaccctgagatcctcatgcagcagggagaattcctcaactacgacatgctcatcggtgtcaaccagggagagggcctcaagttcgtggaggactctgcagagagcgaggacggtgtgtctgccagcgcctttgacttcactgtctccaactttgtggacaacctgtatggctacccggaaggcaaggatgtgcttcgggagaccatcaagtttatgtacacagactgggccgaccgggacaatggcgaaatgcgccgcaaaaccctgctggcgctctttactgaccaccaatgggtggcaccagctgtggccactgccaagctgcacgccgactaccagtctcccgtctacttttacaccttctaccaccactgccaggcggagggccggcctgagtgggcagatgcggcgcacggggatgaactgccctatgtctttggcgtgcccatggtgggtgccaccgacctcttcccctgtaacttctccaagaatgacgtcatgctcagtgccgtggtcatgacctactggaccaacttcgccaagactggggaccccaaccagccggtgccgcaggataccaagttcatccacaccaagcccaatcgcttcgaggaggtggtgtggagcaaattcaacagcaaggagaagcagtatctgcacataggcctgaagccacgcgtgcgtgacaactaccgcgccaacaaggtggccttctggctggagctcgtgccccacctgcacaacctgcacacggagctnttcaccaccaccacgcgcctgcctccctacgccacgcgctggccgcctcgtccccccnntggcgccccgggcacacgccgcccccgccgcctgccaccctgcctcccgagcccgagcccgagcccnncccaagggcctatgaccgcttccccggggactcacgggactactccacggagctgagcgtcaccgtggccgtgggtgcctccctcctcttcctcaacatcctggcctttgctgccctctactacaagcgggaccggcggcaggagctgcggtgcaggcggcttagcccacctggcggctcaggctctggcgtgcctggtgggggccccctgctccccgccgcgggccgtgagctgccaccagaggaggagctggtgtcactgcagctgaagcggggtggtggcgtcggggcggaccctgccgaggctctgcgccctgcctgcccgcccgactacaccctggccctgcgccgggcaccggacgatgtgcctctcttngccccggggccctgaccctgctgcccagtggcctggggccaccgccacccccaccgcccccctcccttcanncttcgggcccttccccccgccccctcccaccgctaccagccacaacaacacgctaccccacccccactccaccactcgggtatagggggtgggtggggaggccctcctccccggccctccctggcccggccactccgaaggcagggaggaggacttggcaactggcttttctcctgtggagtcgtcacacgccatccagcagcgctaaggtggacatgggattcctccctgcgatgcgtgtctttcccacgcagagaagcccagtctcttctctggatctgggcctttgaacaactggggggcgttttctcccccccattgggacaccagtcttcggtgtgtggaatgtggtattttcccgcgtggaggtgtgctttctcacaacggggtgtgttttcccatgtgcagggtgaggtttttttttgccaccctggacacatgttggccccctcaaagaatttctgtggggatttgtaccccagaatcctgttcccccatcccttctcccacctcctcccctctccctccccctggagaccctggaagtggtgtgttcacatacagtgacccttggccaccagaccacagaggatggagcctgggaagcagcgaggaaatcacagccccctcgcccctgcctcccttgcccctaccccggcgaagcatgtttccccccgacgccccccttggcacaagtcagatgaagcacgttctgccggggaggccctcaccttccagagaggacagacacagatttcctgctgggggagggaggagtccacgcatcctgatgctgcctggaagcttattttcccgtggccaggacgcatttctctgagtggaaacaggttcttgcatgtggatgtgtgtttccccaggcagacggcccctctcttcccagcacttccctgcctcccccaggcctcaggcccagcacccagttcctcctcacatggcaggtgagcacagacttctagttggcaggagctgaggagggtgaacaaaccccgagggaggcccggcccttgctcccgagttggggggagggggtgtggcaacgtgccccccgcagaggccacgcatgtttgaccaaagccctcattgtggtccgaggacagccttttccccaggcctcagagcattgctcatccgtgccaaactgggtaggtggatttgagcggaaagactcccaaaatgtgccaagaatttcccagtcccaggcagggcaggggaaactaagggcaagcaggatacagggcgagggatgtggcaggtgagggggctcccgcctgtgccccttctcctcaccatgtctcccccaccctgcctcagttctccgttccccttcatctccgtccccctctttgaagctgtccccatctcagtgtcagaccagccttctcctcagctgaccaccctcctctgacccacgccccctccttgtctgaaagaaaggagccttgaatggtggagggaggcagtggggagaaaggtctcaccggacaggttgggagaatgaggtcagcggtgctggggaacagatggagggggcagtggggacagggcttgggcagacaccagcaggaataatttgaaatgtgtgaggtgactccccggagggccttgggcttgggcatttgggaaaagaatgatgtctggaagggcttaagggacacagtggacgaggggagagtcctcatctgctggcattttgtggggtgttagtgccaaacttgaataggggctggggtgctgtcttccactgacacccaaatccagaatccctggtcttgagtccccagaactttgcctcttgactgtcccttctcttcctacctccatccatggaaaattagttattttctgatcctttcccctgcctggtctagctcctctccaaacagccatgccctccaaatgctagagacctgggccctgaaccctgtagacagatgccctcagaattggggcatgggaggggggctgggggaccccatgattcagccacggactccaatgcccagctcctctccccaaaacaatcccgacaatcccttatccctaccccaaccctttgcggctctgtacacatttttaaacctggcaaaagatgaagagaatattgtaaatataaaagtttaactgttaaaaaaaaaaaagcaaacaca

SEQ ID NO: 65121 - DNA, 4583 bp, Homo sapiens
  misc_feature (1840)..(1840): n is a, c, g, or t
  misc_feature (1898)..(1899): n is a, c, g, or t
  misc_feature (1966)..(1967): n is a, c, g, or t
  misc_feature (2343)..(2343): n is a, c, g, or t
  misc_feature (2414)..(2415): n is a, c, g, or t
atgtgtctggtggggctggcggaggctcaacgcggggaagggggtcccggcggcggcgccccgggcggccccggcctgggcctcggcagcctcggcgaggagcgcttcccggtggtgaacacggcctacgggcgagtgcgcggtgtgcggcgcgagctcaacaacgagatcctgggccccgtcgtgcagttcttgggcgtgccctacgccacgccgcccctgggcgcccgccgcttccagccgcctgaggcgcccgcctcgtggcccggcgtgcgcaacgccaccaccctgccgcccgcctgcccgcagaacctgcacggggcgctgcccgccatcatgctgcctgtgtggttcaccgacaacttggaggcggccgccacctacgtgcagaaccagagcgaggactgcctgtacctcaacctctacgtgcccaccgaggacggtccgctcacaaaaaaacgtgacgaggcgacgctcaatccgccagacacagatatccgtgaccctgggaagaagcctgtgatgctgtttctccatggcggctcctacatggaggggaccggaaacatgttcgatggctcagtcctggctgcctatggcaacgtcattgtagccacgctcaactaccgtcttggggtgctcggttttctcagcaccggggaccaggctgcaaaaggcaactatgggctcctggaccagatccaggccctgcgctggctcagtgaaaacatcgcccactttgggggcgaccccgagcgtatcaccatctttggttccggggcaggggcctcctgcgtcaaccttctgatcctctcccaccattcagaagggctgttccagaaggccatcgcccagagtggcaccgccatttccagctggtctgtcaactaccagccgctcaagtacacgcggctgctggcagccaaggtgggctgtgaccgagaggacagtgctgaaagctgtggaggctgtggagtgtctgcgccggaagccctcccgggagctggtggaccaggacgtgcagcctgcccgctaccacatcgcctttgggcccgtggtggatggcgacgtggtccccgatgaccctgagatcctcatgcagcagggagaattcctcaactacgacatgctcatcggtgtcaaccagggagagggcctcaagttcgtggaggactctgcagagagcgaggacggtgtgtctgccagcgcctttgacttcactgtctccaactttgtggacaacctgtatggctacccggaaggcaaggatgtgcttcgggagaccatcaagtttatgtacacagactgggccgaccgggacaatggcgaaatgcgccgcaaaaccctgctggcgctctttactgaccaccaatgggtggcaccagctgtggccactgccaagctgcacgccgactaccagtctcccgtctacttttacaccttctaccaccactgccaggcggagggccggcctgagtgggcagatgcggcgcacggggatgaactgccctatgtctttggcgtgcccatggtgggtgccaccgacctcttcccctgtaacttctccaagaatgacgtcatgctcagtgccgtggtcatgacctactggaccaacttcgccaagactggggaccccaaccagccggtgccgcaggataccaagttcatccacaccaagcccaatcgcttcgaggaggtggtgtggagcaaattcaacagcaaggagaagcagtatctgcacataggcctgaagccacgcgtgcgtgacaactaccgcgccaacaaggtggccttctggctggagctcgtgccccacctgcacaacctgcacacggagctnttcaccaccaccacgcgcctgcctccctacgccacgcgctggccgcctcgtccccccnntggcgccccgggcacacgccgcccccgccgcctgccaccctgcctcccgagcccgagcccgagcccnncccaagggcctatgaccgcttccccggggactcacgggactactccacggagctgagcgtcaccgtggccgtgggtgcctccctcctcttcctcaacatcctggcctttgctgccctctactacaagcgggaccggcggcaggagctgcggtgcaggcggcttagcccacctggcggctcaggctctggcgtgcctggtgggggccccctgctccccgccgcgggccgtgagctgccaccagaggaggagctggtgtcactgcagctgaagcggggtggtggcgtcggggcggaccctgccgaggctctgcgccctgcctgcccgcccgactacaccctggccctgcgccgggcaccggacgatgtgcctctcttngccccggggccctgaccctgctgcccagtggcctggggccaccgccacccccaccgcccccctcccttcanncttcgggcccttccccccgccccctcccaccgctaccagccacaacaacacgctaccccacccccactccaccactcgggtatagggggtgggtggggaggccctcctccccggccctccctggcccggccactccgaaggcagggaggaggacttggcaactggcttttctcctgtggagtcgtcacacgccatccagcagcgctaaggtggacatgggattcctccctgcgatgcgtgtctttcccacgcagagaagcccagtctcttctctggatctgggcctttgaacaactggggggcgttttctcccccccattgggacaccagtcttcggtgtgtggaatgtggtattttcccgcgtggaggtgtgctttctcacaacggggtgtgttttcccatgtgcagggtgaggtttttttttgccaccctggacacatgttggccccctcaaagaatttctgtggggatttgtaccccagaatcctgttcccccatcccttctcccacctcctcccctctccctccccctggagaccctggaagtggtgtgttcacatacagtgacccttggccaccagaccacagaggatggagcctgggaagcagcgaggaaatcacagccccctcgcccctgcctcccttgcccctaccccggcgaagcatgtttccccccgacgccccccttggcacaagtcagatgaagcacgttctgccggggaggccctcaccttccagagaggacagacacagatttcctgctgggggagggaggagtccacgcatcctgatgctgcctggaagcttattttcccgtggccaggacgcatttctctgagtggaaacaggttcttgcatgtggatgtgtgtttccccaggcagacggcccctctcttcccagcacttccctgcctcccccaggcctcaggcccagcacccagttcctcctcacatggcaggtgagcacagacttctagttggcaggagctgaggagggtgaacaaaccccgagggaggcccggcccttgctcccgagttggggggagggggtgtggcaacgtgccccccgcagaggccacgcatgtttgaccaaagccctcattgtggtccgaggacagccttttccccaggcctcagagcattgctcatccgtgccaaactgggtaggtggatttgagcggaaagactcccaaaatgtgccaagaatttcccagtcccaggcagggcaggggaaactaagggcaagcaggatacagggcgagggatgtggcaggtgagggggctcccgcctgtgccccttctcctcaccatgtctcccccaccctgcctcagttctccgttccccttcatctccgtccccctctttgaagctgtccccatctcagtgtcagaccagccttctcctcagctgaccaccctcctctgacccacgccccctccttgtctgaaagaaaggagccttgaatggtggagggaggcagtggggagaaaggtctcaccggacaggttgggagaatgaggtcagcggtgctggggaacagatggagggggcagtggggacagggcttgggcagacaccagcaggaataatttgaaatgtgtgaggtgactccccggagggccttgggcttgggcatttgggaaaagaatgatgtctggaagggcttaagggacacagtggacgaggggagagtcctcatctgctggcattttgtggggtgttagtgccaaacttgaataggggctggggtgctgtcttccactgacacccaaatccagaatccctggtcttgagtccccagaactttgcctcttgactgtcccttctcttcctacctccatccatggaaaattagttattttctgatcctttcccctgcctggtctagctcctctccaaacagccatgccctccaaatgctagagacctgggccctgaaccctgtagacagatgccctcagaattggggcatgggaggggggctgggggaccccatgattcagccacggactccaatgcccagctcctctccccaaaacaatcccgacaatcccttatccctaccccaaccctttgcggctctgtacacatttttaaacctggcaaaagatgaagagaatattgtaaatataaaagtttaactgttaaaaaaaaaaaagcaaacaca

SEQ ID NO: 65122 - DNA, 5403 bp, Homo sapiens
  misc_feature (1657)..(1657): n is a, c, g, or t
  misc_feature (2332)..(2332): n is a, c, g, or t
  misc_feature (2417)..(2417): n is a, c, g, or t
  misc_feature (2660)..(2660): n is a, c, g, or t
  misc_feature (2718)..(2719): n is a, c, g, or t
  misc_feature (2786)..(2787): n is a, c, g, or t
  misc_feature (3163)..(3163): n is a, c, g, or t
  misc_feature (3234)..(3235): n is a, c, g, or t
atgtgtctggtggggctggcggaggctcaacgcggggaagggggtcccggcggcggcgccccgggcggccccggcctgggcctcggcagcctcggcgaggagcgcttcccggtggtgaacacggcctacgggcgagtgcgcggtgtgcggcgcgagctcaacaacgagatcctgggccccgtcgtgcagttcttgggcgtgccctacgccacgccgcccctgggcgcccgccgcttccagccgcctgaggcgcccgcctcgtggcccggcgtgcgcaacgccaccaccctgccgcccgcctgcccgcagaacctgcacggggcgctgcccgccatcatgctgcctgtgtggttcaccgacaacttggaggcggccgccacctacgtgcagaaccagagcgaggactgcctgtacctcaacctctacgtgcccaccgaggacggtccgctcacaaaaaaacgtgacgaggcgacgctcaatccgccagacacagatatccgtgaccctgggaagaagcctgtgatgctgtttctccatggcggctcctacatggaggggaccggaaacatgttcgatggctcagtcctggctgcctatggcaacgtcattgtagccacgctcaactaccgtcttggggtgctcggttttctcagcaccggggaccaggctgcaaaaggcaactatgggctcctggaccagatccaggccctgcgctggctcagtgaaaacatcgcccactttgggggcgaccccgagcgtatcaccatctttggttccggggcaggggcctcctgcgtcaaccttctgatcctctcccaccattcagaagggctgttccagaaggccatcgcccagagtggcaccgccatttccagctggtctgtcaactaccagccgctcaagtacacgcggctgctggcagccaaggtgggctgtgaccgagaggacagtgctgaaagctgtggaggctgtggagtgtctgcgccggaagccctcccgggagctggtggaccaggacgtgcagcctgcccgctaccacatcgcctttgggcccgtggtggatggcgacgtggtccccgatgaccctgagatcctcatgcagcagggagaattcctcaactacgacatgctcatcggtgtcaaccagggagagggcctcaagttcgtggaggactctgcagagagcgaggacggtgtgtctgccagcgcctttgacttcactgtctccaactttgtggacaacctgtatggctacccggaaggcaaggatgtgcttcgggagaccatcaagtttatgtacacagactgggccgaccgggacaatggcgaaatgcgccgcaaaaccctgctggcgctctttactgaccaccaatgggtggcaccagctgtggccactgccaagctgcacgccgactaccagtctcccgtctacttttacaccttctaccaccactgccaggcggagggccggcctgagtgggcagatgcggcgcacggggatgaactgccctatgtctttggcgtgcccatggtgggtgccaccgacctcttcccctgtaacttctccaagaatgacgtcatgctcagtgccgtggtcatgacctactggaccaacttcgccaagactgggtgagggccagaggggctgggcggggcntgggcggggccctccctccttcacatggccgccgttcctctgttaaggcactcactctggcctgccctcttgctcgagtgaaaccaacccagacacctctgtgccaggcacggagttgagcgttggagactcagcagtatcagacagagaagccgctgtcctttctggggagttgggggcccactcagtggctttggcttggcgtctgtctctccctcctccttgcctgatcccccctgcccgaccccccagggctctgcatctctggctgactgctcaggtgtgtgtgtctgagtgtgtgtaagagtttgtgtgtctctacttctgtctctgtctctctgaaaatccactgacagctctccacctccctctgctgctctcttttgtctgcttacttttcgctttctctggctgccggctgatttcagcctggctgtgtatctgtctctggctgtccctcccgtgtctttgaccctgtctgtgtttcattcaggctcagcttctgcttctccctggctatctctgtgtgtgtccctgcccctctgcccgcatttctggctgtctctgccagtctgtctccatccctatttgcctatttgcctgaagagacaggcagtttctctgtctcttcatatccatctgtgtctctctgcctctgtgactttttctctggcntttcttgctgtccccctgtctctctgcatctctgtctgtctccctgcccactgccatccaccctccttcagagccttgccctcanctcctcctttccctgccctcctgtgcccacagggaccccaaccagccggtgccgcaggataccaagttcatccacaccaagcccaatcgcttcgaggaggtggtgtggagcaaattcaacagcaaggagaagcagtatctgcacataggcctgaagccacgcgtgcgtgacaactaccgcgccaacaaggtggccttctggctggagctcgtgccccacctgcacaacctgcacacggagctnttcaccaccaccacgcgcctgcctccctacgccacgcgctggccgcctcgtccccccnntggcgccccgggcacacgccgcccccgccgcctgccaccctgcctcccgagcccgagcccgagcccnncccaagggcctatgaccgcttccccggggactcacgggactactccacggagctgagcgtcaccgtggccgtgggtgcctccctcctcttcctcaacatcctggcctttgctgccctctactacaagcgggaccggcggcaggagctgcggtgcaggcggcttagcccacctggcggctcaggctctggcgtgcctggtgggggccccctgctccccgccgcgggccgtgagctgccaccagaggaggagctggtgtcactgcagctgaagcggggtggtggcgtcggggcggaccctgccgaggctctgcgccctgcctgcccgcccgactacaccctggccctgcgccgggcaccggacgatgtgcctctcttngccccggggccctgaccctgctgcccagtggcctggggccaccgccacccccaccgcccccctcccttcanncttcgggcccttccccccgccccctcccaccgctaccagccacaacaacacgctaccccacccccactccaccactcgggtatagggggtgggtggggaggccctcctccccggccctccctggcccggccactccgaaggcagggaggaggacttggcaactggcttttctcctgtggagtcgtcacacgccatccagcagcgctaaggtggacatgggattcctccctgcgatgcgtgtctttcccacgcagagaagcccagtctcttctctggatctgggcctttgaacaactggggggcgttttctcccccccattgggacaccagtcttcggtgtgtggaatgtggtattttcccgcgtggaggtgtgctttctcacaacggggtgtgttttcccatgtgcagggtgaggtttttttttgccaccctggacacatgttggccccctcaaagaatttctgtggggatttgtaccccagaatcctgttcccccatcccttctcccacctcctcccctctccctccccctggagaccctggaagtggtgtgttcacatacagtgacccttggccaccagaccacagaggatggagcctgggaagcagcgaggaaatcacagccccctcgcccctgcctcccttgcccctaccccggcgaagcatgtttccccccgacgccccccttggcacaagtcagatgaagcacgttctgccggggaggccctcaccttccagagaggacagacacagatttcctgctgggggagggaggagtccacgcatcctgatgctgcctggaagcttattttcccgtggccaggacgcatttctctgagtggaaacaggttcttgcatgtggatgtgtgtttccccaggcagacggcccctctcttcccagcacttccctgcctcccccaggcctcaggcccagcacccagttcctcctcacatggcaggtgagcacagacttctagttggcaggagctgaggagggtgaacaaaccccgagggaggcccggcccttgctcccgagttggggggagggggtgtggcaacgtgccccccgcagaggccacgcatgtttgaccaaagccctcattgtggtccgaggacagccttttccccaggcctcagagcattgctcatccgtgccaaactgggtaggtggatttgagcggaaagactcccaaaatgtgccaagaatttcccagtcccaggcagggcaggggaaactaagggcaagcaggatacagggcgagggatgtggcaggtgagggggctcccgcctgtgccccttctcctcaccatgtctcccccaccctgcctcagttctccgttccccttcatctccgtccccctctttgaagctgtccccatctcagtgtcagaccagccttctcctcagctgaccaccctcctctgacccacgccccctccttgtctgaaagaaaggagccttgaatggtggagggaggcagtggggagaaaggtctcaccggacaggttgggagaatgaggtcagcggtgctggggaacagatggagggggcagtggggacagggcttgggcagacaccagcaggaataatttgaaatgtgtgaggtgactccccggagggccttgggcttgggcatttgggaaaagaatgatgtctggaagggcttaagggacacagtggacgaggggagagtcctcatctgctggcattttgtggggtgttagtgccaaacttgaataggggctggggtgctgtcttccactgacacccaaatccagaatccctggtcttgagtccccagaactttgcctcttgactgtcccttctcttcctacctccatccatggaaaattagttattttctgatcctttcccctgcctggtctagctcctctccaaacagccatgccctccaaatgctagagacctgggccctgaaccctgtagacagatgccctcagaattggggcatgggaggggggctgggggaccccatgattcagccacggactccaatgcccagctcctctccccaaaacaatcccgacaatcccttatccctaccccaaccctttgcggctctgtacacatttttaaacctggcaaaagatgaagagaatattgtaaatataaaagtttaactgttaaaaaaaaaaaagcaaacaca

SEQ ID NO: 65123 - DNA, 4371 bp, Homo sapiens
  misc_feature (1840)..(1840): n is a, c, g, or t
  misc_feature (1898)..(1899): n is a, c, g, or t
  misc_feature (1966)..(1967): n is a, c, g, or t
  misc_feature (2343)..(2343): n is a, c, g, or t
  misc_feature (2414)..(2415): n is a, c, g, or t
atgtgtctggtggggctggcggaggctcaacgcggggaagggggtcccggcggcggcgccccgggcggccccggcctgggcctcggcagcctcggcgaggagcgcttcccggtggtgaacacggcctacgggcgagtgcgcggtgtgcggcgcgagctcaacaacgagatcctgggccccgtcgtgcagttcttgggcgtgccctacgccacgccgcccctgggcgcccgccgcttccagccgcctgaggcgcccgcctcgtggcccggcgtgcgcaacgccaccaccctgccgcccgcctgcccgcagaacctgcacggggcgctgcccgccatcatgctgcctgtgtggttcaccgacaacttggaggcggccgccacctacgtgcagaaccagagcgaggactgcctgtacctcaacctctacgtgcccaccgaggacggtccgctcacaaaaaaacgtgacgaggcgacgctcaatccgccagacacagatatccgtgaccctgggaagaagcctgtgatgctgtttctccatggcggctcctacatggaggggaccggaaacatgttcgatggctcagtcctggctgcctatggcaacgtcattgtagccacgctcaactaccgtcttggggtgctcggttttctcagcaccggggaccaggctgcaaaaggcaactatgggctcctggaccagatccaggccctgcgctggctcagtgaaaacatcgcccactttgggggcgaccccgagcgtatcaccatctttggttccggggcaggggcctcctgcgtcaaccttctgatcctctcccaccattcagaagggctgttccagaaggccatcgcccagagtggcaccgccatttccagctggtctgtcaactaccagccgctcaagtacacgcggctgctggcagccaaggtgggctgtgaccgagaggacagtgctgaaagctgtggaggctgtggagtgtctgcgccggaagccctcccgggagctggtggaccaggacgtgcagcctgcccgctaccacatcgcctttgggcccgtggtggatggcgacgtggtccccgatgaccctgagatcctcatgcagcagggagaattcctcaactacgacatgctcatcggtgtcaaccagggagagggcctcaagttcgtggaggactctgcagagagcgaggacggtgtgtctgccagcgcctttgacttcactgtctccaactttgtggacaacctgtatggctacccggaaggcaaggatgtgcttcgggagaccatcaagtttatgtacacagactgggccgaccgggacaatggcgaaatgcgccgcaaaaccctgctggcgctctttactgaccaccaatgggtggcaccagctgtggccactgccaagctgcacgccgactaccagtctcccgtctacttttacaccttctaccaccactgccaggcggagggccggcctgagtgggcagatgcggcgcacggggatgaactgccctatgtctttggcgtgcccatggtgggtgccaccgacctcttcccctgtaacttctccaagaatgacgtcatgctcagtgccgtggtcatgacctactggaccaacttcgccaagactggggaccccaaccagccggtgccgcaggataccaagttcatccacaccaagcccaatcgcttcgaggaggtggtgtggagcaaattcaacagcaaggagaagcagtatctgcacataggcctgaagccacgcgtgcgtgacaactaccgcgccaacaaggtggccttctggctggagctcgtgccccacctgcacaacctgcacacggagctnttcaccaccaccacgcgcctgcctccctacgccacgcgctggccgcctcgtccccccnntggcgccccgggcacacgccgcccccgccgcctgccaccctgcctcccgagcccgagcccgagcccnncccaagggcctatgaccgcttccccggggactcacgggactactccacggagctgagcgtcaccgtggccgtgggtgcctccctcctcttcctcaacatcctggcctttgctgccctctactacaagcgggaccggcggcaggagctgcggtgcaggcggcttagcccacctggcggctcaggctctggcgtgcctggtgggggccccctgctccccgccgcgggccgtgagctgccaccagaggaggagctggtgtcactgcagctgaagcggggtggtggcgtcggggcggaccctgccgaggctctgcgccctgcctgcccgcccgactacaccctggccctgcgccgggcaccggacgatgtgcctctcttngccccggggccctgaccctgctgcccagtggcctggggccaccgccacccccaccgcccccctcccttcanncttcgggcccttccccccgccccctcccaccgctaccagccacaacaacacgctaccccacccccactccaccactcgggtatagggggtgggtggggaggccctcctccccggccctccctggcccggccactccgaaggcagggaggaggacttggcaactggcttttctcctgtggagtcgtcacacgccatccagcagcgctaaggtggacatgggattcctccctgcgatgcgtgtctttcccacgcagagaagcccagtctcttctctggatctgggcctttgaacaactggggggcgttttctcccccccattgggacaccagtcttcggtgtgttcacatacagtgacccttggccaccagaccacagaggatggagcctgggaagcagcgaggaaatcacagccccctcgcccctgcctcccttgcccctaccccggcgaagcatgtttccccccgacgccccccttggcacaagtcagatgaagcacgttctgccggggaggccctcaccttccagagaggacagacacagatttcctgctgggggagggaggagtccacgcatcctgatgctgcctggaagcttattttcccgtggccaggacgcatttctctgagtggaaacaggttcttgcatgtggatgtgtgtttccccaggcagacggcccctctcttcccagcacttccctgcctcccccaggcctcaggcccagcacccagttcctcctcacatggcaggtgagcacagacttctagttggcaggagctgaggagggtgaacaaaccccgagggaggcccggcccttgctcccgagttggggggagggggtgtggcaacgtgccccccgcagaggccacgcatgtttgaccaaagccctcattgtggtccgaggacagccttttccccaggcctcagagcattgctcatccgtgccaaactgggtaggtggatttgagcggaaagactcccaaaatgtgccaagaatttcccagtcccaggcagggcaggggaaactaagggcaagcaggatacagggcgagggatgtggcaggtgagggggctcccgcctgtgccccttctcctcaccatgtctcccccaccctgcctcagttctccgttccccttcatctccgtccccctctttgaagctgtccccatctcagtgtcagaccagccttctcctcagctgaccaccctcctctgacccacgccccctccttgtctgaaagaaaggagccttgaatggtggagggaggcagtggggagaaaggtctcaccggacaggttgggagaatgaggtcagcggtgctggggaacagatggagggggcagtggggacagggcttgggcagacaccagcaggaataatttgaaatgtgtgaggtgactccccggagggccttgggcttgggcatttgggaaaagaatgatgtctggaagggcttaagggacacagtggacgaggggagagtcctcatctgctggcattttgtggggtgttagtgccaaacttgaataggggctggggtgctgtcttccactgacacccaaatccagaatccctggtcttgagtccccagaactttgcctcttgactgtcccttctcttcctacctccatccatggaaaattagttattttctgatcctttcccctgcctggtctagctcctctccaaacagccatgccctccaaatgctagagacctgggccctgaaccctgtagacagatgccctcagaattggggcatgggaggggggctgggggaccccatgattcagccacggactccaatgcccagctcctctccccaaaacaatcccgacaatcccttatccctaccccaaccctttgcggctctgtacacatttttaaacctggcaaaagatgaagagaatattgtaaatataaaagtttaactgttaaaaaaaaaaaagcaaacaca

SEQ ID NO: 65124 - DNA, 4529 bp, Homo sapiens
  misc_feature (1840)..(1840): n is a, c, g, or t
  misc_feature (1898)..(1899): n is a, c, g, or t
  misc_feature (1966)..(1967): n is a, c, g, or t
  misc_feature (2343)..(2343): n is a, c, g, or t
  misc_feature (2414)..(2415): n is a, c, g, or t
atgtgtctggtggggctggcggaggctcaacgcggggaagggggtcccggcggcggcgccccgggcggccccggcctgggcctcggcagcctcggcgaggagcgcttcccggtggtgaacacggcctacgggcgagtgcgcggtgtgcggcgcgagctcaacaacgagatcctgggccccgtcgtgcagttcttgggcgtgccctacgccacgccgcccctgggcgcccgccgcttccagccgcctgaggcgcccgcctcgtggcccggcgtgcgcaacgccaccaccctgccgcccgcctgcccgcagaacctgcacggggcgctgcccgccatcatgctgcctgtgtggttcaccgacaacttggaggcggccgccacctacgtgcagaaccagagcgaggactgcctgtacctcaacctctacgtgcccaccgaggacggtccgctcacaaaaaaacgtgacgaggcgacgctcaatccgccagacacagatatccgtgaccctgggaagaagcctgtgatgctgtttctccatggcggctcctacatggaggggaccggaaacatgttcgatggctcagtcctggctgcctatggcaacgtcattgtagccacgctcaactaccgtcttggggtgctcggttttctcagcaccggggaccaggctgcaaaaggcaactatgggctcctggaccagatccaggccctgcgctggctcagtgaaaacatcgcccactttgggggcgaccccgagcgtatcaccatctttggttccggggcaggggcctcctgcgtcaaccttctgatcctctcccaccattcagaagggctgttccagaaggccatcgcccagagtggcaccgccatttccagctggtctgtcaactaccagccgctcaagtacacgcggctgctggcagccaaggtgggctgtgaccgagaggacagtgctgaaagctgtggaggctgtggagtgtctgcgccggaagccctcccgggagctggtggaccaggacgtgcagcctgcccgctaccacatcgcctttgggcccgtggtggatggcgacgtggtccccgatgaccctgagatcctcatgcagcagggagaattcctcaactacgacatgctcatcggtgtcaaccagggagagggcctcaagttcgtggaggactctgcagagagcgaggacggtgtgtctgccagcgcctttgacttcactgtctccaactttgtggacaacctgtatggctacccggaaggcaaggatgtgcttcgggagaccatcaagtttatgtacacagactgggccgaccgggacaatggcgaaatgcgccgcaaaaccctgctggcgctctttactgaccaccaatgggtggcaccagctgtggccactgccaagctgcacgccgactaccagtctcccgtctacttttacaccttctaccaccactgccaggcggagggccggcctgagtgggcagatgcggcgcacggggatgaactgccctatgtctttggcgtgcccatggtgggtgccaccgacctcttcccctgtaacttctccaagaatgacgtcatgctcagtgccgtggtcatgacctactggaccaacttcgccaagactggggaccccaaccagccggtgccgcaggataccaagttcatccacaccaagcccaatcgcttcgaggaggtggtgtggagcaaattcaacagcaaggagaagcagtatctgcacataggcctgaagccacgcgtgcgtgacaactaccgcgccaacaaggtggccttctggctggagctcgtgccccacctgcacaacctgcacacggagctnttcaccaccaccacgcgcctgcctccctacgccacgcgctggccgcctcgtccccccnntggcgccccgggcacacgccgcccccgccgcctgccaccctgcctcccgagcccgagcccgagcccnncccaagggcctatgaccgcttccccggggactcacgggactactccacggagctgagcgtcaccgtggccgtgggtgcctccctcctcttcctcaacatcctggcctttgctgccctctactacaagcgggaccggcggcaggagctgcggtgcaggcggcttagcccacctggcggctcaggctctggcgtgcctggtgggggccccctgctccccgccgcgggccgtgagctgccaccagaggaggagctggtgtcactgcagctgaagcggggtggtggcgtcggggcggaccctgccgaggctctgcgccctgcctgcccgcccgactacaccctggccctgcgccgggcaccggacgatgtgcctctcttngccccggggccctgaccctgctgcccagtggcctggggccaccgccacccccaccgcccccctcccttcanncttcgggcccttccccccgccccctcccaccgctaccagccacaacaacacgctaccccacccccactccaccactcgggtatagggggtgggtggggaggccctcctccccggccctccctggcccggccactccgaaggcagggaggaggacttggcaactggcttttctcctgtggagtcgtcacacgccatccagcagcgctaaggtggacatgggattcctccctgcgatgcgtgtctttcccacgcagagaagcccagtctcttctctggatctgggcctttgaacaactggggggcgttttctcccccccattgggacaccagtcttcggtgtgtggaatgtggtattttcccgcgtggaggtgtgctttctcacaacggggtgtgttttcccatgtgcagggtgaggtttttttttgccaccctggacacatgttggccccctcaaagaatttctgtggggatttgtaccccagaatcctgttcccccatcccttctcccacctcctcccctctccctccccctggagaccctggaagtggtgtgttcacatacagtgacccttggccaccagaccacagaggatggagcctgggaagcagcgaggaaatcacagccccctcgcccctgcctcccttgcccctaccccggcgaagcatgtttccccccgacgccccccttggcacaagtcagatgaagcacgttctgccggggaggccctcaccttccagagaggacagacacagatttcctgctgggggagggaggagtccacgcatcctgatgctgcctggaagcttattttcccgtggccaggacgcatttctctgagtggaaacaggttcttgcatgtggatgtgtgtttccccaggcagacggcccctctcttcccagcacttccctgcctcccccaggcctcaggcccagcacccagttcctcctcacatggcaggtgagcacagacttctagttggcaggagctgaggagggtgaacaaaccccgagggaggcccggcccttgctcccgagttggggggagggggtgtggcaacgtgccccccgcagaggccacgcatgtttgaccaaagccctcattgtggtccgaggacagccttttccccaggcctcagagcattgctcatccgtgccaaactgggtaggtggatttgagcggaaagactcccacaggatacagggcgagggatgtggcaggtgagggggctcccgcctgtgccccttctcctcaccatgtctcccccaccctgcctcagttctccgttccccttcatctccgtccccctctttgaagctgtccccatctcagtgtcagaccagccttctcctcagctgaccaccctcctctgacccacgccccctccttgtctgaaagaaaggagccttgaatggtggagggaggcagtggggagaaaggtctcaccggacaggttgggagaatgaggtcagcggtgctggggaacagatggagggggcagtggggacagggcttgggcagacaccagcaggaataatttgaaatgtgtgaggtgactccccggagggccttgggcttgggcatttgggaaaagaatgatgtctggaagggcttaagggacacagtggacgaggggagagtcctcatctgctggcattttgtggggtgttagtgccaaacttgaataggggctggggtgctgtcttccactgacacccaaatccagaatccctggtcttgagtccccagaactttgcctcttgactgtcccttctcttcctacctccatccatggaaaattagttattttctgatcctttcccctgcctggtctagctcctctccaaacagccatgccctccaaatgctagagacctgggccctgaaccctgtagacagatgccctcagaattggggcatgggaggggggctgggggaccccatgattcagccacggactccaatgcccagctcctctccccaaaacaatcccgacaatcccttatccctaccccaaccctttgcggctctgtacacatttttaaacctggcaaaagatgaagagaatattgtaaatataaaagtttaactgttaaaaaaaaaaaagcaaacaca

SEQ ID NO: 65125 - DNA, 706 bp, Homo sapiens
gcgacgcgatcgcttagggacacagtggacgaggggagagtccatctgctggcattttgtggggtgttagtgccaaacttgaataggggcagtggggacagggcttgggcagacaccagcaggaataatttgaaatgtgtgaggtgactccccggagggccttgggcttgggcatttgggaaaagaatgatgtctggaagggcttaagggacacagtggacgaggggagagtcctcatctgctggcattttgtggggtgttagtgccaaacttgaataggggctggggtgctgtcttccactgacacccaaatccagaatccctggtcttgagtccccagaactttgcctcttgactgtcccttctcttcctacctccatccatggaaaattagttattttctgatcctttcccctgcctggtctagctcctctccaaacagccatgccctccaaatgctagagacctgggccctgaaccctgtagacagatgccctcagaattggggcatgggaggggggctgggggaccccatgattcagccacggactccaatgcccagctcctctccccaaaacaatcccgacaatcccttatccctaccccaaccctttgcggctctgtacacatttttaaacctggcaaaagatgaagagaatattgtaaatataaaagtttaactgttaaaaaaaaaaaagcaaacaca

SEQ ID NO: 65126 - DNA, 4556 bp, Homo sapiens
  misc_feature (1840)..(1840): n is a, c, g, or t
  misc_feature (1898)..(1899): n is a, c, g, or t
  misc_feature (1966)..(1967): n is a, c, g, or t
  misc_feature (2343)..(2343): n is a, c, g, or t
  misc_feature (2414)..(2415): n is a, c, g, or t
  misc_feature (4508)..(4508): n is a, c, g, or t
atgtgtctggtggggctggcggaggctcaacgcggggaagggggtcccggcggcggcgccccgggcggccccggcctgggcctcggcagcctcggcgaggagcgcttcccggtggtgaacacggcctacgggcgagtgcgcggtgtgcggcgcgagctcaacaacgagatcctgggccccgtcgtgcagttcttgggcgtgccctacgccacgccgcccctgggcgcccgccgcttccagccgcctgaggcgcccgcctcgtggcccggcgtgcgcaacgccaccaccctgccgcccgcctgcccgcagaacctgcacggggcgctgcccgccatcatgctgcctgtgtggttcaccgacaacttggaggcggccgccacctacgtgcagaaccagagcgaggactgcctgtacctcaacctctacgtgcccaccgaggacggtccgctcacaaaaaaacgtgacgaggcgacgctcaatccgccagacacagatatccgtgaccctgggaagaagcctgtgatgctgtttctccatggcggctcctacatggaggggaccggaaacatgttcgatggctcagtcctggctgcctatggcaacgtcattgtagccacgctcaactaccgtcttggggtgctcggttttctcagcaccggggaccaggctgcaaaaggcaactatgggctcctggaccagatccaggccctgcgctggctcagtgaaaacatcgcccactttgggggcgaccccgagcgtatcaccatctttggttccggggcaggggcctcctgcgtcaaccttctgatcctctcccaccattcagaagggctgttccagaaggccatcgcccagagtggcaccgccatttccagctggtctgtcaactaccagccgctcaagtacacgcggctgctggcagccaaggtgggctgtgaccgagaggacagtgctgaaagctgtggaggctgtggagtgtctgcgccggaagccctcccgggagctggtggaccaggacgtgcagcctgcccgctaccacatcgcctttgggcccgtggtggatggcgacgtggtccccgatgaccctgagatcctcatgcagcagggagaattcctcaactacgacatgctcatcggtgtcaaccagggagagggcctcaagttcgtggaggactctgcagagagcgaggacggtgtgtctgccagcgcctttgacttcactgtctccaactttgtggacaacctgtatggctacccggaaggcaaggatgtgcttcgggagaccatcaagtttatgtacacagactgggccgaccgggacaatggcgaaatgcgccgcaaaaccctgctggcgctctttactgaccaccaatgggtggcaccagctgtggccactgccaagctgcacgccgactaccagtctcccgtctacttttacaccttctaccaccactgccaggcggagggccggcctgagtgggcagatgcggcgcacggggatgaactgccctatgtctttggcgtgcccatggtgggtgccaccgacctcttcccctgtaacttctccaagaatgacgtcatgctcagtgccgtggtcatgacctactggaccaacttcgccaagactggggaccccaaccagccggtgccgcaggataccaagttcatccacaccaagcccaatcgcttcgaggaggtggtgtggagcaaattcaacagcaaggagaagcagtatctgcacataggcctgaagccacgcgtgcgtgacaactaccgcgccaacaaggtggccttctggctggagctcgtgccccacctgcacaacctgcacacggagctnttcaccaccaccacgcgcctgcctccctacgccacgcgctggccgcctcgtccccccnntggcgccccgggcacacgccgcccccgccgcctgccaccctgcctcccgagcccgagcccgagcccnncccaagggcctatgaccgcttccccggggactcacgggactactccacggagctgagcgtcaccgtggccgtgggtgcctccctcctcttcctcaacatcctggcctttgctgccctctactacaagcgggaccggcggcaggagctgcggtgcaggcggcttagcccacctggcggctcaggctctggcgtgcctggtgggggccccctgctccccgccgcgggccgtgagctgccaccagaggaggagctggtgtcactgcagctgaagcggggtggtggcgtcggggcggaccctgccgaggctctgcgccctgcctgcccgcccgactacaccctggccctgcgccgggcaccggacgatgtgcctctcttngccccggggccctgaccctgctgcccagtggcctggggccaccgccacccccaccgcccccctcccttcanncttcgggcccttccccccgccccctcccaccgctaccagccacaacaacacgctaccccacccccactccaccactcgggtatagggggtgggtggggaggccctcctccccggccctccctggcccggccactccgaaggcagggaggaggacttggcaactggcttttctcctgtggagtcgtcacacgccatccagcagcgctaaggtggacatgggattcctccctgcgatgcgtgtctttcccacgcagagaagcccagtctcttctctggatctgggcctttgaacaactggggggcgttttctcccccccattgggacaccagtcttcggtgtgtggaatgtggtattttcccgcgtggaggtgtgctttctcacaacggggtgtgttttcccatgtgcagggtgaggtttttttttgccaccctggacacatgttggccccctcaaagaatttctgtggggatttgtaccccagaatcctgttcccccatcccttctcccacctcctcccctctccctccccctggagaccctggaagtggtgtgttcacatacagtgacccttggccaccagaccacagaggatggagcctgggaagcagcgaggaaatcacagccccctcgcccctgcctcccttgcccctaccccggcgaagcatgtttccccccgacgccccccttggcacaagtcagatgaagcacgttctgccggggaggccctcaccttccagagaggacagacacagatttcctgctgggggagggaggagtccacgcatcctgatgctgcctggaagcttattttcccgtggccaggacgcatttctctgagtggaaacaggttcttgcatgtggatgtgtgtttccccaggcagacggcccctctcttcccagcacttccctgcctcccccaggcctcaggcccagcacccagttcctcctcacatggcaggtgagcacagacttctagttggcaggagctgaggagggtgaacaaaccccgagggaggcccggcccttgctcccgagttggggggagggggtgtggcaacgtgccccccgcagaggccacgcatgtttgaccaaagccctcattgtggtccgaggacagccttttccccaggcctcagagcattgctcatccgtgccaaactgggtaggtggatttgagcggaaagactcccaaaatgtgccaagaatttcccagtcccaggcagggcaggggaaactaagggcaagcaggatacagggcgagggatgtggcaggtgagggggctcccgcctgtgccccttctcctcaccatgtctcccccaccctgcctcagttctccgttccccttcatctccgtccccctctttgaagctgtccccatctcagtgtcagaccagccttctcctcagctgaccaccctcctctgacccacgccccctccttgtctgaaagaaaggagccttgaatggtggagggaggcagtggggagaaaggtctcaccggacaggttgggagaatgaggtcagcggtgctggggaacagatggagggggcagtggggacagggcttgggcagacaccagcaggaataatttgaaatgtgtgaggtgactccccggagggccttgggcttgggcatttgggaaaagaatgatgtctggaagggcttaagggacacagtggacgaggggagagtcctcatctgctggcattttgtggggtgttagtgccaaacttgaataggggctggggtgctgtcttccactgacacccaaatccagaatccctggtcttgagtccccagaactttgcctcttgactgtcccttctcttcctacctccatccatggaaaattagttattttctgatcctttcccctgcctggtctagctcctctccaaacagccatgccctccaaatgctagagacctgggccctgaaccctgtagacagatgccctcagaattggggcatgggaggggggctgggtccctgccttacccaatgtcttcgtttgccccgctaggttccccacagagaccaatgacattttgccacttgataccataaataaagttttttgggaattggtgnaaaaataaggggggtaatgataagtattctttcgtgggggggctggga

SEQ ID NO: 65127 - DNA, 4447 bp, Homo sapiens
  misc_feature (1840)..(1840): n is a, c, g, or t
  misc_feature (1898)..(1899): n is a, c, g, or t
  misc_feature (1966)..(1967): n is a, c, g, or t
  misc_feature (2343)..(2343): n is a, c, g, or t
  misc_feature (2414)..(2415): n is a, c, g, or t
atgtgtctggtggggctggcggaggctcaacgcggggaagggggtcccggcggcggcgccccgggcggccccggcctgggcctcggcagcctcggcgaggagcgcttcccggtggtgaacacggcctacgggcgagtgcgcggtgtgcggcgcgagctcaacaacgagatcctgggccccgtcgtgcagttcttgggcgtgccctacgccacgccgcccctgggcgcccgccgcttccagccgcctgaggcgcccgcctcgtggcccggcgtgcgcaacgccaccaccctgccgcccgcctgcccgcagaacctgcacggggcgctgcccgccatcatgctgcctgtgtggttcaccgacaacttggaggcggccgccacctacgtgcagaaccagagcgaggactgcctgtacctcaacctctacgtgcccaccgaggacggtccgctcacaaaaaaacgtgacgaggcgacgctcaatccgccagacacagatatccgtgaccctgggaagaagcctgtgatgctgtttctccatggcggctcctacatggaggggaccggaaacatgttcgatggctcagtcctggctgcctatggcaacgtcattgtagccacgctcaactaccgtcttggggtgctcggttttctcagcaccggggaccaggctgcaaaaggcaactatgggctcctggaccagatccaggccctgcgctggctcagtgaaaacatcgcccactttgggggcgaccccgagcgtatcaccatctttggttccggggcaggggcctcctgcgtcaaccttctgatcctctcccaccattcagaagggctgttccagaaggccatcgcccagagtggcaccgccatttccagctggtctgtcaactaccagccgctcaagtacacgcggctgctggcagccaaggtgggctgtgaccgagaggacagtgctgaaagctgtggaggctgtggagtgtctgcgccggaagccctcccgggagctggtggaccaggacgtgcagcctgcccgctaccacatcgcctttgggcccgtggtggatggcgacgtggtccccgatgaccctgagatcctcatgcagcagggagaattcctcaactacgacatgctcatcggtgtcaaccagggagagggcctcaagttcgtggaggactctgcagagagcgaggacggtgtgtctgccagcgcctttgacttcactgtctccaactttgtggacaacctgtatggctacccggaaggcaaggatgtgcttcgggagaccatcaagtttatgtacacagactgggccgaccgggacaatggcgaaatgcgccgcaaaaccctgctggcgctctttactgaccaccaatgggtggcaccagctgtggccactgccaagctgcacgccgactaccagtctcccgtctacttttacaccttctaccaccactgccaggcggagggccggcctgagtgggcagatgcggcgcacggggatgaactgccctatgtctttggcgtgcccatggtgggtgccaccgacctcttcccctgtaacttctccaagaatgacgtcatgctcagtgccgtggtcatgacctactggaccaacttcgccaagactggggaccccaaccagccggtgccgcaggataccaagttcatccacaccaagcccaatcgcttcgaggaggtggtgtggagcaaattcaacagcaaggagaagcagtatctgcacataggcctgaagccacgcgtgcgtgacaactaccgcgccaacaaggtggccttctggctggagctcgtgccccacctgcacaacctgcacacggagctnttcaccaccaccacgcgcctgcctccctacgccacgcgctggccgcctcgtccccccnntggcgccccgggcacacgccgcccccgccgcctgccaccctgcctcccgagcccgagcccgagcccnncccaagggcctatgaccgcttccccggggactcacgggactactccacggagctgagcgtcaccgtggccgtgggtgcctccctcctcttcctcaacatcctggcctttgctgccctctactacaagcgggaccggcggcaggagctgcggtgcaggcggcttagcccacctggcggctcaggctctggcgtgcctggtgggggccccctgctccccgccgcgggccgtgagctgccaccagaggaggagctggtgtcactgcagctgaagcggggtggtggcgtcggggcggaccctgccgaggctctgcgccctgcctgcccgcccgactacaccctggccctgcgccgggcaccggacgatgtgcctctcttngccccggggccctgaccctgctgcccagtggcctggggccaccgccacccccaccgcccccctcccttcanncttcgggcccttccccccgccccctcccaccgctaccagccacaacaacacgctaccccacccccactccaccactcgggtatagggggtgggtggggaggccctcctccccggccctccctggcccggccactccgaaggcagggaggaggacttggcaactggcttttctcctgtggagtcgtcacacgccatccagcagcgctaaggtggacatgggattcctccctgcgatgcgtgtctttcccacgcagagaagcccagtctcttctctggatctgggcctttgaacaactggggggcgttttctcccccccattgggacaccagtcttcggtgtgtggaatgtggtattttcccgcgtggaggtgtgctttctcacaacggggtgtgttttcccatgtgcagggtgaggtttttttttgccaccctggacacatgttggccccctcaaagaatttctgtggggatttgtaccccagaatcctgttcccccatcccttctcccacctcctcccctctccctccccctggagaccctggaagtggtgtgttcacatacagtgacccttggccaccagaccacagaggatggagcctgggaagcagcgaggaaatcacagccccctcgcccctgcctcccttgcccctaccccggcgaagcatgtttccccccgacgccccccttggcacaagtcagatgaagcacgttctgccggggaggccctcaccttccagagaggacagacacagatttcctgctgggggagggaggagtccacgcatcctgatgctgcctggaagcttattttcccgtggccaggacgcatttctctgagtggaaacaggttcttgcatgtggatgtgtgtttccccaggcagacggcccctctcttcccagcacttccctgcctcccccaggcctcaggcccagcacccagttcctcctcacatggcaggtgagcacagacttctagttggcaggagctgaggagggtgaacaaaccccgagggaggcccggcccttgctcccgagttggggggagggggtgtggcaacgtgccccccgcagaggccacgcatgtttgaccaaagccctcattgtggtccgaggacagccttttccccaggcctcagagcattgctcatccgtgccaaactgggtaggtggatttgagcggaaagactcccaaaatgtgccaagaatttcccagtcccaggcagggcaggggaaactaagggcaagcaggatacagggcgagggatgtggcaggtgagggggctcccgcctgtgccccttctcctcaccatgtctcccccaccctgcctcagttctccgttccccttcatctccgtccccctctttgaagctgtccccatctcagtgtcagaccagccttctcctcagctgaccaccctcctctgacccacgccccctccttgtctgaaagaaaggagccttgaatggtggagggaggcagtggggagaaaggtctcaccggacaggttgggagaatgaggtcagcggtgctggggaacagatggagggggcagtggggacagggcttgggcagacaccagcaggaataatttgaaatgtgtgaggtgactccccggagggccttgggcttgggcatttgggaaaagaatgatgtctggaagggcttaagggacacagtggacgaggggagagtcctcatctgctggcattttgtggggtgttagtgccaaacttgaataggggctggggtgctgtcttccactgacacccaaatccagaatccctggtcttgagtccccagaactttgcctcttgactgtcccttctcttcctacctccatccatggaaaattagttattttctgatcctttcccctgcctggtctactcctctccccaaaacaatcccgacaatcccttatccctaccccaaccctttgcggctctgtacacatttttaaacctggcaaaagatgaagagaatattgtaaatataaaagtttaactgttaaaaaaaaaaaagcaaacaca

SEQ ID NO: 65128 - DNA, 3629 bp, Homo sapiens
  misc_feature (1840)..(1840): n is a, c, g, or t
  misc_feature (1898)..(1899): n is a, c, g, or t
  misc_feature (1966)..(1967): n is a, c, g, or t
  misc_feature (2343)..(2343): n is a, c, g, or t
  misc_feature (2414)..(2415): n is a, c, g, or t
atgtgtctggtggggctggcggaggctcaacgcggggaagggggtcccggcggcggcgccccgggcggccccggcctgggcctcggcagcctcggcgaggagcgcttcccggtggtgaacacggcctacgggcgagtgcgcggtgtgcggcgcgagctcaacaacgagatcctgggccccgtcgtgcagttcttgggcgtgccctacgccacgccgcccctgggcgcccgccgcttccagccgcctgaggcgcccgcctcgtggcccggcgtgcgcaacgccaccaccctgccgcccgcctgcccgcagaacctgcacggggcgctgcccgccatcatgctgcctgtgtggttcaccgacaacttggaggcggccgccacctacgtgcagaaccagagcgaggactgcctgtacctcaacctctacgtgcccaccgaggacggtccgctcacaaaaaaacgtgacgaggcgacgctcaatccgccagacacagatatccgtgaccctgggaagaagcctgtgatgctgtttctccatggcggctcctacatggaggggaccggaaacatgttcgatggctcagtcctggctgcctatggcaacgtcattgtagccacgctcaactaccgtcttggggtgctcggttttctcagcaccggggaccaggctgcaaaaggcaactatgggctcctggaccagatccaggccctgcgctggctcagtgaaaacatcgcccactttgggggcgaccccgagcgtatcaccatctttggttccggggcaggggcctcctgcgtcaaccttctgatcctctcccaccattcagaagggctgttccagaaggccatcgcccagagtggcaccgccatttccagctggtctgtcaactaccagccgctcaagtacacgcggctgctggcagccaaggtgggctgtgaccgagaggacagtgctgaaagctgtggaggctgtggagtgtctgcgccggaagccctcccgggagctggtggaccaggacgtgcagcctgcccgctaccacatcgcctttgggcccgtggtggatggcgacgtggtccccgatgaccctgagatcctcatgcagcagggagaattcctcaactacgacatgctcatcggtgtcaaccagggagagggcctcaagttcgtggaggactctgcagagagcgaggacggtgtgtctgccagcgcctttgacttcactgtctccaactttgtggacaacctgtatggctacccggaaggcaaggatgtgcttcgggagaccatcaagtttatgtacacagactgggccgaccgggacaatggcgaaatgcgccgcaaaaccctgctggcgctctttactgaccaccaatgggtggcaccagctgtggccactgccaagctgcacgccgactaccagtctcccgtctacttttacaccttctaccaccactgccaggcggagggccggcctgagtgggcagatgcggcgcacggggatgaactgccctatgtctttggcgtgcccatggtgggtgccaccgacctcttcccctgtaacttctccaagaatgacgtcatgctcagtgccgtggtcatgacctactggaccaacttcgccaagactggggaccccaaccagccggtgccgcaggataccaagttcatccacaccaagcccaatcgcttcgaggaggtggtgtggagcaaattcaacagcaaggagaagcagtatctgcacataggcctgaagccacgcgtgcgtgacaactaccgcgccaacaaggtggccttctggctggagctcgtgccccacctgcacaacctgcacacggagctnttcaccaccaccacgcgcctgcctccctacgccacgcgctggccgcctcgtccccccnntggcgccccgggcacacgccgcccccgccgcctgccaccctgcctcccgagcccgagcccgagcccnncccaagggcctatgaccgcttccccggggactcacgggactactccacggagctgagcgtcaccgtggccgtgggtgcctccctcctcttcctcaacatcctggcctttgctgccctctactacaagcgggaccggcggcaggagctgcggtgcaggcggcttagcccacctggcggctcaggctctggcgtgcctggtgggggccccctgctccccgccgcgggccgtgagctgccaccagaggaggagctggtgtcactgcagctgaagcggggtggtggcgtcggggcggaccctgccgaggctctgcgccctgcctgcccgcccgactacaccctggccctgcgccgggcaccggacgatgtgcctctcttngccccggggccctgaccctgctgcccagtggcctggggccaccgccacccccaccgcccccctcccttcanncttcgggcccttccccccgccccctcccaccgctaccagccacaacaacacgctaccccacccccactccaccactcgggtatagggggtgggtggggaggccctcctccccggccctccctggcccggccactccgaaggcagggaggaggacttggcaactggcttttctcctgtggagtcgtcacacgccatccagcagcgctaaggtggacatgggattcctccctgcgatgcgtgtctttcccacgcagagaagcccagtctcttctctggatctgggcctttgaacaactggggggcgttttctcccccccattgggacaccagtcttcggtgtgtggaatgtggtattttcccgcgtggaggtgtgctttctcacaacggggtgtgttttcccatgtgcagggtgaggtttttttttgccaccctggacacatgttggccccctcaaagaatttctgtggggatttgtaccccagaatcctgttcccccatcccttctcccacctcctcccctctccctccccctggagaccctggaagtggtgtgttcacatacagtgacccttggccaccagaccacagaggatggagcctgggaagcagcgaggaaatcacagccccctcgcccctgcctcccttgcccctaccccggcgaagcatgtttccccccgacgccccccttggcacaagtcagatgaagcacgttctgccggggaggccctcaccttccagagaggacagacacagatttcctgctgggggagggaggagtccacgcatcctgatgctgcctggaagcttattttcccgtggccaggacgcatttctctgagtggaaacaggttcttgcatgtggatgtgtgtttccccaggcagacggcccctctcttcccagcacttccctgcctcccccaggcctcaggcccagcacccagttcctcctcacatggcaggtgagcacagacttctagttggcaggagctgaggagggtgaacaaaccccgagggaggcccggcccttgctcccgagttggggggagggggtgttttacttcctatcccttattacgatcttttttacattttttttgattactttaaatgtcgtttgtatctgcttaatcacatttggattatttattttatatccatttggttttctcttacttccttttatttttatcttctttttacttccattcttcgac

SEQ ID NO: 65129 - DNA, 332 bp, Homo sapiens
gccaagcgttcatagcgacgtcggcttctgatcctttcccctgcctggtctagctcctctccaaacagccatgccctccaaatgctagagacctgggccctgaaccctgtagacagatgccctcagaattggggcatgggaggggggctgggggaccccatgattcagccacggactccaatgcccagctcctctccccaaaacaatcccgacaatcccttatccctaccccaaccctttgcggctctgtacacatttttaaacctggcaaaagatgaagagaatattgtaaatataaaagtttaactgttaaaaaaaaaaaagcaaacaca

SEQ ID NO: 65130 - DNA, 2025 bp, Homo sapiens
agaacgagattccgagactggattgcgatgcgccagcctggcacactctccgagatttaactgaaggcagcgccgtcaaccgctttcccctcgcccctaaccccctcaggccggcccagagccataaagctctgttctctttacccaagatgctcgcccaatccaacggtccgaggccagcgctctgatctccacagaagatttttttccttgcagggagctggccgtttaaacagaaaaacaggggtttaaaaaaaaaaaaaaaaaaaaggaaatatacccacccccaaacgtgcctccccagcgccgcagggaggcaacagacacgctggagtttaacaaacagcaatactcttcgcgctcctgaaaagcaggtctggacgctctccgtggtgctgaaacgcctcgcagccgccgctgtccgtggtatctacgaccccctcgctccaatttcccctggggctctccctccgcgcccctgttccccgcctccctttaacatctggattattttttgcaatagcgctttctggttttgtaagtgccaatttgaaacattttttgcccccataactcgtggactacaaagcacaaaggacctgaaaaatgtacagcttcaatactcttcgactctacctttcgggagccattgtattcttcagccttgctgcttctaaggaggctgaagctgctcgctccgcaaccaagcctatgtcaccctcggatttcctggataagctaatggggagaacctccggatatgatgccaggatcaggcccaattttaaaggtcccccagtgaacgtgagctgcaacattttcatcaacagctttggttccattgctgagacaaccatggactatagggtcaacatcttcctgcggcagcaatggaacgacccccgcctggcctataatgaataccctgacgactctctggacctggacccatccatgctggactccatctggaaacctgacctgttctttgccaacgagaagggggcccacttccatgagatcaccacagacaacaaattgctaaggatctcccggaatgggaatgtcctctacagcatcagaatcaccctgacactggcctgccccatggacttgaagaatttccccatggatgtccagacatgtatcatgcaactggaaagctttggatatacgatgaatgacctcatctttgagtggcaggaacagggagccgtgcaggtagcagatggactaactctgccccagtttatcttgaaggaagagaaggacttgagatactgcaccaagcactacaacacaggtaaattcacctgcattgaggcccggttccacctggagcggcagatgggttactacctgattcagatgtatattcccagcctgctcattgtcatcctctcatggatctccttctggatcaacatggatgctgcacctgctcgtgtgggcctaggcatcaccactgtgctcaccatgaccacccagagctccggctctcgagcatctctgcccaaggtgtcctatgtgaaagccattgacatttggatggcagtttgcctgctctttgtgttctcagccctattagaatatgctgccgttaactttgtgtctcggcaacataaggagctgctccgattcaggaggaagcggagacatcacaaggaggatgaagctggagaaggccgctttaacttctctgcctatgggatgggcccagcctgtctacaggccaaggatggcatctcagtcaagggcgccaacaacagtaacaccaccaacccccctcctgcaccatctaagtccccagaggagatgcgaaaactcttcatccagagggccaagaagatcgacaaaatatcccgcattggcttccccatggccttcctcattttcaacatgttctactggatcatctacaagattgtccgtagagaggacgtccacaaccagtgaagggtctgaaaggttgggggaggctgggagaggggaacgtgggaatagcacaggaatctgagagacggt

SEQ ID NO: 65131 - DNA, 1051 bp, Homo sapiens
tgtttttcttgaagtagatctttttttctttttaaaggctgataatggaggccccaaagtagccatctgttactttgttccattactctaattgcttgcctcttaggatctggctaggactaacagttttcaaaattgagtaacacacttgacaaaaaaaaaggaaccaaactcaaactcaactgttatctagaaaaaagactgtgtaaatatgtgtgagaggcaagtatactctgtttgccctcttgtaagagggataggggaggccactcagctgctagcactctgttctctcccctcatcctctccagaatgtattttagaacttgactcttctaatgactgaagaaaaggtggggtatgggaagatggcctgggactgcagggtcacttacactcacctggctaagagttgagatctggctggtgccctggagtggcacctgccactcacctaatcctaaacaatccagggtgtgggcccaggattgccctctgccttttgaaacaccctccctggttccggcttctaagaccaacagggaggctactttggtggcagggagctgactcaccctccagttggaactggtgctaaaagcctccatttaacgacagccgactgcttggccccaagtgggctgccttgtgggggggaaagttcagtggaaagtgttggaggaagcagggtggtgtgtgaatatccaagtagtgctggtgctattaagctctgacacagtcagggaggtcagttaaaatgtggtcttatggccgggcgcagtggctcgcgcctgtaatcccagcactttgggaggctgaggtgggcagatcacctgaggtcaggagttcgagaccagcctggccaacatggtgaaaccccgtctctaccaataatacaaaaattaactgggcatggtggcaggtgcctgtaatcccagctacttgggaggctgaggcaggagaatcgcttgaacctgagaggtggaggttgcagtgagccaagatcgcgctactgcactccagcctgagtgacagaacaagactccatctc

SEQ ID NO: 65132 - DNA, 668 bp, Homo sapiens
ctgtggattgttattagtctcactatagggcagattgtccaagtgagctcgactttcggccgcatatatggtaaagggagactctattgtctgtgatggagtcatgttctgtcactcaggctggagtgcagtagcacgatcttggctctctgcaacctgcacctgtcaggttcaagcgattctctgactcaccctccagttggaactggtgctaaaagcctccatttaacgacagccgactgcttggccccaagtgggctgccttgtgggggggaaagttcagtggaaagtgttggaggaagcagggtggtgtgtgaatatccaagtagtgctggtgctattaagctctgacacagtcagggaggtcagttaaaatgtggtcttatggccgggcgcagtggctcgcgcctgtaatcccagcactttgggaggctgaggtgggcagatcacctgaggtcaggagttcgagaccagcctggccaacatggtgaaaccccgtctctaccaataatacaaaaattaactgggcatggtggcaggtgcctgtaatcccagctacttgggaggctgaggcaggagaatcgcttgaacctgagaggtggaggttgcagtgagccaagatcgcgctactgcactccagcctgagtgacagaacaagactccatctc

SEQ ID NO: 65133 - DNA, 451 bp, Homo sapiens
ttagagggtaaactaagtttttttatcaacctcactccttttatccctttatcctggttttttcatttgtcgtttgcattgctcatctccgtatcgcctcacctctgtctcaaaaaaaaaaaaaaaaattatgggaggggtataaaagttgaggtgtaatgagtattcatcaagaattaataggaagcaaatttgaaatttgctcacagagaaatcacaccagtatatcaaaaacagctaatactacacaaaaaacataaatgccataaaaacacttttatttattattttataaggttacatttgttttctgggcatactcagttgaggtaaatggtaggattcatttgtatcacctggacacagctcagctgtatggcacctcggcgtgtgcagcaactacttcgtccagtgggacttctccacacggcagaagagggagaggagatga

SEQ ID NO: 65134 - DNA, 1239 bp, Homo sapiens
ctcaaactgcaccccaactctaattgacttcagaaggtgatttcctcagcctgccttatcttttctttaaaaccttagctgtatacaggaaagaaagtattatacttctgaaggataaatagtatacctagaaccattcttattttgaaaattgggaagcatccgtgtgttgcctttggagtgacagtattaaagggtttgcaaattgctgttttccttgggaggattactcaaaattaaaaagcagaaaagctgagtttggaagattgccctttcttgattccattccagctttgctaggttttttttagcacgctgtcaacacttacttgactgtccttgctcactggaattcccaaatattccctataaaaatatcagaccaccagcaagaagggtggggagtgagaaaggaaggttgctatctcacctggggagatagccgcctgtcattttcaacaaaacacctgaccttcatcatggatcctcttatgtgcaaacagataaattagcttgtgaaattatattactaagaggacaactgcacttaaaaaggatcatagaagctctttaaatagaatagtgtttgtttgtcaataataaaatatttatgggaggccgggcacagtggctcacgcctgtaatcccagcactttgggaggccgaggcaggaggatcgcttgagtccaggagtttgagaccagcctggggcaacatggcaaaaccctacccctaccaaaaatatgaaaattagccgggcatggtggcatgcagctgtagtcccagctacttgggtggctgaggcaggagaatcgcttgaacctgagaggcagaggttgcagtgagccaagatagtgccactgcacttcagcctgggcgacagagcaagactctgtctcaaaaaaaaaaaaaaaaattatgggaggggtataaaagttgaggtgtaatgagtattcatcaagaattaataggaagcaaatttgaaatttgctcacagagaaatcacaccagtatatcaaaaacagctaatactacacaaaaaacataaatgccataaaaacacttttatttattattttataaggttacatttgttttctgggcatactcagttgaggtaaatggtaggattcatttgtatcacctggacacagctcagctgtatggcacctcggcgtgtgcagcaactacttcgtccagtgggacttctccacacggcagaagagggagaggagatga

SEQ ID NO: 65135 - DNA, 2946 bp, Homo sapiens
  misc_feature (346)..(346): n is a, c, g, or t
tgcccgcagcctctcctccccttcctccccgccgccacggccccgtagtgctcggggacccaccttccacctagcacgggttcgttcccctctcccggcctggcccgggctccccggtggccgccgccccctcgccgcccccgccttctcccggggagggggtcaggtgggcgggcactattgttgtaggagccggcgccagattcctcagccgcgctcggggtgggaccggctgggtttgggggggtggggtggggggagcggtgatctgagctccgagcagctggtcttcgcggctcgctccctccttcgcgctctctcgctccctgccgccgcccgcaggtgncggggctcggtggcatctcccgggcgcggcccgcagtccttgcccctgcctccgggccgctcccgcccccggcgccgctcgctcccccgacccggactcccccatgtatgacgactcctacgtgcccgggtttgaggactcggaggcgggttcagccgactcctacaccagccgcccatctctggactcagacgtctccctggaggaggaccgggagagtgcccggcgtgaagtagagagccaggctcagcagcagctcgaaagggccaagcacaaacctgtggcatttgcggtgaggaccaatgtcagctactgtggcgtactggatgaggagtgcccagtccagggctctggagtcaactttgaggccaaagattttctgcacattaaagagaagtacagcaatgactggtggatcgggcggctagtgaaagagggcggggacatcgccttcatccccagcccccagcgcctggagagcatccggctcaaacaggagcagaaggccaggagatctgggaacccttccagcctgagtgacattggcaaccgacgctcccctccgccatctctagccaagcagaagcaaaagcaggcggaacatgttcccccatatgacgtggtgccctccatgcggcctgtggtgctggtgggaccctctctgaaaggttatgaggtcacagacatgatgcagaaggctctcttcgacttcctcaaacacagatttgatggcaggatctccatcacccgagtcacagccgacctctccctggcaaagcgatctgtgctcaacaatccgggcaagaggaccatcattgagcgctcctctgcccgctccagcattgcggaagtgcagagtgagatcgagcgcatatttgagctggccaaatccctgcagctagtagtgttggacgctgacaccatcaaccacccagcacagctggccaagacctcgctggcccccatcatcgtctttgtcaaagtgtcctcaccaaaggtactccagcgtctcattcgctcccgggggaagtcacagatgaagcacctgaccgtacagatgatggcatatgataagctggttcagtgcccaccggagtcatttgatgtgattctggatgagaaccagctggaggatgcctgtgagcacctggctgagtacctggaggtttactggcgggccacgcaccacccagcccctggccccggacttctgggtcctcccagtgccatccccggacttcagaaccagcagctgctgggggagcgtggcgaggagcactccccccttgagcgggacagcttgatgccctctgatgaggccagcgagagctcccgccaagcctggacaggatcttcacagcgtagctcccgccacctggaggaggactatgcagatgcctaccaggacctgtaccagcctcaccgccaacacacctcggggctgcctagtgctaacgggcatgacccccaagaccggcttctagcccaggactcagagcacaaccacagtgaccggaactggcagcgcaaccggccttggcccaaggatagctactgacagcctcctgctgccctaccctggcaggcacaggcgcagctggctggggggcccactccaggcagggtggcgttagactggcatcaggctggcactaggctcagcccccaaaaccccctgcccagccccagcttcagggctgcctgtggtcccaaggttctgggagaaacaggggaccccctcacctcctgggcagtgacccctactaggctcccattccaggtactagctgtgtgttctgcacccctggcaccttcctctcctcccacacaggaagctgccccactgggcagtgccctcaggccaggatccccttagcagggtccttcccaccagactcagggaagggatgccccattaaagtgacaaaagggtggggtgtgggcaccatggcatgaggaagaaacaaggtccctgagcaggcacaagtcctgacagtcaagggactgctttggcatccagggcctccagtcacctcactgccatacattagaaatgagacaatcaaagcccccccagggtggcacacccatctgtttgctggggtgtggcagccacatccaagactggagcagcaggctggccacgctcgggccagagagagctcacagctgaagctcttggagggaagggctctcctcaccctgccaggaagcttcttaacatgtgacaggaccagggaccaggagcatggtgaagccaagtggcagatgggagccaacctggatgggggtttggggaaggagggcatgtgtagcagagaacttaggggggcctccttgcctttctcattcttttgccctgcatcctgtcatttctgttcttgtccctcatacatctttggagaaccgggctccagactttgttccctgactcatagctgccgcttgttaggttagggttagatggggagagacagggcacagaggacctgtctccccggctactcttgccttatggctctagtgtgtgacctacagagcatgctccacaagcccctgcctcacctcactgtcatcactaataaacatcatgcacagtc

SEQ ID NO: 65136 - DNA, 2782 bp, Homo sapiens
  misc_feature (346)..(346): n is a, c, g, or t
tgcccgcagcctctcctccccttcctccccgccgccacggccccgtagtgctcggggacccaccttccacctagcacgggttcgttcccctctcccggcctggcccgggctccccggtggccgccgccccctcgccgcccccgccttctcccggggagggggtcaggtgggcgggcactattgttgtaggagccggcgccagattcctcagccgcgctcggggtgggaccggctgggtttgggggggtggggtggggggagcggtgatctgagctccgagcagctggtcttcgcggctcgctccctccttcgcgctctctcgctccctgccgccgcccgcaggtgncggggctcggtggcatctcccgggcgcggcccgcagtccttgcccctgcctccgggccgctcccgcccccggcgccgctcgctcccccgacccggactcccccatgtatgacgactcctacgtgcccgggtttgaggactcggaggcgggttcagccgactcctacaccagccgcccatctctggactcagacgtctccctggaggaggaccgggagagtgcccggcgtgaagtagagagccaggctcagcagcagctcgaaagggccaagcacaaacctgtggcatttgcggtgaggaccaatgtcagctactgtggcgtactggatgaggagtgcccagtccagggctctggagtcaactttgaggccaaagattttctgcacattaaagagaagtacagcaatgactggtggatcgggcggctagtgaaagagggcggggacatcgccttcatccccagcccccagcgcctggagagcatccggctcaaacaggagcagaaggccaggagatctgggaacccttccagcctgagtgacattggcaaccgacgctcccctccgccatctctagccaagcagaagcaaaagcaggcggaacatgttcccccatatgacgtggtgccctccatgcggcctgtggtgctggtgggaccctctctgaaaggttatgaggtcacagacatgatgcagaaggctctcttcgacttcctcaaacacagatttgatggcaggatctccatcacccgagtcacagccgacctctccctggcaaagcgatctgtgctcaacaatccgggcaagaggaccatcattgagcgctcctctgcccgctccagcattgcggaagtgcagagtgagatcgagcgcatatttgagctggccaaatccctgcagctagtagtgttggacgctgacaccatcaaccacccagcacagctggccaagacctcgctggcccccatcatcgtctttgtcaaagtgtcctcaccaaaggtactccagcgtctcattcgctcccgggggaagtcacagatgaagcacctgaccgtacagatgatggcatatgataagctggttcagtgcccaccggagtcatttgatgtgattctggatgagaaccagctggaggatgcctgtgagcacctggctgagtacctggaggtttactggcgggccacgcaccacccagcccctggccccggacttctgggtcctcccagtgccatccccggacttcagaaccagcagctgctgggggagcgtggcgaggagcactccccccttgagcgggacagcttgatgccctctgatgaggccagcgagagctcccgccaagcctggacaggatcttcacagcgtagctcccgccacctggaggaggactatgcagatgcctaccaggacctgtaccagcctcaccgccaacacacctcggggctgcctagtgctaacgggcatgacccccaagaccggcttctagcccaggactcagagcacaaccacagtgaccggaactggcagcgcaaccggccttggcccaaggatagctactgacagcctcctgctgccctaccctggcaggcacaggcgcagctggctggggggcccactccaggcagggtggcgttagactggcatcaggctggcactaggctcagcccccaaaaccccctgcccagccccagcttcagggctgcctgtggtcccaaggttctgggagaaacaggggaccccctcacctcctgggcagtgacccctactaggctcccattccaggtactagctgtgtgttctgcacccctggcaccttcctctcctcccacacaggaagctgccccactgggcagtgccctcaggccaggatccccttagcagggtccttcccaccagactcagggaagggatgccccattaaagtgacaaaagggtggggtgtgggcaccatggcatgaggaagaaacaaggtccctgagcaggcacaagtcctgacagtcaagggactgctttggcatccagggcctccagtcacctcactgccatacattagaaatgagacaatcaaagcccccccagggtggcacacccatctgtttgctggggtgtggcaccaacctggatgggggtttggggaaggagggcatgtgtagcagagaacttaggggggcctccttgcctttctcattcttttgccctgcatcctgtcatttctgttcttgtccctcatacatctttggagaaccgggctccagactttgttccctgactcatagctgccgcttgttaggttagggttagatggggagagacagggcacagaggacctgtctccccggctactcttgccttatggctctagtgtgtgacctacagagcatgctccacaagcccctgcctcacctcactgtcatcactaataaacatcatgcacagtc

SEQ ID NO: 65137 - DNA, 2946 bp, Homo sapiens; identical to SEQ ID NO: 65135
  misc_feature (346)..(346): n is a, c, g, or t

SEQ ID NO: 65138 - DNA, 3355 bp, Homo sapiens
  misc_feature (346)..(346): n is a, c, g, or t
tgcccgcagcctctcctccccttcctccccgccgccacggccccgtagtgctcggggacccaccttccacctagcacgggttcgttcccctctcccggcctggcccgggctccccggtggccgccgccccctcgccgcccccgccttctcccggggagggggtcaggtgggcgggcactattgttgtaggagccggcgccagattcctcagccgcgctcggggtgggaccggctgggtttgggggggtggggtggggggagcggtgatctgagctccgagcagctggtcttcgcggctcgctccctccttcgcgctctctcgctccctgccgccgcccgcaggtgncggggctcggtggcatctcccgggcgcggcccgcagtccttgcccctgcctccgggccgctcccgcccccggcgccgctcgctcccccgacccggactcccccatgtatgacgactcctacgtgcccgggtttgaggactcggaggcgggttcagccgactcctacaccagccgcccatctctggactcagacgtctccctggaggaggaccgggagagtgcccggcgtgaagtagagagccaggctcagcagcagctcgaaagggccaagcacaaacctgtggcatttgcggtgaggaccaatgtcagctactgtggcgtactggatgaggagtgcccagtccagggctctggagtcaactttgaggccaaagattttctgcacattaaagagaagtacagcaatgactggtggatcgggcggctagtgaaagagggcggggacatcgccttcatccccagcccccagcgcctggagagcatccggctcaaacaggagcagaaggccaggagatctgggaacccttccagcctgagtgacattggcaaccgacgctcccctccgccatctctaggtagcctccccccaacccacccattttgggtaggtgggtagctaagacacagggaaagaggggatcctgcccaagtgaactgtgtgggaagggtttgtggagggattggaaggggtggggagaagccagtatctcccctggggacggggataccatgcccccagggacctttcccccttcaccaactttaatcttgtatttccttttccaaaaagccaagcagaagcaaaagcaggtgagtcaaggaagggacctgggctggggggatcatggcttatggctctggggacagtgttctaggcagtcattgttggagggcagaacagagaggggagggagcccagaacctctggatctgccctgacgccaaccaggcatgagacaggcaccagggccatggtttctactgacctcatgtccattctgcaggcggaacatgttcccccatatgacgtggtgccctccatgcggcctgtggtgctggtgggaccctctctgaaaggttatgaggtcacagacatgatgcagaaggctctcttcgacttcctcaaacacagatttgatggcaggatctccatcacccgagtcacagccgacctctccctggcaaagcgatctgtgctcaacaatccgggcaagaggaccatcattgagcgctcctctgcccgctccagcattgcggaagtgcagagtgagatcgagcgcatatttgagctggccaaatccctgcagctagtagtgttggacgctgacaccatcaaccacccagcacagctggccaagacctcgctggcccccatcatcgtctttgtcaaagtgtcctcaccaaaggtactccagcgtctcattcgctcccgggggaagtcacagatgaagcacctgaccgtacagatgatggcatatgataagctggttcagtgcccaccggagtcatttgatgtgattctggatgagaaccagctggaggatgcctgtgagcacctggctgagtacctggaggtttactggcgggccacgcaccacccagcccctggccccggacttctgggtcctcccagtgccatccccggacttcagaaccagcagctgctgggggagcgtggcgaggagcactccccccttgagcgggacagcttgatgccctctgatgaggccagcgagagctcccgccaagcctggacaggatcttcacagcgtagctcccgccacctggaggaggactatgcagatgcctaccaggacctgtaccagcctcaccgccaacacacctcggggctgcctagtgctaacgggcatgacccccaagaccggcttctagcccaggactcagagcacaaccacagtgaccggaactggcagcgcaaccggccttggcccaaggatagctactgacagcctcctgctgccctaccctggcaggcacaggcgcagctggctggggggcccactccaggcagggtggcgttagactggcatcaggctggcactaggctcagcccccaaaaccccctgcccagccccagcttcagggctgcctgtggtcccaaggttctgggagaaacaggggaccccctcacctcctgggcagtgacccctactaggctcccattccaggtactagctgtgtgttctgcacccctggcaccttcctctcctcccacacaggaagctgccccactgggcagtgccctcaggccaggatccccttagcagggtccttcccaccagactcagggaagggatgccccattaaagtgacaaaagggtggggtgtgggcaccatggcatgaggaagaaacaaggtccctgagcaggcacaagtcctgacagtcaagggactgctttggcatccagggcctccagtcacctcactgccatacattagaaatgagacaatcaaagcccccccagggtggcacacccatctgtttgctggggtgtggcagccacatccaagactggagcagcaggctggccacgctcgggccagagagagctcacagctgaagctcttggagggaagggctctcctcaccctgccaggaagcttcttaacatgtgacaggaccagggaccaggagcatggtgaagccaagtggcagatgggagccaacctggatgggggtttggggaaggagggcatgtgtagcagagaacttaggggggcctccttgcctttctcattcttttgccctgcatcctgtcatttctgttcttgtccctcatacatctttggagaaccgggctccagactttgttccctgactcatagctgccgcttgttaggttagggttagatggggagagacagggcacagaggacctgtctccccggctactcttgccttatggctctagtgtgtgacctacagagcatgctccacaagcccctgcctcacctcactgtcatcactaataaacatcatgcacagtc

SEQ ID NO: 65139 - DNA, 2994 bp, Homo sapiens
ggcgggagcagcgtgcagagcagcggccgggttttgctcccgcctcggagcccctggcccgggggagggggagaggccgctagcctggtctatgtctttttctgactccagtgcaaccttcctgctgaacgagggttcagccgactcctacaccagccgcccatctctggactcagacgtctccctggaggaggaccgggagagtgcccggcgtgaagtagagagccaggctcagcagcagctcgaaagggccaagcacaaacctgtggcatttgcggtgaggaccaatgtcagctactgtggcgtactggatgaggagtgcccagtccagggctctggagtcaactttgaggccaaagattttctgcacattaaagagaagtacagcaatgactggtggatcgggcggctagtgaaagagggcggggacatcgccttcatccccagcccccagcgcctggagagcatccggctcaaacaggagcagaaggccaggagatctgggaacccttccagcctgagtgacattggcaaccgacgctcccctccgccatctctaggtagcctccccccaacccacccattttgggtaggtgggtagctaagacacagggaaagaggggatcctgcccaagtgaactgtgtgggaagggtttgtggagggattggaaggggtggggagaagccagtatctcccctggggacggggataccatgcccccagggacctttcccccttcaccaactttaatcttgtatttccttttccaaaaagccaagcagaagcaaaagcaggtgagtcaaggaagggacctgggctggggggatcatggcttatggctctggggacagtgttctaggcagtcattgttggagggcagaacagagaggggagggagcccagaacctctggatctgccctgacgccaaccaggcatgagacaggcaccagggccatggtttctactgacctcatgtccattctgcaggcggaacatgttcccccatatgacgtggtgccctccatgcggcctgtggtgctggtgggaccctctctgaaaggttatgaggtcacagacatgatgcagaaggctctcttcgacttcctcaaacacagatttgatggcaggatctccatcacccgagtcacagccgacctctccctggcaaagcgatctgtgctcaacaatccgggcaagaggaccatcattgagcgctcctctgcccgctccagcattgcggaagtgcagagtgagatcgagcgcatatttgagctggccaaatccctgcagctagtagtgttggacgctgacaccatcaaccacccagcacagctggccaagacctcgctggcccccatcatcgtctttgtcaaagtgtcctcaccaaaggtactccagcgtctcattcgctcccgggggaagtcacagatgaagcacctgaccgtacagatgatggcatatgataagctggttcagtgcccaccggagtcatttgatgtgattctggatgagaaccagctggaggatgcctgtgagcacctggctgagtacctggaggtttactggcgggccacgcaccacccagcccctggccccggacttctgggtcctcccagtgccatccccggacttcagaaccagcagctgctgggggagcgtggcgaggagcactccccccttgagcgggacagcttgatgccctctgatgaggccagcgagagctcccgccaagcctggacaggatcttcacagcgtagctcccgccacctggaggaggactatgcagatgcctaccaggacctgtaccagcctcaccgccaacacacctcggggctgcctagtgctaacgggcatgacccccaagaccggcttctagcccaggactcagagcacaaccacagtgaccggaactggcagcgcaaccggccttggcccaaggatagctactgacagcctcctgctgccctaccctggcaggcacaggcgcagctggctggggggcccactccaggcagggtggcgttagactggcatcaggctggcactaggctcagcccccaaaaccccctgcccagccccagcttcagggctgcctgtggtcccaaggttctgggagaaacaggggaccccctcacctcctgggcagtgacccctactaggctcccattccaggtactagctgtgtgttctgcacccctggcaccttcctctcctcccacacaggaagctgccccactgggcagtgccctcaggccaggatccccttagcagggtccttcccaccagactcagggaagggatgccccattaaagtgacaaaagggtggggtgtgggcaccatggcatgaggaagaaacaaggtccctgagcaggcacaagtcctgacagtcaagggactgctttggcatccagggcctccagtcacctcactgccatacattagaaatgagacaatcaaagcccccccagggtggcacacccatctgtttgctggggtgtggcagccacatccaagactggagcagcaggctggccacgctcgggccagagagagctcacagctgaagctcttggagggaagggctctcctcaccctgccaggaagcttcttaacatgtgacaggaccagggaccaggagcatggtgaagccaagtggcagatgggagccaacctggatgggggtttggggaaggagggcatgtgtagcagagaacttaggggggcctccttgcctttctcattcttttgccctgcatcctgtcatttctgttcttgtccctcatacatctttggagaaccgggctccagactttgttccctgactcatagctgccgcttgttaggttagggttagatggggagagacagggcacagaggacctgtctccccggctactcttgccttatggctctagtgtgtgacctacagagcatgctccacaagcccctgcctcacctcactgtcatcactaataaacatcatgcacagtc

SEQ ID NO: 65140 - DNA, 1814 bp, Homo sapiens
  misc_feature (346)..(346): n is a, c, g, or t
tgcccgcagcctctcctccccttcctccccgccgccacggccccgtagtgctcggggacccaccttccacctagcacgggttcgttcccctctcccggcctggcccgggctccccggtggccgccgccccctcgccgcccccgccttctcccggggagggggtcaggtgggcgggcactattgttgtaggagccggcgccagattcctcagccgcgctcggggtgggaccggctgggtttgggggggtggggtggggggagcggtgatctgagctccgagcagctggtcttcgcggctcgctccctccttcgcgctctctcgctccctgccgccgcccgcaggtgncggggctcggtggcatctcccgggcgcggcccgcagtccttgcccctgcctccgggccgctcccgcccccggcgccgctcgctcccccgacccggactcccccatgtatgacgactcctacgtgcccgggtttgaggactcggaggcgggttcagccgactcctacaccagccgcccatctctggactcagacgtctccctggaggaggaccgggagagtgcccggcgtgaagtagagagccaggctcagcagcagctcgaaagggccaagcacaaacctgtggcatttgcggtgaggaccaatgtcagctactgtggcgtactggatgaggagtgcccagtccagggctctggagtcaactttgaggccaaagattttctgcacattaaagagaagtacagcaatgactggtggatcgggcggctagtgaaagagggcggggacatcgccttcatccccagcccccagcgcctggagagcatccggctcaaacaggagcagaaggccaggagatctgggaacccttccagcctgagtgacattggcaaccgacgctcccctccgccatctctagccaagcagaagcaaaagcaggcggaacatgttcccccatatgacgtggtgccctccatgcggcctgtggtgctggtgggaccctctctgaaaggttatgaggtcacagacatgatgcagaaggctctcttcgacttcctcaaacacagatttgatggcaggatctccatcacccgagtcacagccgacctctccctggcaaagcgatctgtgctcaacaatccgggcaagaggaccatcattgagcgctcctctgcccgctccagcattgcggaagtgcagagtgagatcgagcgcatatttgagctggccaaatccctgcagctagtagtgttggacgctgacaccatcaaccacccagcacagctggccaagacctcgctggcccccatcatcgtctttgtcaaagtgtcctcaccaaaggtactccagcgtctcattcgctcccgggggaagtcacagatgaagcacctgaccgtacagatgatggcatatgataagctggttcagtgcccaccggagtcatttgatgtgattctggatgagaaccagctggaggatgcctgtgagcacctggctgagtacctggaggtttactggcgggccacgcaccacccagcccctggccccggacttctgggtcctcccagtgccatccccggacttcagaaccagcagctgctgggggagcgtggcgaggagcactccccccttgagcgggacagcttgatgccctctgatgaggccagcgagagctcccgccaagcctggacaggatcttcacagcgtagctcccgccacctggaggaggactatgcagatgcctaccaggacctgtaccagcctcaccgccaactcttaagtcttttgtaattctggctttctctaataaaa

SEQ ID NO: 65141 - DNA, 854 bp, Homo sapiens
tctagaggatccctcggcactgcttcggatgcaggtactagctgtgtgttctgcacccctggcaccttcctctcctcccacacaggaagctgccccactgggcagtgccctcaggccaggatccccttagcagggtccttcccaccagactcagggaagggatgccccattaaagtgacaaaagggtggggtgtgggcaccatggcatgaggaagaaacaaggtccctgagcaggcacaagtcctgacagtcaagggactgctttggcatccagggcctccagtcacctcactgccatacattagaaatgagacaatcaaagcccccccagggtggcacacccatctgtttgctggggtgtggcagccacatccaagactggagcagcaggctggccacgctcgggccagagagagctcacagctgaagctcttggagggaagggctctcctcaccctgccaggaagcttcttaacatgtgacaggaccagggaccaggagcatggtgaagccaagtggcagatgggagccaacctggatgggggtttggggaaggagggcatgtgtagcagagaacttaggggggcctccttgcctttctcattcttttgccctgcatcctgtcatttctgttcttgtccctcatacatctttggagaaccgggctccagactttgttccctgactcatagctgccgcttgttaggttagggttagatggggagagacagggcacagaggacctgtctccccggctactcttgccttatggctctagtgtgtgacctacagagcatgctccacaagcccctgcctcacctcactgtcatcactaataaacatcatgcacagtc

SEQ ID NO: 65142 - DNA, 467 bp, Homo sapiens
gggttacatgggtgtatgcatttgtcagaacttatcaaactgtatacttacaatctgtgcatttcactgtttgcgaattacgtatcaagatattttttaagttaaacacaggagcatggtgaagccaagtggcagatgggagccaacctggatgggggtttggggaaggagggcatgtgtagcagagaacttaggggggcctccttgcctttctcattcttttgccctgcatcctgtcatttctgttcttgtccctcatacatctttggagaaccgggctccagactttgttccctgactcatagctgccgcttgttaggttagggttagatggggagagacagggcacagaggacctgtctccccggctactcttgccttatggctctagtgtgtgacctacagagcatgctccacaagcccctgcctcacctcactgtcatcactaataaacatcatgcacagtc

SEQ ID NO: 65143 - DNA, 659 bp, Homo sapiens
ggcgggagcagcgtgcagagcagcggccgggttttgctcccgcctcggagcccctggcccgggggagggggagaggccgctagcctggtctatgtctttttctgactccagtgcaaccttcctgctgaacgagggttcagccgactcctacaccagccgcccatctctggactcagacgtctccctggaggaggaccgggagagtgcccggcgtgaagtagagagccaggctcagcagcagctcgaaagggccaagcacaaacctgtggcatttgcggtgaggaccaatgtcagctactgtggcgtactggatgaggagtgcccagtccagggctctggagtcaactttgaggccaaagattttctgcacattaaagagaacttaggggggcctccttgcctttctcattcttttgccctgcatcctgtcatttctgttcttgtccctcatacatctttggagaaccgggctccagactttgttccctgactcatagctgccgcttgttaggttagggttagatggggagagacagggcacagaggacctgtctccccggctactcttgccttatggctctagtgtgtgacctacagagcatgctccacaagcccctgcctcacctcactgtcatcactaataaacatcatgcacagtc

SEQ ID NO: 65144 - DNA, 432 bp, Homo sapiens
cacgtcgcaccgccggttcaaacaggagcagaaggcagagatctgggaacccttccagcctgagtgacattggcaaccgacgctcccctccgccatctctagccaagcagaagcaaaagcaggcggaacatgttcccccatatgacgtggtgccctccatgcggcctgtggtgctggtgggaccctctctgaaaggttatgaggtcacagacatgatgcagaaggctctcttcgacttcctcaaacacagatttgatggcaggatctccatcacccgagtcacagccgacctctccctggcaaagcgatctgtgctcaacaatccgggcaagaggaccatcattgagcgctcctctgcccgctccagcattgggaagtgcagagtgagatcgagcgcatatttgaactgcggtgcgcgtgggggatcctcta

SEQ ID NO: 65145 - DNA, 3295 bp, Homo sapiens
  misc_feature (346)..(346): n is a, c, g, or t
tgcccgcagcctctcctccccttcctccccgccgccacggccccgtagtgctcggggacccaccttccacctagcacgggttcgttcccctctcccggcctggcccgggctccccggtggccgccgccccctcgccgcccccgccttctcccggggagggggtcaggtgggcgggcactattgttgtaggagccggcgccagattcctcagccgcgctcggggtgggaccggctgggtttgggggggtggggtggggggagcggtgatctgagctccgagcagctggtcttcgcggctcgctccctccttcgcgctctctcgctccctgccgccgcccgcaggtgncggggctcggtggcatctcccgggcgcggcccgcagtccttgcccctgcctccgggccgctcccgcccccggcgccgctcgctcccccgacccggactcccccatgtatgacgactcctacgtgcccgggtttgaggactcggaggcgggttcagccgactcctacaccagccgcccatctctggactcagacgtctccctggaggaggaccgggagagtgcccggcgtgaagtagagagccaggctcagcagcagctcgaaagggccaagcacaaacctgtggcatttgcggtgaggaccaatgtcagctactgtggcgtactggatgaggagtgcccagtccagggctctggagtcaactttgaggccaaagattttctgcacattaaagagaagtacagcaatgactggtggatcgggcggctagtgaaagagggcggggacatcgccttcatccccagcccccagcgcctggagagcatccggctcaaacaggagcagaaggccaggagatctgggaacccttccagcctgagtgacattggcaaccgacgctcccctccgccatctctagccaagcagaagcaaaagcaggcggaacatgttcccccatatgacgtggtgccctccatgcggcctgtggtgctggtgggaccctctctgaaaggttatgaggtcacagacatgatgcagaaggctctcttcgacttcctcaaacacagatttgatggcaggatctccatcacccgagtcacagccgacctctccctggcaaagcgatctgtgctcaacaatccgggcaagaggaccatcattgagcgctcctctgcccgctccagcattgcggaagtgcagagtgagatcgagcgcatatttgagctggccaaatccctgcagctagtagtgttggacgctgacaccatcaaccacccagcacagctggccaagacctcgctggcccccatcatcgtctttgtcaaagtgtcctcaccaaaggtactccagcgtctcattcgctcccgggggaagtcacagatgaagcacctgaccgtacagatgatggcatatgataagctggttcagtgcccaccggagtcatttgatgtgattctggatgagaaccagctggaggatgcctgtgagcacctggctgagtacctggaggtttactggcgggccacgcaccacccagcccctggccccggacttctgggtcctcccagtgccatccccggacttcagaaccagcagctgctgggggagcgtggcgaggagcactccccccttgagcgggacagcttgatgccctctgatgaggccagcgagagctcccgccaagcctggacaggatcttcacagcgtagctcccgccacctggaggaggactatgcagatgcctaccaggacctgtaccagcctcaccgccaacacacctcggggctgcctagtgctaacgggcatgacccccaagaccggcttctagcccaggactcagagcacaaccacagtgaccggaactggcagcgcaaccggccttggcccaaggatagctactgacagcctcctgctgccctaccctggcaggcacaggcgcagctggctggggggcccactccaggcagggtggcgttagactggcatcaggctggcactaggctcagcccccaaaaccccctgcccagccccagcttcagggctgcctgtggtcccaaggttctgggagaaacaggggaccccctcacctcctgggcagtgacccctactaggctcccattccaggtactagctgtgtgttctgcacccctggcaccttcctctcctcccacacaggaagctgccccactgggcagtgccctcaggccaggatccccttagcagggtccttcccaccagactcagggaagggatgccccattaaagtgacaaaagggtggggtgtgggcaccatggcatgaggaagaaacaaggtccctgagcaggcacaagtcctgacagtcaagggactgctttggcatccagggcctccagtcacctcactgccatacattagaaatgagacaatcaaagcccccccagggtggcacacccatctgtttgctggggtgtggcagccacatccaagactggagcagcaggctggccacgctcgggccagagagagctcacagctgaagctcttggagggaagggctctcctcaccctgccaggaagcttcttaacatgtgacaggaccagggaccaggagcatggtgaagccaagtggcagatgggagccaacctggatgggggtttggggaaggagggcatgtgtagcagagaacttaggggggcctccttgcctttctcattcttttgccctgcatcctgtcatttctgttcttgtccctcatacatctttggagaaccgggctccagactttgttccctgactcatagctgccgcttgttaggttagggttagatggggagagacagggcacagaggacctgtctccccggctactcttgccttatggctctagtgtgtgacctacagagcatgctccacaagcccctgcctcacctcactgtcatcactaataaacatcatgcacagtcaaaaatacgcaaaaaaaaaaaagggggcgacaaaatacctcggagggggccaaataacgctacccgcgttctgttccacgggggcccaaaaggagggggcgatatagacgagggcagggagcgcgcttacaacgggcgcgaggacaacggcactggggcactgggaggaaaccaactgcgcggggggaatcgggaacacaccagcagaaagccgacgcaacaaaggggcgaggcaaacaccaagacgaaggtcgatacgatacagaagagagcagcgacagacaagaagaacaaacaggcacagaacagggacacagtgaaaacagtcgccgcgccacgcatcgtgcag

SEQ ID NO: 65146 - DNA, 2926 bp, Homo sapiens
  misc_feature (346)..(346): n is a, c, g, or t
tgcccgcagcctctcctccccttcctccccgccgccacggccccgtagtgctcggggacccaccttccacctagcacgggttcgttcccctctcccggcctggcccgggctccccggtggccgccgccccctcgccgcccccgccttctcccggggagggggtcaggtgggcgggcactattgttgtaggagccggcgccagattcctcagccgcgctcggggtgggaccggctgggtttgggggggtggggtggggggagcggtgatctgagctccgagcagctggtcttcgcggctcgctccctccttcgcgctctctcgctccctgccgccgcccgcaggtgncggggctcggtggcatctcccgggcgcggcccgcagtccttgcccctgcctccgggccgctcccgcccccggcgccgctcgctcccccgacccggactcccccatgtatgacgactcctacgtgcccgggtttgaggactcggaggcgggttcagccgactcctacaccagccgcccatctctggactcagacgtctccctggaggaggaccgggagagtgcccggcgtgaagtagagagccaggctcagcagcagctcgaaagggccaagcacaaacctgtggcatttgcggtgaggaccaatgtcagctactgtggcgtactggatgaggagtgcccagtccagggctctggagtcaactttgaggccaaagattttctgcacattaaagagaagtacagcaatgactggtggatcgggcggctagtgaaagagggcggggacatcgccttcatccccagcccccagcgcctggagagcatccggctcaaacaggagcagaaggccaggagatctgggaacccttccagcctgagtgacattggcaaccgacgctcccctccgccatctctaggcggaacatgttcccccatatgacgtggtgccctccatgcggcctgtggtgctggtgggaccctctctgaaaggttatgaggtcacagacatgatgcagaaggctctcttcgacttcctcaaacacagatttgatggcaggatctccatcacccgagtcacagccgacctctccctggcaaagcgatctgtgctcaacaatccgggcaagaggaccatcattgagcgctcctctgcccgctccagcattgcggaagtgcagagtgagatcgagcgcatatttgagctggccaaatccctgcagctagtagtgttggacgctgacaccatcaaccacccagcacagctggccaagacctcgctggcccccatcatcgtctttgtcaaagtgtcctcaccaaaggtactccagcgtctcattcgctcccgggggaagtcacagatgaagcacctgaccgtacagatgatggcatatgataagctggttcagtgcccaccggagtcatttgatgtgattctggatgagaaccagctggaggatgcctgtgagcacctggctgagtacctggaggtttactggcgggccacgcaccacccagcccctggccccggacttctgggtcctcccagtgccatccccggacttcagaaccagcagctgctgggggagcgtggcgaggagcactccccccttgagcgggacagcttgatgccctctgatgaggccagcgagagctcccgccaagcctggacaggatcttcacagcgtagctcccgccacctggaggaggactatgcagatgcctaccaggacctgtaccagcctcaccgccaacacacctcggggctgcctagtgctaacgggcatgacccccaagaccggcttctagcccaggactcagagcacaaccacagtgaccggaactggcagcgcaaccggccttggcccaaggatagctactgacagcctcctgctgccctaccctggcaggcacaggcgcagctggctggggggcccactccaggcagggtggcgttagactggcatcaggctggcactaggctcagcccccaaaaccccctgcccagccccagcttcagggctgcctgtggtcccaaggttctgggagaaacaggggaccccctcacctcctgggcagtgacccctactaggctcccattccaggtactagctgtgtgttctgcacccctggcaccttcctctcctcccacacaggaagctgccccactgggcagtgccctcaggccaggatccccttagcagggtccttcccaccagactcagggaagggatgccccattaaagtgacaaaagggtggggtgtgggcaccatggcatgaggaagaaacaaggtccctgagcaggcacaagtcctgacagtcaagggactgctttggcatccagggcctccagtcacctcactgccatacattagaaatgagacaatcaaagcccccccagggtggcacacccatctgtttgctggggtgtggcagccacatccaagactggagcagcaggctggccacgctcgggccagagagagctcacagctgaagctcttggagggaagggctctcctcaccctgccaggaagcttcttaacatgtgacaggaccagggaccaggagcatggtgaagccaagtggcagatgggagccaacctggatgggggtttggggaaggagggcatgtgtagcagagaacttaggggggcctccttgcctttctcattcttttgccctgcatcctgtcatttctgttcttgtccctcatacatctttggagaaccgggctccagactttgttccctgactcatagctgccgcttgttaggttagggttagatggggagagacagggcacagaggacctgtctccccggctactcttgccttatggctctagtgtgtgacctacagagcatgctccacaagcccctgcctcacctcactgtcatcactaataaacatcatgcacagtc

SEQ ID NO: 65147 - DNA, 2571 bp, Homo sapiens
atctcccaggagaagagcaccttgagggtcttactctttgacacctctccaggcccctgaaagaaggaattgaagagaaaggatgaaagagggggatacaaggaatactgcgtaactggggttcagccgactcctacaccagccgcccatctctggactcagacgtctccctggaggaggaccgggagagtgcccggcgtgaagtagagagccaggctcagcagcagctcgaaagggccaagcacaaacctgtggcatttgcggtgaggaccaatgtcagctactgtggcgtactggatgaggagtgcccagtccagggctctggagtcaactttgaggccaaagattttctgcacattaaagagaagtacagcaatgactggtggatcgggcggctagtgaaagagggcggggacatcgccttcatccccagcccccagcgcctggagagcatccggctcaaacaggagcagaaggccaggagatctgggaacccttccagcctgagtgacattggcaaccgacgctcccctccgccatctctagccaagcagaagcaaaagcaggcggaacatgttcccccatatgacgtggtgccctccatgcggcctgtggtgctggtgggaccctctctgaaaggttatgaggtcacagacatgatgcagaaggctctcttcgacttcctcaaacacagatttgatggcaggatctccatcacccgagtcacagccgacctctccctggcaaagcgatctgtgctcaacaatccgggcaagaggaccatcattgagcgctcctctgcccgctccagcattgcggaagtgcagagtgagatcgagcgcatatttgagctggccaaatccctgcagctagtagtgttggacgctgacaccatcaaccacccagcacagctggccaagacctcgctggcccccatcatcgtctttgtcaaagtgtcctcaccaaaggtactccagcgtctcattcgctcccgggggaagtcacagatgaagcacctgaccgtacagatgatggcatatgataagctggttcagtgcccaccggagtcatttgatgtgattctggatgagaaccagctggaggatgcctgtgagcacctggctgagtacctggaggtttactggcgggccacgcaccacccagcccctggccccggacttctgggtcctcccagtgccatccccggacttcagaaccagcagctgctgggggagcgtggcgaggagcactccccccttgagcgggacagcttgatgccctctgatgaggccagcgagagctcccgccaagcctggacaggatcttcacagcgtagctcccgccacctggaggaggactatgcagatgcctaccaggacctgtaccagcctcaccgccaacacacctcggggctgcctagtgctaacgggcatgacccccaagaccggcttctagcccaggactcagagcacaaccacagtgaccggaactggcagcgcaaccggccttggcccaaggatagctactgacagcctcctgctgccctaccctggcaggcacaggcgcagctggctggggggcccactccaggcagggtggcgttagactggcatcaggctggcactaggctcagcccccaaaaccccctgcccagccccagcttcagggctgcctgtggtcccaaggttctgggagaaacaggggaccccctcacctcctgggcagtgacccctactaggctcccattccaggtactagctgtgtgttctgcacccctggcaccttcctctcctcccacacaggaagctgccccactgggcagtgccctcaggccaggatccccttagcagggtccttcccaccagactcagggaagggatgccccattaaagtgacaaaagggtggggtgtgggcaccatggcatgaggaagaaacaaggtccctgagcaggcacaagtcctgacagtcaagggactgctttggcatccagggcctccagtcacctcactgccatacattagaaatgagacaatcaaagcccccccagggtggcacacccatctgtttgctggggtgtggcagccacatccaagactggagcagcaggctggccacgctcgggccagagagagctcacagctgaagctcttggagggaagggctctcctcaccctgccaggaagcttcttaacatgtgacaggaccagggaccaggagcatggtgaagccaagtggcagatgggagccaacctggatgggggtttggggaaggagggcatgtgtagcagagaacttaggggggcctccttgcctttctcattcttttgccctgcatcctgtcatttctgttcttgtccctcatacatctttggagaaccgggctccagactttgttccctgactcatagctgccgcttgttaggttagggttagatggggagagacagggcacagaggacctgtctccccggctactcttgccttatggctctagtgtgtgacctacagagcatgctccacaagcccctgcctcacctcactgtcatcactaataaacatcatgcacagtc

SEQ ID NO: 65148 - DNA, 3048 bp, Homo sapiens
  misc_feature (346)..(346): n is a, c, g, or t
tgcccgcagcctctcctccccttcctccccgccgccacggccccgtagtgctcggggacccaccttccacctagcacgggttcgttcccctctcccggcctggcccgggctccccggtggccgccgccccctcgccgcccccgccttctcccggggagggggtcaggtgggcgggcactattgttgtaggagccggcgccagattcctcagccgcgctcggggtgggaccggctgggtttgggggggtggggtggggggagcggtgatctgagctccgagcagctggtcttcgcggctcgctccctccttcgcgctctctcgctccctgccgccgcccgcaggtgncggggctcggtggcatctcccgggcgcggcccgcagtccttgcccctgcctccgggccgctcccgcccccggcgccgctcgctcccccgacccggactcccccatgtatgacgactcctacgtgcccgggtttgaggactcggaggcgggttcagccgactcctacaccagccgcccatctctggactcagacgtctccctggaggaggaccgggagagtgcccggcgtgaagtagagagccaggctcagcagcagctcgaaagggccaagcacaaacctgtggcatttgcggtgaggaccaatgtcagctactgtggcgtactggatgaggagtgcccagtccagggctctggagtcaactttgaggccaaagattttctgcacattaaagagaagtacagcaatgactggtggatcgggcggctagtgaaagagggcggggacatcgccttcatccccagcccccagcgcctggagagcatccggctcaaacaggagcagaaggccaggagatctgggaacccttccagcctgagtgacattggcaaccgacgctcccctccgccatctctaggcggaacatgttcccccatatgacgtggtgccctccatgcggcctgtggtgctggtgggaccctctctgaaaggttatgaggtcacagacatgatgcagaaggctctcttcgacttcctcaaacacagatttgatggcaggatctccatcacccgagtcacagccgacctctccctggcaaagcgatctgtgctcaacaatccgggcaagaggaccatcattgagcgctcctctgcccgctccagcattggcttcgatgaatgcccttttcctccaattccttcctgtccaccattcgggagccctcaaagcctgctggagtgagcagtgggcagagctcctggtgagcactgctgctgcctccctccatagcggaagtgcagagtgagatcgagcgcatatttgagctggccaaatccctgcagctagtagtgttggacgctgacaccatcaaccacccagcacagctggccaagacctcgctggcccccatcatcgtctttgtcaaagtgtcctcaccaaaggtactccagcgtctcattcgctcccgggggaagtcacagatgaagcacctgaccgtacagatgatggcatatgataagctggttcagtgcccaccggagtcatttgatgtgattctggatgagaaccagctggaggatgcctgtgagcacctggctgagtacctggaggtttactggcgggccacgcaccacccagcccctggccccggacttctgggtcctcccagtgccatccccggacttcagaaccagcagctgctgggggagcgtggcgaggagcactccccccttgagcgggacagcttgatgccctctgatgaggccagcgagagctcccgccaagcctggacaggatcttcacagcgtagctcccgccacctggaggaggactatgcagatgcctaccaggacctgtaccagcctcaccgccaacacacctcggggctgcctagtgctaacgggcatgacccccaagaccggcttctagcccaggactcagagcacaaccacagtgaccggaactggcagcgcaaccggccttggcccaaggatagctactgacagcctcctgctgccctaccctggcaggcacaggcgcagctggctggggggcccactccaggcagggtggcgttagactggcatcaggctggcactaggctcagcccccaaaaccccctgcccagccccagcttcagggctgcctgtggtcccaaggttctgggagaaacaggggaccccctcacctcctgggcagtgacccctactaggctcccattccaggtactagctgtgtgttctgcacccctggcaccttcctctcctcccacacaggaagctgccccactgggcagtgccctcaggccaggatccccttagcagggtccttcccaccagactcagggaagggatgccccattaaagtgacaaaagggtggggtgtgggcaccatggcatgaggaagaaacaaggtccctgagcaggcacaagtcctgacagtcaagggactgctttggcatccagggcctccagtcacctcactgccatacattagaaatgagacaatcaaagcccccccagggtggcacacccatctgtttgctggggtgtggcagccacatccaagactggagcagcaggctggccacgctcgggccagagagagctcacagctgaagctcttggagggaagggctctcctcaccctgccaggaagcttcttaacatgtgacaggaccagggaccaggagcatggtgaagccaagtggcagatgggagccaacctggatgggggtttggggaaggagggcatgtgtagcagagaacttaggggggcctccttgcctttctcattcttttgccctgcatcctgtcatttctgttcttgtccctcatacatctttggagaaccgggctccagactttgttccctgactcatagctgccgcttgttaggttagggttagatggggagagacagggcacagaggacctgtctccccggctactcttgccttatggctctagtgtgtgacctacagagcatgctccacaagcccctgcctcacctcactgtcatcactaataaacatcatgcacagtc

SEQ ID NO: 65149 - DNA, 234 bp, Homo sapiens
tccccttccccagtgctgtgtggacgatggactgaagaggagaaggctgggagcaagggaccagtaagctgttgcagcagtgcaggtgagatatgaggcctcaactctgcagtgttgacaaccatagagagcagagagcagaattcatcaatatttatcagcaccaatttttttttttaagacagagtctcacttcttcacccaggctggagtacaatggcgcaatcccagctc

SEQ ID NO: 65150 - DNA, 301 bp, Homo sapiens
gtgtcacatatttttaaatgaccagctctttggtggtagagtgtcacatagttttaaatgaccagctctttggtggcagagtgtcacatatttttaaatgaccagatctttggtggcagagtgtcacatatttttaaatgaccagatctttggtggcagagtgtcacatatttttaaatgaccagctctttggtggcggagtgtcacgtatttttaaatgaccagatctttggtggtagagtgtcacatatttttaaatgaccaggtcttgtgtgaactcagagtaagagcctactcatca

SEQ ID NO: 65151 - DNA, 473 bp, Homo sapiens
tgcctttatagtggaagaaatttttatattgtgagccacataagagaattaaggaagtactggaagaagaacgtcatattaagagagatgaatgccacattaaaaatccagctgcagtggccgtggaagggatttggagcattaaaaggaatctgcctgtgggaggcttgaagccaggactgccgagcagaaacagtttattgccacaagccaagtactactccaggcacggaggactcagaagataagatgaattagattttccattaagaaggaacctctttctgctgatgtctgaagaacggagaagaaactcaagcttgtttcaggatttaagatgtgtgcaaaaaaatgatagcctgtaattactattattggtattaatacctatctataaattaatccaaagtaatgaaagactattggtaatgttcagtaagtacctgaaaacaataaaggaaaatatacttatt

SEQ ID NO: 65152 - DNA, 622 bp, Homo sapiens
aaactccactcccagaatactgggtccaaatacagaatactaggtccaaaaggcctccatgcggctggccttcctgctgggaaggagtctgtctgtgtgtctgtctgtgtttaggaagggaggttgaggcagggcagggtcagagagcactgccgtggggaggagggtatccatttcctggtgatatccttccattcaaagcgggtatcccagaacaggtggccagggacgggtgagctggggagggccaggagagagatctctgcttgtgtgagaaaggatgccgagctggcctagaaccgctgctagactatctccaaagtttctgcagcaccctgaaggtgaaccagtgccttcagaccttccctgacacctaagccttggtcctaggaaagaaaaaaaaaaatccaaagctaacaaaatacttgagcgaatggaactgtcagcgtcaccctgtcagatccctcctgtgcgcctgcagcggaatccccacgaagtccaggtatttgagtggtggctcttttctttatctaaactctttaatgatggagagcttcccacatagaaagaactcctgtgtacccaccactagtgccagcaatcgccagatcacggccaatct

SEQ ID NO: 65153 - DNA, 416 bp, Homo sapiens
accatgtccggcctggaatccttttaaatctcccccaggtgattgtgaagaaccagggcctctctgcctctgtcactgcatttcaatatttctttaccttgatccccaatatagatgagaggggacatttgttttatcacccctaagttactacacccccttagtagctgaagcatatgaattgttgacctaagtttttcaagaagacaaaatttctctgtctggaccaattcttgaaagcctcccccttttttcagacaagcttatggcatgcagcaccccaaataaaataatctgaactaatacaggactacacattttcaacccagggcagctctggattgggtacctgaatttggcttgggctagtgatttctgactgagaaaagtattcatccagcctctgaggaaatata

SEQ ID NO: 65154 - DNA, 277 bp, Homo sapiens
caggggctgcttttcaaattacttactgtcaaaggaattgccttgttccagatccctgaggttctgcactgtgattcacctgttagggttgcttaagacttcacacagcatctttatcttccagggacactagcagcattggatctgctgagacacaaggccggacagcaagacagtttgcatcccagcagggacttgctgcagagcactgtcttgctagggatccactcaaattggtagctttccataccacccaataaatgtgttgaagctgtat

SEQ ID NO: 65155 - DNA, 1270 bp, Homo sapiens
ggggccccgcgccggcccgcgccctgcccagtgcggcctccttccacccgccgctgcctggcccgcgccgtccggccgagctgcccggcgggctggtccccgcgcccgagccgcccggccgggaccccgaacaaggccgagatgacttccaaggaggacggcaaggcggcgccgggggaggagcggcgccgcagcccgctggaccacctgcctccgcctgccaactccaacaagccagacgccgttcagcatcgaggacatcctcaacaagccgtctgtgcggagaagttactcgctgcgtggggcggcgcacctgctggccgccgcggacaagcacgcgcagggcggcttgccctggcgggccgcgcgctgctctcgaagacctcgccgctgtgcgcgctggaggagctcgccagcaagacgtttaaggggctggaggtcagcgttctgcaggcagccgaaggccgcgacggtatgaccatctttgggcagcggcagacccctaagaagcggcgaaagtcgcgcacggccttcaccaaccaccagatctatgaattggaaaagcgctttctataccagaagtacctgtcccccgccgatcgcgaccaaatcgcgcagcagctgggcctcaccaacgcgcaagtcatcacctggttccagaatcggcgcgctaagctcaagcgggaactggaggagatgaaggccgacgtggagtcccccaagaaactgggccccagcgggcagatggacatcgtggcgctggccgaactcgagcagaactcggaggccacagccggcggtggcggcggctgcggcagggccaagtcgaggcccggctctccggtcctccccccaggcgccccgaaggcccccgggcgctgcgccctgcagctctcgcctgcctctccgctcacggaccagccggccagcagccaggactgctcggaggacgaggaagacgaagagatcgacgtggacgattgagcggcgccccgggtcttccgccgccctgggctcctagcgctcgaaagcccaacgcctcccggaccggaccgccgaggggagctgggacctcctctgccactcccgcctcctcccctgtccccggactcggctcctggcagccgcctcttccctctcgaagcaataaacccaggctggccggccgggccggccgccaccagcggcctccgccgccccggaagccctcgccgagcaattctgtatggcttctatataaatatttaaacctatatagcgggttctcccc

SEQ ID NO: 65156 - DNA, 381 bp, Homo sapiens
ccaccagccactcagtctttgaacccagcaatctctctcagcctcgatggctttgcactttctgttctccctggatacaatgttcttgcattctgactctttgcatagttggtcctcccaactttcgaaacaggcttaaatatcagttccttatagaagtatttcctgacatcatagcacttaccacaggctgcaattatgcatttgttcatttagtgtgtgtgtgtgtgtgtgtgtgttttaactgtgtggcttacatgggaatgcaagcttcgtaggattagggacgtgtccatgtcctccttgttgcatgcccactgccaagaatagtgtctggtgcatgataaatacttgtttcatgaattaattaatatactattt

SEQ ID NO: 65157 - DNA, 378 bp, Homo sapiens
tccaaataggcccctcctacttcttggcaatcatcttattaattgcatttttctgttgtctcatattccttcttcctctttaactcttaatagatgccatttacttctatataagtgaaaaaggacaacagggtacaagcttgcactccagcctgggcgacagagtgagactctgtctcaaaaaaaaaaaaaaagactccagacagcttgttagctctttcttccacatgaggttacagcaaaaagacagatgtctagaagctggcccttaccagatactgaatctgccagtgccttattttggacttctcagcctcctgggctgggtgaggtggttcactaccagccttggcaccatagtgagactcccatctctac

SEQ ID NO: 65158 - DNA, 477 bp, Homo sapiens
gtgttatacttcgataaaattgacatttaaaacatttataaggaagcaaagtgccttgtgagctcagaggatatagcaaggaatggtttttgacttgagcctcagtgaccagttgccttctgtcctgccttggtgtctgactgaccactggctttcttctccagaggccaagtgtatcatctgatgatgccagctgccctcacatggctccaaaaattccttctttctttccttccttccttccttccttcctctctccctctcttttttttttttttcagagttttccttttgttgcctaggctagagtgcaggggcgcgatctcgactcaatgcaacctccgcctcccgggggtttaactgattctcctgcctcagcctcccgagtagctggaattacatgcatctgccaccacacctggctgattttttgtatttttagtagagatgggtttcaccatgttggccaggctggtc

SEQ ID NO: 65159 - DNA, 450 bp, Homo sapiens
tgcgttcgaggctggcgtcctgggggcccagggcgaccttggcccctggaatcgcagctggcagagccttctaacgggcctcggggcgccggcctgagccccgctccacgtcctgggtccccagactctttacccgcgggcagtctatgaccccgacccccttcaggcctctggtggaggcagctggtggcaagggggtcggggctgtctagaagctgctttggcggagcaagtaccttgagtggagtcggagggtcgcgtccgcaagatgtcctttgcaggccgttgcgtcctgagagccaccgagtctggatctctggatctctggatgcattttgcacagatgtcacctccctgatgccctaacccacctttcccgagtgattacatttcacaccccctcccccaaaaaagatagttaaaatataggcccagtctcattctgagcag

SEQ ID NO: 65160 - DNA, 329 bp, Homo sapiens
tgaaacggggtctcactatattgcctaggttggtcttaaactcctgggctcaagcgatcctcctgttttggcctgccaaagtgctaggattacagatgtaagccaccgtgcctggcctcaatctttatatacattttgattttaactcttcggttaatcctgcaagggaggtaaggttatctccacattaacagatggggcagctgaggcccagtaaaggaaagtaacttgcccaaggtcacccatgaatacagagcagaactagggtttgagctcaggtccgtctgaagctccctctctccaccagaataacaaggaatagccctctg

SEQ ID NO: 65161 - DNA, 857 bp, Homo sapiens
aagatctcttttgaaatatactgttagtacaatcgatggttggcatcacaaattgaagattacggcagatgaaatacccatacgccttaagtgttataaattccaaccacaaagagtttctgaaaggaattgctactactaacatactctgcaagaaatcctgacttcaggattattattgttgcagatgtaattaaaatgaggttataataaattagagtaagcccttaactcaaaacaattggtgccattataagaggatgaccatgtgaagacacagacacacagaaaaaacaccatgtggtgactgaagcagagattggtgtaatgcaactacaagtcaacaagcaactatgattgacggccaccaccaaggctaggaagaggagagaaaaatatatatatctcaagaaagaaaaaatccagcacctacggcataatgtaaggagagaatgctccagcaaaatctaacttgcacaataaatctgttctgtcagatccttgaccggtatgtttatgttgacctctttccgtttgaagagagaggaaagaaactggtgttgatcaaaggttacagcagaataaaaaatatactgggacacgaaattgtgacatgtatttcccccaccagtcaggactctatgttcaatatttttatttcattatgcttacaaaagcaaatgaatgtccctttgtatttccttaagaatgaaaagatgaatgtttctttctttgcaagttccatggaagctaagaaccttaatactataaacattttaatgcttgataatggttctgtcttcaaaatgcaaaacgttttattctgacaaataaaaactctaaaaaaatgaatgcat

SEQ ID NO: 65162 - DNA, 824 bp, Homo sapiens
caagaatgaagtgtcaatgaaccatgatatactggagccaaagcagaatttatttcatccggataaatctaagggctgtcgtctgtatcttaattgtgagtcaagtgaaggccactggctctcttcagactcacagttaacagtattgttgcagatgtaattaaaatgaggttataataaattagagtaagcccttaactcaaaacaattggtgccattataagaggatgaccatgtgaagacacagacacacagaaaaaacaccatgtggtgactgaagcagagattggtgtaatgcaactacaagtcaacaagcaactatgattgacggccaccaccaaggctaggaagaggagagaaaaatatatatatctcaagaaagaaaaaatccagcacctacggcataatgtaaggagagaatgctccagcaaaatctaacttgcacaataaatctgttctgtcagatccttgaccggtatgtttatgttgacctctttccgtttgaagagagaggaaagaaactggtgttgatcaaaggttacagcagaataaaaaatatactgggacacgaaattgtgacatgtatttcccccaccagtcaggactctatgttcaatatttttatttcattatgcttacaaaagcaaatgaatgtccctttgtatttccttaagaatgaaaagatgaatgtttctttctttgcaagttccatggaagctaagaaccttaatactataaacattttaatgcttgataatggttctgtcttcaaaatgcaaaacgttttattctgacaaataaaaactctaaaaaaatgaatgcat

SEQ ID NO: 65163 - DNA, 426 bp, Homo sapiens
gacacagacacacagaaaaaacaccatgtggtgactgaagcagagattggtgtaatgcaactacaagtcaacaagcaactatgattgacggccaccaccaaggctaggaagaggcaaggaaagattctactcaaatactcaaattcttggaggaaacctggccctgctaatgcctgtattccagacttctagcctccagaagtagaacaatcaatttctgttgttgttttaagccacccagtttgtggtactttgttatagctgtcctagggagctgatccagcactcagctgggctcaaagctcaatcagaggagaagggacagttctgaaccagaatatacttggtcagctctcccacagtctcctggtcattggacgatgttagcccttgatttcagccaaggacctccattaattcaagtta

SEQ ID NO: 65164 - DNA, 529 bp, Homo sapiens
  misc_feature (18)..(19): n is a, c, g, or t
  misc_feature (21)..(22): n is a, c, g, or t
  misc_feature (55)..(55): n is a, c, g, or t
ccctcttatccactattnntnnggtttttaaaaaaatgagggggaattttttttntttgagagaaaaatatatatatctcaagaaagaaaaaatccagcacctacggcataatgtaaggagagaatgctccagcaaaatctaacttgcacaataaatctgttctgtcagatccttgaccggtatgtttatgttgacctctttccgtttgaagagagaggaaagaaactggtgttgatcaaaggttacagcagaataaaaaatatactgggacacgaaattgtgacatgtatttcccccaccagtcaggactctatgttcaatatttttatttcattatgcttacaaaagcaaatgaatgtccctttgtatttccttaagaatgaaaagatgaatgtttctttctttgcaagttccatggaagctaagaaccttaatactataaacattttaatgcttgataatggttctgtcttcaaaatgcaaaacgttttattctgacaaataaaaactctaaaaaaatgaatgcat

SEQ ID NO: 65165 - DNA, 450 bp, Homo sapiens
ttgttatatattattacagaatattttatttcagctggtctttgtaatttgaagagaatataggagaaacaaaatagtcagatctaccatagatgggacatttcaatacaccaaaatggcttattcaactcttgcagatggaaagttccatggacctttacacaaggagtttttctttggcctgaacctgtctttcctcatggtcacttataaattaaatatgaatacaaatataataggacttcgcttcattttgaagtgtcttgaagctaattatgattttatattttagaatcattgggtatctaccccatgcaggcttagttgaagtgatagccttttggcttttctgtgtatgatttgtttttatgtaaattatgtagactagataaatgtttatttatttttaaatgtcagttcatagggagtttctgatagggctatggataa

SEQ ID NO: 65166 - DNA, 193 bp, Homo sapiens
ccagcaccgaaaacacacatgtgcaagcatgcacacacagtaaacagccagaatgttgagtttggggtacctgtggaaaagctcagtaggagttgaaatatgggctcagcatttaggagcatgagacatgagggaataggtaatttcgctgagacacagattggaagtggacttgctgtgagaacagatttat

SEQ ID NO: 65167 - DNA, 403 bp, Homo sapiens
gctcagaacacttacattagccagtccaaaaaaaaaatctaacctaaagcctatttttaaataaagtgttgaatatcacatgtaaattattaaatactgaatgtgaaaaacggaatgggtatatgggtaataaaagcattgtttctactgaatgtttatcacttttgtaccatgataaagctgtaaagttgtaccattgtaaatctgggaccatctgtgttacattcaagagaaaagctcagtcgaactaataaataaatcaaaatttcttctgattatttaggtgttttttcctgttagataattaagacatccaactgttgcttgctgcttcaccacacagaccatacacagatacaaatacacactccatgaatgagcatatgtgcttgtttaaagagac

SEQ ID NO: 65168 - DNA, 522 bp, Homo sapiens
tttttttttttaaaaaaaggacatcactgaacatggatcaatctgacaaaggttcaatctacagagggagggagtgagctatccaaccaggaacacagttgaaggaatgaggtggaactgtacaatccctgcagtcctaaaacatagctctaggaaactgccactggctatgtccaaggtcttggagacttgttttctaaaaaatgaatgcattttcgtgggttgaaaatttctttttgcataatcaggtaatgctttttcattttttataggcaatgtctttctctgttgcccaggctggaacacagtggcgtgatctcagctcaccgcaacctccacctccagggttcaagcaattctcatgcctaagcctcccaagtagctgggactacaggtatgcaccaccataatcagccgatttttgtatttttattataatagagatggggttccctaggctggtctcggtcgacgccgccgcgaatttaatagtagtagtcgaaccgggaattccgggacggt

SEQ ID NO: 65169 - DNA, 562 bp, Homo sapiens
agaagtgctgagacactggagtctaccctgaaagataaagcttcacctgaggagatctgcaaattagtagctttttgccagaaggcattctccagtctatgcagctcaagtaatagaaggctacagccttggtggaatgacttgagggaacaggggactgagtctaggaccatcagatcagccaataagtatgtggaaaatagcagaggacagtgaccacaaaatctgcatatgaaattcaccaaaaacctttaccacctctatttgtggcataagggagacctcagaggatcctgtaaaagcatagaagctagaaactgaaaagaattaagcagaaatttcagctgatatccactgcaggagaaacaggattgggaatttgtgtccagccatgatatccacttgctagaaaatatgtttgaagggacataaaagaatacagaatctctacaaaatatcattcagaacacccggtattcaatcaaaagtcactaaagaaacagaaaatggtgacacttatttaaaaaacaaaataaaaaaacagagaatggtcaataggaac

SEQ ID NO: 65170 - DNA, 139 bp, Homo sapiens
gaaggggggctgcacgttacagatgagggagcaacacttgatggccttctcgtcccgaggcaccagccagcccgaccccgcaactgccgcggcgggcgggcgcggaactgcggggaagccgaagagtccaacctgctca

SEQ ID NO: 65171 - DNA, 451 bp, Homo sapiens
atgaggaggttggactcatctctctgatttctcatggtgctaaaaggtcaacaaggctgggtgtggttgctaagtttgtaatcccagcactttgggaggctgaggtgggaggatcggttgagcccaagagtttgagtctgtagtgagctgtgattgttctgctgcactccagcctgggcaacagagtgataccctgtctcaaaaaaagtgttaggtttgtgggtagccttcttttgattgcagagtgctttcttttctccatactgacgtctgttctctacacgtggtagacccatctcctcagtggtgtatgaagtgagttgagagattgaaaagcccagactggagtttttgtcattctaagatctttagggccatatgggacctgaatttccttctttctcttttttttttttttctgagatgaagtcttgcactgttgcccgggctg

SEQ ID NO: 65172 - DNA, 445 bp, Homo sapiens
ggttcaaaaggaccaaaaagcagatgggtcacttgtaagcccctaacatacagtgtaaaggccttgcctcaaatacccctgagcatccccactccaaacattaatatctaacatttattgagtgccagaaaagttccggacattatcctaagcccttttacttgggttatttcattttatctttaaaactccactgtcacagtcatgcattgcttaacgacagtaatatgttctgagaaatgcattgtcaggtgatttcgtcattgtgcaaacaccatagagtgcacttgcacaaacccagagggtatagccttctacccacctaggttatgatctattgttcctaggctacaaacctgtacaacgtgttactgtactgaatactgtaggcaattgtaacactatggtatttgtgtatctaaatatagaaaaagtatagtaaaaa

SEQ ID NO: 65173 - DNA, 2407 bp, Homo sapiens
cttctccacgcccctgcgctctgagtcctggctctggcgctgagagagagacgccctggaaggtctgtatcagcgtctgtcgcgctgggacccacactggcttttaaggaggacacccggacacctggaagctgggaaatggactcagtggcctttgaagatgtggctgtgaacttcacacaagaggagtgggctttgctgggtccatcacagaagagtctctacagaaatgtcatgcaggaaaccattaggaacctggactgtatagaaatgaaatgggaggaccagaacattggagatcagtgccaaaatgccaagagaaatctaagaagtcatacatgtgaaattaaagatgacagtcaatgtggagaaacttttggccagattccagatagtattgtgaacaagaacactcctcgagtaaatccatgtgacagtggtgagtgtggagaagtcgtcttgggtcattcgtctcttaattgcaacatcagagttgacactggacacaaatcatgtgagcatcaggaatatggagagaagccatatacacataaacaacgtgggaaagccatcagtcatcagcactccttccagacacatgaaaggccccccaccggaaagaaacccttcgattgtaaagaatgtgcaaaaacctttagttctcttggaaacctccgaagacacatggcggcacaccatggagatggaccttataaatgtaagttgtgtgggaaagcctttgtttggcccagtttatttcatttgcacgaaagaacacacactggagagaaaccgtatgaatgtaagcagtgttctaaagcctttcctttttacagttcctatctaagacatgaaagaatccacacgggagagaaagcgtatgaatgtaagcagtgttccaaagcctttcctgattacagtacctatctaagacatgagagaactcacaccggagagaaaccctataaatgtacacaatgtgggaaagccttcagctgttactattacactcgactacatgaaaggactcacacgggagaacaaccctatgcatgtaagcaatgtgggaaaacgttttatcatcacacaagctttcgaagacacatgataaggcacactggagacggaccacataaatgtaagatatgtgggaaaggctttgattgtcctagttcagttcgaaatcatgaaactactcacactggagagaaaccctatgaatgtaagcagtgtgggaaagtgttatctcatagctcgagctttcgaagtcacatgataacacacacaggagatggaccccagaaatgcaagatatgtgggaaagcctttggttgtcccagtttatttcaaagacatgaaaggactcacactggagagaaaccctatcaatgtaaacaatgtggtaaagccttcagtcttgccggttcccttcgaagacatgaagcaactcacactggagtgaaaccctataaatgtcagtgtgggaaagcctttagtgatctctcttcctttcaaaatcatgagacaactcacactggagagaagccatatgagtgtaaggaatgtgggaaagcattcagttgtttcaaatacctttctcaacataaaaggacccacacagtagaaaaaccttatgagtgtaaaacatgtagaaaagccttcagtcatttcagtaacttaaaagtccatgaaaggattcactctggagagaagccatatgaatgtaaggaatgtggaaaagcattctcttggctcacttgccttctacgacatgaaagaattcacactggagagaaaccctatgaatgtctacaatgtggtaaagccttcactcgttcccgtttccttcgaggacatgaaaaaactcacactggagagaagctgtatgaatgtaaggaatgtgggaaagcattgagttctctccgttccttgcatagacataaaaggactcactggaaagatactctctaaatgtatggaatgtgggaaaacattcagtactttaatttcagaaacttgaaagaactcactttggagatagaccctatgaatgtaaacatgggataaagccttaagtagtttcaatttttttaaatacagttatcccccaatatattgcaggggattggttccagcaccctctaaatccacagatgccaagtcctttgttatatggcatatttgcatgtaacctatgcatatcctccagtatactgtgtaaatcatctctagatgacttttaatacctcatgcattgtaaaagctatgtaaatagttgtttgattgtattgtttagagaatcatgacaagaaaaatagtctctacatgttcgatgcagacacaaccattgcaggcccacctacgtggtatatgtcacccagaacattaaaatttgttttaacattca

SEQ ID NO: 65174 - DNA, 1216 bp, Homo sapiens
cttctccacgcccctgcgctctgagtcctggctctggcgctgagagagagacgccctggaaggtctgtatcagcgtctgtcgcgctgggacccacactggcttttaaggaggacacccggacacctggaagctgggaaatgaagtcatacatgtgaaattaaagatgacagtcaatgtggagaaacttttggccagattccagatagtattgtgaacaagaacactcctcgagtaaatccatgtgacagtggtgagtgtggagaagtcgtcttgggtcattcgtctcttaattgcaacatcagagttgacactggacacaaatcatgtgagcatcaggaatatggagagaagccatatacacataaacaacgtgggaaagccatcagtcatcagcactccttccagacacatgaaaggccccccaccggaaagaaacccttcgattgtaaagaatgtgcaaaaacctttagttctcttggaaacctccgaagacacatggcggcacaccatggagatggaccttataaatgtaagttgtgtgggaaagcctttgtttggcccagtttatttcatttgcacgaaagaacacacactggagagaaaccgtatgaatgtaagcagtgttctaaagcctttcctttttacagttcctatctaagacatgaaagaatccacacgggagagaaagcctgtatgaatgtaaggaatgtgggaaagcattgagttctctccgttccttgcatagacataaaaggactcactggaaagatactctctaaatgtatggaatgtgggaaaacattcagtactttaatttcagaaacttgaaagaactcactttggagatagaccctatgaatgtaaacatgggataaagccttaagtagtttcaatttttttaaatacagttatcccccaatatattgcaggggattggttccagcaccctctaaatccacagatgccaagtcctttgttatatggcatatttgcatgtaacctatgcatatcctccagtatactgtgtaaatcatctctagatgacttttaatacctcatgcattgtaaaagctatgtaaatagttgtttgattgtattgtttagagaatcatgacaagaaaaatagtctctacatgttcgatgcagacacaaccattgcaggcccacctacgtggtatatgtcacccagaacattaaaatttgttttaacattca

SEQ ID NO: 65175 - DNA, 1404 bp, Homo sapiens
cttctccacgcccctgcgctctgagtcctggctctggcgctgagagagagacgccctggaaggtctgtatcagcgtctgtcgcgctgggacccacactggcttttaaggaggacacccggacacctggaagctgggaaatggactcagtggcctttgaagatgtggctgtgaacttcacacaagaggagtgggctttgctgggtccatcacagaagagtctctacagaaatgtcatgcaggaaaccattaggaacctggactgtatagaaatgaaatgggaggaccagaacattggagatcagtgccaaaatgccaagagaaatctaagaagtcatacatgtgaaattaaagatgacagtcaatgtggagaaacttttggccagattccagatagtattgtgaacaagaacactcctcgagtaaatccatgtgacagtggtgagtgtggagaagtcgtcttgggtcattcgtctcttaattgcaacatcagagttgacactggacacaaatcatgtgagcatcaggaatatggagagaagccatatacacataaacaacgtgggaaagccatcagtcatcagcactccttccagacacatgaaaggccccccaccggaaagaaacccttcgattgtaaagaatgtgcaaaaacctttagttctcttggaaacctccgaagacacatggcggcacaccatggagatggaccttataaatgtaagttgtgtgggaaagcctttgtttggcccagtttatttcatttgcacgaaagaacacacactggagagaaaccgtatgaatgtaagcagtgttctaaagcctttcctttttacagttcctatctaagacatgaaagaatccacacgggagagaaagcctgtatgaatgtaaggaatgtgggaaagcattgagttctctccgttccttgcatagacataaaaggactcactggaaagatactctctaaatgtatggaatgtgggaaaacattcagtactttaatttcagaaacttgaaagaactcactttggagatagaccctatgaatgtaaacatgggataaagccttaagtagtttcaatttttttaaatacagttatcccccaatatattgcaggggattggttccagcaccctctaaatccacagatgccaagtcctttgttatatggcatatttgcatgtaacctatgcatatcctccagtatactgtgtaaatcatctctagatgacttttaatacctcatgcattgtaaaagctatgtaaatagttgtttgattgtattgtttagagaatcatgacaagaaaaatagtctctacatgttcgatgcagacacaaccattgcaggcccacctacgtggtatatgtcacccagaacattaaaatttgttttaacattca

SEQ ID NO: 65176 - DNA, 336 bp, Homo sapiens
ggaacacagggcctgaccacccaggagcagccacgggaagacagaagacacgtggtcacacatgaggacacaatggcacccgtgccccaagctctgcacagaggacacttggtcacacgtgggaacaggatggcacccacaccccgagctctgtgccctgatcactgtcacctcccaggcactgcctcactgaggacaacggactggcccgtgtggctggcggccggcacgtaggctaggtcagatgagagccaccctgggacccaaacccccacaggcccccagacccaatccccgatcacacagaacaagccactaagcgtgtgtcccagaaaa

SEQ ID NO: 65177 - DNA, 1145 bp, Homo sapiens
gccaagaatccatatttctttaccagactaggaattctattctagtgcaaatgccttaaaaagcttatcactaaatcattacgaatgtgtgccatccgtggaattgcttttttttttttttttttgtaaatatgaggtctcactatgttgcccaggctggtctcgaaatcctgggcaatcctcctgcctcaccctctcaagtactggaattacaggcgtgagccaccgcgcccggcccaagtatcacttatggtttcagaacgccattattagtgtctgactgtcttggtcttcttatacattgattcccaaatcacgtgtggtaacagcatctcaatttttcatgatgacggtttgaaccattaatttaattcctcaggctatctacttttttgttaaacatactgtgtagaccatcttttttttttcccatcatgatagtcaaaattttagtctgtgtattcaagtgagaaaatttttagtcagcattatacaagtagtatttattatgtatacattcagtggagttgtttctacaaaagtatttcggaatgactattctgctgcaaacttttgtgtaagcgcttcaccttattcctacaataaggagaagtgcactaacaaaatgaacaatgcagcaagggcttcagtcgcagctcaggtcttatcaaacaccagagaaccctcaatgggagaagccttatgagtgtgacaactgtggaaagacagttccttttttgttagtatcacttctacttattgtagaaatatgctttcattattgcatctactcacatttctcactcggtttctggcaccagcaatctcttccatatttataatatcagtcaaaaactctggaattcaaatataacaagacttttctggtcacctttgatagttaatgacttgggcattgtgatatattatctcctgctgtatgtattttgtttagtagaaattgaatcattatccacaatcctttatagaactatccaagtccctgtttttatgctagtttccaaggcttggtccttcaaggttttcagggatctaggggacacaaatctaacaaatcctaatgtatattatttgtattatagtaataaaccatatggttactttgtttgagtggattcttaaat

SEQ ID NO: 65178 - DNA, 1045 bp, Homo sapiens
ggcgatagtttgttgagaatgatgagacgaggtttcactgtgttagccaggatgctctcgatctcctgacctcgtgatccacctgtctcggcctcccaaaatgctgggattacaggcgtgagccaccgcgcccggcccaagtatcacttatggtttcagaacgccattattagtgtctgactgtcttggtcttcttatacattgattcccaaatcacgtgtggtaacagcatctcaatttttcatgatgacggtttgaaccattaatttaattcctcaggctatctacttttttgttaaacatactgtgtagaccatcttttttttttcccatcatgatagtcaaaattttagtctgtgtattcaagtgagaaaatttttagtcagcattatacaagtagtatttattatgtatacattcagtggagttgtttctacaaaagtatttcggaatgactattctgctgcaaacttttgtgtaagcgcttcaccttattcctacaataaggagaagtgcactaacaaaatgaacaatgcagcaagggcttcagtcgcagctcaggtcttatcaaacaccagagaaccctcaatgggagaagccttatgagtgtgacaactgtggaaagacagttccttttttgttagtatcacttctacttattgtagaaatatgctttcattattgcatctactcacatttctcactcggtttctggcaccagcaatctcttccatatttataatatcagtcaaaaactctggaattcaaatataacaagacttttctggtcacctttgatagttaatgacttgggcattgtgatatattatctcctgctgtatgtattttgtttagtagaaattgaatcattatccacaatcctttatagaactatccaagtccctgtttttatgctagtttccaaggcttggtccttcaaggttttcagggatctaggggacacaaatctaacaaatcctaatgtatattatttgtattatagtaataaaccatatggttactttgtttgagtggattcttaaat

SEQ ID NO: 65179 - DNA, 528 bp, Homo sapiens
ctctagttctctaaagttctggacagttctgcctcctgccctgtcccagtggaggcagtaattctaggagatcctaaggggttcagggggaccctacccccacctcaggttgggcttccctgggcactcatgctccacaccaaagcaggacacgccattttccactgaccaccctataccctgaggaaagggagactttcctccgatgtttatttagctgttgcaaacatcttcaccctaatagtccctcctccaattccagccacttgtcaggctctcctcttgaccactgtgttatgggataaggggagggggtgggcatattctggagaggagcagaggtccaaggacccaggaatttggcatggaacaggtggtaggagagccccagggagacgcccaggagctggctgaaagccactttgtacatgtaatgtattatatggggtctgggctccagccagagaacaatcttttatttctgttgtttccttattaaaatggtgtttttggaaaaaaaaaaaaaaa

SEQ ID NO: 65180 - DNA, 1176 bp, Homo sapiens
  misc_feature (1093)..(1093): n is a, c, g, or t
  misc_feature (1112)..(1112): n is a, c, g, or t
  misc_feature (1126)..(1126): n is a, c, g, or t
  misc_feature (1138)..(1138): n is a, c, g, or t
  misc_feature (1142)..(1142): n is a, c, g, or t
tggagttcagctgcgaccctggctacaccctggagcagggctccatcatcatcgagtgtgttgacccccacgacccccagtggaatgagacagagccagcctgccgagccgtgtgcagcggggagatcacagactcggctggcgtggtactctctcccaactggccagagccctacggtcgtgggcaggattgtatctggggtgtgcatgtggaagaggacaagcgcatcatgctggacatccgagtgctgcgcataggccctggtgatgtgcttaccttctatgatggggatgacctgacggcccgggttctgggccagtactcagggccccgtagccacttcaagctctttacctccatggctgatgtcaccattcagttccagtcggaccccgggacctcagtgctgggctaccagcagggcttcgtcatccacttctttgaggtgccccgcaatgacacatgtccggagctgcctgagatccccaatggctggaagagcccatcgcagcctgagctagtgcacggcaccgtggtcacttaccagtgctaccctggctaccaggtagtgggatccagtgtcctcatgtgccagtgggacctaacttggagtgaggacctgccctcatgccagagggtgacttcctgccacgatcctggagatgtggagcacagccgacgcctcatatccagccccaagtttcccgtgggggccaccgtgcaatatatctgtgaccagggttttgtgctgatgggcagctccatcctcacctgccatgatcgccaggctggcagccccaagtggagtgaccgggcccctaaatgtctcctggaacagctcaagccatgccatggtctcagtgcccctgagaatggtgcccgaagtcctgagaagcagctacacccagcaggggccaccatccacttctcgtgtgcccctggctatgtgctgaagggccaggccagcatcaagtgtgtgcctgggcacccctcgcattggagtgaccccccacccatctgtagggctgcctctctggatgggttctacaacagtcgcagcctggatgtttgccaaggcaccttgctgccttncagcaaccctggggattgnttgcccacatttgncaggttgccatntttnttttggccatttggttggggattgggtttttgtt

SEQ ID NO: 65181 - DNA, 932 bp, Homo sapiens
gtcgccctgacactcaaggcccttcattgccacatgtctcaggcttcagccaaacctgcttcctctggccccaaatgacacctccaggcagactgaggcagacctcccccaaccaatggcccagctcccgcccccaccctgcacacatacacagtgtcacccgttctctgtttgcagcctatctcctgagctgccactttccccgtcgtccagcttatggagatgtgactgtcaccagcctccacccagggggtagtgcccgcttccattgtgccactggctaccagctgaagggcgccaggcatctcacctgtctcaatgccacccagcccttctgggattcaaaggagcccgtctgcatcgctgcttgcggcggagtgatccgcaatgccaccaccggccgcatcgtctctccaggcttcccgggcaactacagcaacaacctcacctgtcactggctgcttgaggctcctgagggccagcggctacacctgcactttgagaaggtttccctggcagaggatgatgacaggctcatcattcgcaatggggacaacgtggaggccccaccagtgtatgattcctatgaggtggaatacccgcccccgcccccgcccctacaaccgcattaccatagagtcagcgtttgacaatccaacttacgagactggagagacgagagaatatgaagtctccatctaggtgggggcagtctagggaagtcaactcagacttgcaccacagtccagcagcaaggctccttgcttcctgctgtccctccacctcctgtatataccacctaggaggagatgccaccaagcccactttgtacatgtaatgtattatatggggtctgggctccagccagagaacaatcttttatttctgttgtttccttattaaaatggtgtttttggaaaaaaaaaaaaaaa

SEQ ID NO: 65182 - DNA, 1182 bp, Homo sapiens
  misc_feature (23)..(24): n is a, c, g, or t
  misc_feature (26)..(27): n is a, c, g, or t
tcaggagatgatgaggagaccanncnncactaccaccaccatcatcaccaccaccatcaccacagtccagacaccaggcccttgtagctggaatttctcaggcccagagggctctctggactcccctacagacctcagctcccccactgatgttggcctggactgcttcttctacatctctgtctaccctggctatggcgtggaaatcaaggtccagaatatcagcctccgggaaggggagacagtgactgtggaaggcctgggggggcctgacccactgcccctggccaaccagtctttcctgctgcggggccaagtcatccgcagccccacccaccaagcggccctgaggttccagagcctcccgccaccggctggccctggcaccttccatttccattaccaagcctatctcctgagctgccactttccccgtcgtccagcttatggagatgtgactgtcaccagcctccacccagggggtagtgcccgcttccattgtgccactggctaccagctgaagggcgccaggcatctcacctgtctcaatgccacccagcccttctgggattcaaaggagcccgtctgcatcgctgcttgcggcggagtgatccgcaatgccaccaccggccgcatcgtctctccaggcttcccgggcaactacagcaacaacctcacctgtcactggctgcttgaggctcctgagggccagcggctacacctgcactttgagaaggtttccctggcagaggatgatgacaggctcatcattcgcaatggggacaacgtggaggccccaccagtgtatgattcctatgaggtggaatactgcccattgagggcctgctcagctctggcaaacacttctttgttgagctcagtactgacagcagcggggcagctgcaggcatggccctgcgctatgagggtgagcctgctggggcctcactgggggtggcgggtccacggggatgggctcgggcctagggtctttctcccacaccctacccctctctgcctccatgctgtcactccttccaagtcagcccctgctcactcagtacttaggccccctttccctgcccctctctttgggtccgggatccctaccacagctttgcaggaaacctctgcctggacccaggccctatggtccaagggaataaattctccagattttga

SEQ ID NO: 65183 - DNA, 1789 bp, Homo sapiens
tggagttcagctgcgaccctggctacaccctggagcagggctccatcatcatcgagtgtgttgacccccacgacccccagtggaatgagacagagccagcctgccgagccgtgtgcagcggggagatcacagactcggctggcgtggtactctctcccaactggccagagccctacggtcgtgggcaggattgtatctggggtgtgcatgtggaagaggacaagcgcatcatgctggacatccgagtgctgcgcataggccctggtgatgtgcttaccttctatgatggggatgacctgacggcccgggttctgggccagtactcagggccccgtagccacttcaagctctttacctccatggctgatgtcaccattcagttccagtcggaccccgggacctcagtgctgggctaccagcagggcttcgtcatccacttctttgaggtgccccgcaatgacacatgtccggagctgcctgagatccccaatggctggaagagcccatcgcagcctgagctagtgcacggcaccgtggtcacttaccagtgctaccctggctaccaggtagtgggatccagtgtcctcatgtgccagtgggacctaacttggagtgaggacctgccctcatgccagagggtgacttcctgccacgatcctggagatgtggagcacagccgacgcctcatatccagccccaagtttcccgtgggggccaccgtgcaatatatctgtgaccagggttttgtgctgatgggcagctccatcctcacctgccatgatcgccaggctggcagccccaagtggagtgaccgggcccctaaatgtctcctggaacagctcaagccatgccatggtctcagtgcccctgagaatggtgcccgaagtcctgagaagcagctacacccagcaggggccaccatccacttctcgtgtgcccctggctatgtgctgaagggccaggccagcatcaagtgtgtgcctgggcacccctcgcattggagtgaccccccacccatctgtagggctgcctctctggatgggttctacaacagtcgcagcctggatgttgccaaggcacctgctgcctccagcaccctggatgctgcccacattgcagctgccatcttcttgccactggtggcgatggtgttgttggtaggaggtgtatacttctacttctccaggctccagggaaaaagctccctgcagctgccccgcccccgcccccgcccctacaaccgcattaccatagagtcagcgtttgacaatccaacttacgagactggagagacgagagaatatgaagtctccatctaggtgggggcagtctagggaagtcaactcagacttgcaccacagtccagcagcaaggctccttgcttcctgctgtccctccacctcctgtatataccacctaggaggagatgccaccaagccctcaagaagttgtgcccttccccgcctgcgatgcccaccatggcctattttcttggtgtcattgcccacttggggcccttcattgggccatgtcagggggcatctacctgtgggaagaacatagctgggagcacaagcatcaacagccagcatcctgagcctcctcatgccctgggaccagcctggaacacactagcagagcaggagtacctttctccacatgaccaccatcccgccctggcatggcaacctgcagcaggattaacttgaccatggtgggaactgcaccagggtactcctcacagcgccatcaccaatggccaaaactcctctcaacggtgacctctggg

SEQ ID NO: 65184 - DNA, 1162 bp, Homo sapiens
  misc_feature (23)..(24): n is a, c, g, or t
  misc_feature (26)..(27): n is a, c, g, or t
tcaggagatgatgaggagaccanncnncactaccaccaccatcatcaccaccaccatcaccacagtccagacaccaggcccttgtagctggaatttctcaggcccagagggctctctggactcccctacagacctcagctcccccactgatgttggcctggactgcttcttctacatctctgtctaccctggctatggcgtggaaatcaaggtccagaatatcagcctccgggaaggggagacagtgactgtggaaggcctgggggggcctgacccactgcccctggccaaccagtctttcctgctgcggggccaagtcatccgcagccccacccaccaagcggccctgaggttccagagcctcccgccaccggctggccctggcaccttccatttccattaccaagcctatctcctgagctgccactttccccgtcgtccagcttatggagatgtgactgtcaccagcctccacccagggggtagtgcccgcttccattgtgccactggctaccagctgaagggcgccaggcatctcacctgtctcaatgccacccagcccttctgggattcaaaggagcccgtctgcatcgctgcttgcggcggagtgatccgcaatgccaccaccggccgcatcgtctctccaggcttcccgggcaactacagcaacaacctcacctgtcactggctgcttgaggctcctgagggccagcggctacacctgcactttgagaaggtttccctggcagaggatgatgacaggctcatcattcgcaatggggacaacgtggaggccccaccagtgtatgattcctatgaggtggaatacccgcccccgcccccgcccctacaaccgcattaccatagagtcagcgtttgacaatccaacttacgagactggagagacgagagaatatgaagtctccatctaggtgggggcagtctagggaagtcaactcagacttgcaccacagtccagcagcaaggctccttgcttcctgctgtccctccacctcctgtatataccacctaggaggagatgccaccaagcccactttgtacatgtaatgtattatatggggtctgggctccagccagagaacaatcttttatttctgttgtttccttattaaaatggtgtttttggaaaaaaaaaaaaaaa

SEQ ID NO: 65185 - DNA, 664 bp, Homo sapiens
cctggttctcacggctcccaggtcatgggcttcccaaggagggagggcagagaaagagagaggtttgggcctagcaggttaaaaagctccttccctacacccagccagctagagggagctggtagtcagatgcccttgggcagaggtgagagaatatgggctccaggtgacagagacctctgctccagtcacaccctctgtgtcttcagttgccaaggcacctgctgcctccagcaccctggatgctgcccacattgcagctgccatcttcttgccactggtggcgatggtgttgttggtaggaggtgtatacttctacttctccaggtgagtctggcttctctttctgctctgcatacctgcatacctcactcctacccagtgctcctgacttgcaggcttctctgccccacaggctccagggaaaaagctccctgcagctgccccgcccccgcccccgcccctacaaccgcattaccatagagtcagcgtttgacaatccaacttacgagactggagtaagtaaccatgccagccttgccaccctatccaagacccagttctttgcttctttgggcagataaccctgagggtcctgccaagccctctcactttttcccttttcctagggaaggtgaattatggcctggcaaacctaatacaa

SEQ ID NO: 65186 - DNA, 1799 bp, Homo sapiens
ggcacgaggcctggagctagcctgggggcgagccagggtcccccaacccccgggatgaccgcggccagccgggccaacccctacagcatcgtgtcatcggaggaggacgggctgcacctggtcaccatgtcgggcgccaacggcttcggcaacggcaaggtgcacacgcggcgcaggtgccgcaaccgcttcgtcaagaagaatggccagtgcaacattgagttcgccaacatggacgagaagtcacagcgctacctggctgacatgttcaccacctgtgtggacatccgctggcggtacatgctgctcatcttctcgctggccttccttgcctcctggctgctgttcggcatcatcttctgggtcatcgcggtggcacacggtgacctggagccggctgagggccggggccgcacaccctgtgtgatgcaggtgcacggcttcatggcggccttcctcttctccatcgagacgcagaccaccatcggctacgggctgcgctgtgtgacggaggagtgcccggtggccgtcttcatggtggtggcccagtccatcgtgggctgcatcatcgactccttcatgattggtgccatcatggccaagatggcaaggcccaagaagcgggcacagacgctgctgttcagccacaacgccgtggtggccctgcgtgacggcaagctctgcctcatgtggcgtgtgggtaacctgcgcaagagccacattgtggaggcccatgtgcgcgcgcagctcatcaagccgcgggtcaccgaggagggcgagtacatcccgctggaccagatcgacatcgatgtgggcttcgacaagggcctggaccgcatctttctggtgtcgcccatcaccatcttgcatgagattgacgaggccagcccgctcttcggcatcagccggcaggacctggagacggacgactttgagatcgtggtcatcctggaaggcatggtggaggccacagccatgaccacccaggcccgcagctcctacctggccaatgagatcctgtggggtcaccgctttgagcccgtgctcttcgaggagaagaaccagtacaagattgactactcgcacttccacaagacctatgaggtgccctctacgccccgctgcagtgcgaaggatctggtagagaacaagttcctgctgcccagcgccaactccttctgctacgagaacgagctggccttcctgagccgtgacgaggaggatgaggcggacggagaccaggacggccgaagccgggacggcctcagcccccaggccaggcatgactttgacagactccaggctggcggcggggtcctggagcagcggccctacagacgggagtcagagatctgagccaaccttggccgacatgcagcatccacccccggctggggagaggccccgcggtcgctcaggggccccgggtttgagcagaacgggcccagtgccctgggttgcagactcagtagcgttttagtcgttttatgtttctttgcaacggcctcagaagtttggccggagagggggcagccagagcggcagcccccggcctcagaggctatcacaggctcagggcaaagaagtggcctcctggggggccaggccacgagggccagggcttctgcctgaagatggagctgcagcctgcggggaagcagctcagctcgatggtgggcccagcctctgctgtccaaggctggctagctgcggtgctccttgctggtttttaacttggggagaaacaccgggtttcagctttcttgaccttagcttgggtgagactgtttacaaaaaaa

SEQ ID NO: 65187 - DNA, 1491 bp, Homo sapiens
cgaggtcctcacaattgctctacaactcagaacagcaactgctaaggctgccttgggaagaggatgatcctaaacaaagctctgatgctgggggcccttgccctgaccaccgtgatgagcccctgtggaggtgaagacattgtggctgaccacgtcgcctcttatggtgtaaacttgtaccagtcttacggtccctctggccagtacacccatgaatttgatggagatgagcagttctacgtggacctggggaggaaggagactgtctggtgtttgcctgttctcagacaatttagatttgacccgcaatttgcactgacaaacatcgctgtcctaaaacataacttgaacagtctgattaaacgctccaactctaccgctgctaccaatgaggttcctgaggtcacagtgttttccaagtctcccgtgacactgggtcagcccaacatcctcatctgtcttgtggacaacatctttcctcctgtggtcaacatcacatggctgagcaatgggcactcagtcacagaaggtgtttctgagaccagcttcctctccaagagtgatcattccttcttcaagatcagttacctcaccctcctcccttctgctgaggagagttatgactgcaaggtggagcactggggcctggacaagcctcttctgaaacactgggagcctgagattccagcccctatgtcagagctcacagagactgtggtctgcgccctgggattgtctgtgggcctcgtgggcattgtggtgggcactgtctttcatcatccgaggcctgcgttcagttggtgcttccagacaccaagggcccttgtgaatcccatcctggaagggaaggtgcatcgccatctacaggagcagaagagtggacttgctacatgacctagcattattttctggccccatttatcatatcccttttctcctccaaatgtttctcctctcacctcttctgtgggacttaaattgctatatctgctcagagctcacaaatgcctttgaattatttccctgacttcctgatttttttcttttctcaagtgttacctactaagagatgcctggagtaagccacccagctacctaattcctcagtaacctccatctataatctccatggaagcaacaaattccctttatgagatatatgtcaaatttttccatctttcatccagggctgactgaaaccgtggctaagaattgggagactctcttgtttcaagccaatttaacatcatttaccagatcatttgtcatgtccagtaacacagaagcaaccaactacagtatagcctgataacatgttgatttcttagctgacattaatatttctttcttccttgtgttcccacccttggcattgccacccacccctcaattaaggcaacaatgaagttaatggataccctctgcctttggctcagaaatgttatagcaaaaattttaaaataaaaaagtaagtctgtactaaaaaaaata

SEQ ID NO: 65188 - DNA, 799 bp, Homo sapiens
cgaggtcctcacaattgctctacaactcagaacagcaactgctaaggctgccttgggaagaggatgatcctaaacaaagctctgatgctgggggcccttgccctgaccaccgtgatgagcccctgtggaggtgaagacattgtggctgaccacgtcgcctcttatggtgtaaacttgtaccagtcttacggtccctctggccagtacacccatgaatttgatggagatgagcagttctacgtggacctggggaggaaggagactgtctggtgtttgcctgttctcagacaatttagatttgacccgcaatttgcactgacaaacatcgctgtcctaaaacataacttgaacagtctgattaaacgctccaactctaccgctgctaccaatgaggttcctgaggtcacagtgttttccaagtctcccgtgacactgggtcagcccaacatcctcatctgtcttgtggacaacatctttcctcctgtggtcaacatcacatggctgagcaatgggcactcagtcacagaaggtgtttctgagaccagcttcctctccaagagtgatcattccttcttcaagatcagttacctcaccctcctcccttctgctgaggagagttatgactgcaaggtggagcactggggcctggacaagcctcttctgaaacactggggtaaggatgagttccaccactttttgatgctttcttgtctgtcaagttcagaacttcctgccttttactcctatatcccaaaacttgttttccacacttcatgggtttctttctttcttttgaaag

SEQ ID NO: 65189 - DNA, 1153 bp, Homo sapiens
cgaggtcctcacaattgctctacaactcagaacagcaactgctaaggctgccttgggaagaggatgatcctaaacaaagctctgatgctgggggcccttgccctgaccaccgtgatgagcccctgtggaggtgaagacattgtggctgaccacgtcgcctcttatggtgtaaacttgtaccagtcttacggtccctctggccagtacacccatgaatttgatggagatgagcagttctacgtggacctggggaggaaggagactgtctggtgtttgcctgttctcagacaatttagatttgacccgcaatttgcactgacaaacatcgctgtcctaaaacataacttgaacagtctgattaaacgctccaactctaccgctgctaccaatgaggttcctgaggtcacagtgttttccaagtctcccgtgacactgggtcagcccaacatcctcatctgtcttgtggacaacatctttcctcctgtggtcaacatcacatggctgagcaatgggcactcagtcacagaaggtgtttctgagaccagcttcctctccaagagtgatcattccttcttcaagatcagttacctcaccctcctcccttctgctgaggagagttatgactgcaaggtggagcactggggcctggacaagcctcttctgaaacactgggagcctgagattccagcccctatgtcagagctcacagagactgtggtctgcgccctgggattgtctgtgggcctcgtgggcattgtggtgggcactgtctttcatcatccgaggcctgcgttcagttggtgcttccagacaccaagggcccttgtgaatcccatcctggaagggaagggctgactgaaaccgtggctaagaattgggagactctcttgtttcaagccaatttaacatcatttaccagatcatttgtcatgtccagtaacacagaagcaaccaactacagtatagcctgataacatgttgatttcttagctgacattaatatttctttcttccttgtgttcccacccttggcattgccacccacccctcaattaaggcaacaatgaagttaatggataccctctgcctttggctcagaaatgttatagcaaaaattttaaaataaaaaagtaagtctgtactaaaaaaaata

SEQ ID NO: 65190 - DNA, 1047 bp, Homo sapiens
cgaggtcctcacaattgctctacaactcagaacagcaactgctaaggctgccttgggaagaggatgatcctaaacaaagctctgatgctgggggcccttgccctgaccaccgtgatgagcccctgtggaggtgaagacattgtggctgaccacgtcgcctcttatggtgtaaacttgtaccagtcttacggtccctctggccagtacacccatgaatttgatggagatgagcagttctacgtggacctggggaggaaggagactgtctggtgtttgcctgttctcagacaatttagatttgacccgcaatttgcactgacaaacatcgctgtcctaaaacataacttgaacagtctgattaaacgctccaactctaccgctgctaccaatgaggttcctgaggtcacagtgttttccaagtctcccgtgacactgggtcagcccaacatcctcatctgtcttgtggacaacatctttcctcctgtggtcaacatcacatggctgagcaatgggcactcagtcacagaaggtgtttctgagaccagcttcctctccaagagtgatcattccttcttcaagatcagttacctcaccctcctcccttctgctgaggagagttatgactgcaaggtggagcactggggcctggacaagcctcttctgaaacactgggagcctgagattccagcccctatgtcagagctcacagagactgtggtctgcgccctgggattgtctgtgggcctcgtgggcattgtggtgggcactgtctttcatcatccgaggcctgcgttcagttggtgcttccagacaccaagggcccttgtgaatcccatcctggaagggaaggtgcatcaccatctacaggagaagaagaatggacttgctaaatgacctagcactattctctggcctgatttatcatatcccttttctcctccaaatgtttcttctctcacctcttctctgggacttaaggtgctatattccctcagagctcacaaatgcctttcaattctttccctgacctcctttcctgaatttttt

SEQ ID NO: 65191 - DNA, 1435 bp, Homo sapiens
cgaggtcctcacaattgctctacaactcagaacagcaactgctaaggctgccttgggaagaggatgatcctaaacaaagctctgatgctgggggcccttgccctgaccaccgtgatgagcccctgtggaggtgaagacattgtggctgaccacgtcgcctcttatggtgtaaacttgtaccagtcttacggtccctctggccagtacacccatgaatttgatggagatgagcagttctacgtggacctggggaggaaggagactgtctggtgtttgcctgttctcagacaatttagatttgacccgcaatttgcactgacaaacatcgctgtcctaggttcctgaggtcacagtgttttccaagtctcccgtgacactgggtcagcccaacatcctcatctgtcttgtggacaacatctttcctcctgtggtcaacatcacatggctgagcaatgggcactcagtcacagaaggtgtttctgagaccagcttcctctccaagagtgatcattccttcttcaagatcagttacctcaccctcctcccttctgctgaggagagttatgactgcaaggtggagcactggggcctggacaagcctcttctgaaacactgggagcctgagattccagcccctatgtcagagctcacagagactgtggtctgcgccctgggattgtctgtgggcctcgtgggcattgtggtgggcactgtctttcatcatccgaggcctgcgttcagttggtgcttccagacaccaagggcccttgtgaatcccatcctggaagggaaggtgcatcgccatctacaggagcagaagagtggacttgctacatgacctagcattattttctggccccatttatcatatcccttttctcctccaaatgtttctcctctcacctcttctgtgggacttaaattgctatatctgctcagagctcacaaatgcctttgaattatttccctgacttcctgatttttttcttttctcaagtgttacctactaagagatgcctggagtaagccacccagctacctaattcctcagtaacctccatctataatctccatggaagcaacaaattccctttatgagatatatgtcaaatttttccatctttcatccagggctgactgaaaccgtggctaagaattgggagactctcttgtttcaagccaatttaacatcatttaccagatcatttgtcatgtccagtaacacagaagcaaccaactacagtatagcctgataacatgttgatttcttagctgacattaatatttctttcttccttgtgttcccacccttggcattgccacccacccctcaattaaggcaacaatgaagttaatggataccctctgcctttggctcagaaatgttatagcaaaaattttaaaataaaaaagtaagtctgtactaaaaaaaata

SEQ ID NO: 65192 - DNA, 1232 bp, Homo sapiens
ccgtctgtgggcagtagcaccagtgctggtgctgaggacgatgctctgctccccgcggaagctctaccaggcctcgctgctgcggagcatgcgaagaagatgcacactccaactctactgctgctaccaatgaggttcctgaggtcacagtgttttccaagtctcccgtgacactgggtcagcccaacatcctcatctgtcttgtggacaacatctttcctcctgtggtcaacatcacatggctgagcaatgggcactcagtcacagaaggtgtttctgagaccagcttcctctccaagagtgatcattccttcttcaagatcagttacctcaccctcctcccttctgctgaggagagttatgactgcaaggtggagcactggggcctggacaagcctcttctgaaacactgggagcctgagattccagcccctatgtcagagctcacagagactgtggtctgcgccctgggattgtctgtgggcctcgtgggcattgtggtgggcactgtctttcatcatccgaggcctgcgttcagttggtgcttccagacaccaagggcccttgtgaatcccatcctggaagggaaggtgcatcgccatctacaggagcagaagagtggacttgctacatgacctagcattattttctggccccatttatcatatcccttttctcctccaaatgtttctcctctcacctcttctgtgggacttaaattgctatatctgctcagagctcacaaatgcctttgaattatttccctgacttcctgatttttttcttttctcaagtgttacctactaagagatgcctggagtaagccacccagctacctaattcctcagtaacctccatctataatctccatggaagcaacaaattccctttatgagatatatgtcaaatttttccatctttcatccagggctgactgaaaccgtggctaagaattgggagactctcttgtttcaagccaatttaacatcatttaccagatcatttgtcatgtccagtaacacagaagcaaccaactacagtatagcctgataacatgttgatttcttagctgacattaatatttctttcttccttgtgttcccacccttggcattgccacccacccctcaattaaggcaacaatgaagttaatggataccctctgcctttggctcagaaatgttatagcaaaaattttaaaataaaaaagtaagtctgtactaaaaaaaata

SEQ ID NO: 65193 - DNA, 529 bp, Homo sapiens
  misc_feature (75)..(75): n is a, c, g, or t
  misc_feature (82)..(83): n is a, c, g, or t
  misc_feature (90)..(90): n is a, c, g, or t
tttgaaattagtacagacttacttttttattttaaaatttttgctataacatttctgagccaaaggcagagggtntccattnncttcatngttgccttaattgagggatgcctggagtaagccacccagctacctaattcctcagtaacctccatctataatctccatggaagcaacaaattccctttatgagatatatgtcaaatttttccatctttcatccagggctgactgaaaccgtggctaagaattgggagactctcttgtttcaagccaatttaacatcatttaccagatcatttgtcatgtccagtaacacagaagcaaccaactacagtatagcctgataacatgttgatttcttagctgacattaatatttctttcttccttgtgttcccacccttggcattgccacccacccctcaattaaggcaacaatgaagttaatggataccctctgcctttggctcagaaatgttatagcaaaaattttaaaataaaaaagtaagtctgtactaaaaaaaata

SEQ ID NO: 65194 - DNA, 722 bp, Homo sapiens
tgatgaaagaattaagtgaaagatgaatcttaggaagcagaaggaagtaaacctaatctctgactaagaaagctaaataccataataactcattcattccttcttttgttcaattacattatttaatcataagtccgtgatgtgccaggcactcaggaaatagtaaaaactggacatgtgatattctgcccttgtgtagcgcacattatagtgggaaagaaagcgcaattttaaccggacaactaccaacaataagagtggaggaagcaggggttggaaatgtccacaggctgtgccaaagatgaagcccgtaatatttgaaagtcagtttctttcatcattttgtgtattaaggttctttcttcccctgttctccaccttcctgcttgtcatcttcactcatcagctgaccacgtcgcctcttatggtgtaaacttgtaccagtcttacggtccctctggccagtacacccatgaatttgatggagatgagcagttctacgtggacctggggaggaaggagactgtctggtgtttgcctgttctcagacaatttagatttgacccgcaatttgcactgacaaacatcgctgtcctaaaacataacttgaacagtctgattaaacgctccaactctaccgctgctaccaatggtatgtgtcaacaattctgcccctctttactgatttatcccttcataccaagtttcattattttatttcc

SEQ ID NO: 65195 - DNA, 756 bp, Homo sapiens
cgaggtcctcacaattgctctacaactcagaacagcaactgctaaggctgccttgggaagaggatgatcctaaacaaagctctgatgctgggggcccttgccctgaccaccgtgatgagcccctgtggaggtgaagacattgtgggtgagtgtatgagtgagggatgttctctggagctggaagagaggaaattgaagcaaaagagagaaagcgatttgcagagaaattgtagagatttcctaagggtcccttcagtattaagagatttaaaaattatggctgttcctccttcaggaaaccagagtcccaacctactctttttgttatctatgctgttggcgttcactaaggatgctattctgtttatattgtattcagtgactatagcctggaggtctctatgtcattccatcatgattgcctcaaaaattagtgaggtttccatcaatggataattttttattattaaaaatttgtgaagtatcattctcaaatttccctgaacaacttttgaagcttttcggatgtctcctgtagtagcgcttggggtaaatgattccatcaattatatactctatagatattaagaaagatgcccttttctttctctcagacttactaacatttccacgtgggaactggcacaggtggggagtgggtaaaggagtccagcaggctgaatgccttcaacaatcattttaccacatggtcctcacttactctcagctgcctcatatgtgtcacctcacaaataa

SEQ ID NO: 65196 - DNA, 1245 bp, Homo sapiens
cgaggtcctcacaattgctctacaactcagaacagcaactgctaaggctgccttgggaagaggatgatcctaaacaaagctctgatgctgggggcccttgccctgaccaccgtgatgagcccctgtggaggtgaagacattgtggaggttcctgaggtcacagtgttttccaagtctcccgtgacactgggtcagcccaacatcctcatctgtcttgtggacaacatctttcctcctgtggtcaacatcacatggctgagcaatgggcactcagtcacagaaggtgtttctgagaccagcttcctctccaagagtgatcattccttcttcaagatcagttacctcaccctcctcccttctgctgaggagagttatgactgcaaggtggagcactggggcctggacaagcctcttctgaaacactgggagcctgagattccagcccctatgtcagagctcacagagactgtggtctgcgccctgggattgtctgtgggcctcgtgggcattgtggtgggcactgtctttcatcatccgaggcctgcgttcagttggtgcttccagacaccaagggcccttgtgaatcccatcctggaagggaaggtgcatcgccatctacaggagcagaagagtggacttgctacatgacctagcattattttctggccccatttatcatatcccttttctcctccaaatgtttctcctctcacctcttctgtgggacttaaattgctatatctgctcagagctcacaaatgcctttgaattatttccctgacttcctgatttttttcttttctcaagtgttacctactaagagatgcctggagtaagccacccagctacctaattcctcagtaacctccatctataatctccatggaagcaacaaattccctttatgagatatatgtcaaatttttccatctttcatccagggctgactgaaaccgtggctaagaattgggagactctcttgtttcaagccaatttaacatcatttaccagatcatttgtcatgtccagtaacacagaagcaaccaactacagtatagcctgataacatgttgatttcttagctgacattaatatttctttcttccttgtgttcccacccttggcattgccacccacccctcaattaaggcaacaatgaagttaatggataccctctgcctttggctcagaaatgttatagcaaaaattttaaaataaaaaagtaagtctgtactaaaaaaaata

SEQ ID NO: 65197 - DNA, 872 bp, Homo sapiens
cgaggtcctcacaattgctctacaactcagaacagcaactgctaaggctgccttgggaagaggatgatcctaaacaaagctctgatgctgggggcccttgccctgaccaccgtgatgagcccctgtggaggtgaagacattgtggctgaccacgtcgcctcttatggtgtaaacttgtaccagtcttacggtccctctggccagtacacccatgaatttgatggagatgagcagttctacgtggacctggggaggaaggagactgtctggtgtttgcctgttctcagacaatttagatttgacccgcaatttgcactgacaaacatcgctgtcctaaaacataacttgaacagtctgattaaacgctccaactctaccgctgctaccaatgaggttcctgaggtcacagtgttttccaagtctcccgtgacactgggtcagcccaacatcctcatctgtcttgtggacaacatctttcctcctgtggtcaacatcacatggctgagcaatgggcactcagtcacagaaggtgtttctgagaccagcttcctctccaagagtgatcattccttcttcaagatcagttacctcaccctcctcccttctgctgaggagagttatgactgcaaggtggagcactggggcctggacaagcctcttctgaaacactgggagcctgagattccagcccctatgtcagagctcacagagactttggtctgcgccctggggttgtctgtgggcctcatgggcattgtggtgggcactgtcttcatcatccaaggcctgcgttcagttggtgcttccagacacaggcatgtgtatcatctgaaggaaggtgcatgcatgatcagagcagagatgactgcata

SEQ ID NO: 65198 - DNA, 451 bp, Homo sapiens
ttttctcacatggtatcgttataacattataatatttcttagtatctcccaaattgtccttaaggtaaaactattttaagtttggcagctttgaacaggacatgtctatttaaatattcttttctatctaaatataggttgacaagcatgggtcacccactagttacaaggaaggataccataatatatagctatattaagagatagagtacaaagtgtatattcacatataggtatatgcaaatgacaagaagttactcctaatgagtctttagtactcttgtttcatagtgtaagctagctgttgggtaacttctactacagagtgcagatattagtggatgcttgcttaaaatcttcttgaaccttttttttttttcttgtgaagcttatgttttaaagtatcctttttgtgacacatcaggcattatagcaaatttatgtgaggtct

SEQ ID NO: 65199 - DNA, 387 bp, Homo sapiens
agtcgctctgcagagttgaattcaggctgctgcagcggccaggaagcagggacacgccgtgggacatgtcagccagtgcgtcactggcaagcttggtatgtaacgtgcaatccttacatggattctgcaaaacccactggcatgcctatgccaaatttataaacagtcaaaagccaggcggtgaaccgctccggaccccacggagcaggggccacctgatagcaacgtgagaagcattctcgctgctgctgggcagcaccactcaactctcccaggataaagcacttgaagaatctcttgtgattcttatcacgggcaaaacattctaatcgaacttttcaaaactgcagtttgaatgacacaagacgggccagaaccccttgattt

SEQ ID NO: 65200 - DNA, 365 bp, Homo sapiens
tttttttctccccaaatatccaggtggattcaataaagataacctgaaatttgcatactgtttttactcagagagaagcagcactaattccattttttatagataagaaaattgagatgcagagatattaaaacatttaataattgccctgattttgaagaacaaaacagatgtgagtaaaaagagctgctaattggaaaaaaacaaagagccaaccagactaaggtgaaaagagctctagacattatttcaatttttactcatgaaagtcagatctaaatattgaccattttatttggtatcagaaattattttgtacacacgtttttagtaaaatagaattgattaattcttcctatgatcaa

SEQ ID NO: 65201 - DNA, 353 bp, Homo sapiens
caagttactgacagtactatttgcatagttctggtcactttccaaattacctctcactcagcctcaccacagcccttatccacagagccacctggggtggaatgggaggggcttttcttatccccatccaacagatgaggagactgtgactcagagaggtgaatgacttgggcaaagtctaacaacagtaaccacagagtaatgatttctaagctactaattaactttctaaccatctacccataaggaattggcctgtaggttgaaaaggcattcctgagtctctgtataccacacaccaaggattaatattccaagtaatcattttagaatttaaaagtgcaatagttaaa

SEQ ID NO: 65202 - DNA, 2193 bp, Homo sapiens
gctgacacctgcccagtggaagctggcatccctccccttgtgggttcagagctgcaagaagcaccaggctcggccacttcagaagccccagcctcgacctagcccaccctctcagggccacagtgcagaagcctgcacacctgccaagtctctccgactccttgcagctgctgtcagcatggcccaggctcctgctgacccgggcagagaaggccaccttgaacaaagaatcctgcaggtgctgacagaggctggctccccggtgaaacttgcccagctggtgaaggaatgccaagcacccaagagggagctcaaccaagtcctctaccgaatgaaaaaggagttgaaagtctccctcacatcccctgccacctggtgcttgggcgggactgatcctgaaggcgagggtcctgcagagctggccttgtccagccctgccgagaggccccagcaacatgcagctacaattccagagacccctggccctcagttcagccaacaacgggaggaagacatctacaggtttctcaaagacaatggtccccagagggccctggtcatcgcccaagcactgggaatgaggacagcaaaagatgtgaaccgagacttgtacaggatgaagagcaggcaccttctggacatggatgagcagtccaaagcatggacgatttaccgcccagaagattctggaagaagagcaaagtcagcctcaattatttaccagcacaatccaatcaacatgatctgccagaatggacccaacagctggatttccattgcaaactccgaagccatccagattggacacgggaacatcattacaagacagacagtctccagggaggacggttccgccggtccacgccacctcccttcaatggcaccaggtgattcctcaacttgggggaccctagttgatccctgggggccccaggacatccacatggagcggtccatactgagacgggtgcagctgggacacagcaatgagatgaggctccacggcgtcccgtccgagggccctgcccacatcccccctggcagccccccagtctctgccactgctgccggcccagaagcttcgtttgaagcaagaattcccagtccaggaactcaccctgagggggaagccgcccagagaatccacatgaaatcgtgctttctcgaggacgccaccatcggcaacagcaacaaaatgtctatcagcccaggggtggctggcccaggaggagtcgcagggtctggagagggggagccaggggaggacgcaggtcgtcgtcccgcagacacacaatccagaagtcactttcctcgagacattggtcagcccatcactcccagccactcgaagctcacccccaagctggaaactatgactcttggaaacaggagtcacaaagctgcagaaggcagccactatgtggatgaagcctcacacgaggggagctggtggggaggtgggatttagtgcacagcctcacgtggggcttggacacaggctgggggtgggcgcatgctagggagactagcctgctgctctctgcattccttagcgtcttgtttgacctgcttgcttccagacataacctgcatgaatcagttttgggggaatggacctggcatggggatgggttcaggccaggtcttttgatggccaggagtagatgacagggagttgccttggggaacctttggtgtgccaagaggaggtgggtagatgggagtggggctcggtcccccaggcccaggggactctctccactctttcctgggctcggggcatctgcctggagttaccttccatcatggctacctgctgtggtttgaatgtttgagtcccaacaaaattcatatcaaaacataatcccaactgggtgcagtggctcacgcctgtaatcccagcactttgggaggccgaggcgggcggatcaataggtcaggaaatccagaccgtcctggctaacatggtgaaaccccgtctctactaaaaaaaaaaatacaaaaaattagccgggcgttgtggcgggcacctggagtcccagctactccggaggctgagggaggagaatggtgtgaacccgggaggtggagcttccagtgagccgagatcgcgccactgcactccaggctgggcgacagagcgagactccgtctcaaaaaaataaatacataaataaaaaataaaccacccat

SEQ ID NO: 65203 - DNA, 1511 bp, Homo sapiens
gctgacacctgcccagtggaagctggcatccctccccttgtgggttcagagctgcaagaagcaccaggctcggccacttcagaagccccagcctcgacctagcccaccctctcagggccacagtgcagaagcctgcacacctgccaagtctctccgactccttgcagctgctgtcagcatggcccaggctcctgctgacccgggcagagaaggccaccttgaacaaagaatcctgcaggtgctgacagaggctggctccccggtgaaacttgcccagctggtgaaggaatgccaagcacccaagagggagctcaaccaagtcctctaccgaatgaaaaaggagttgaaagtctccctcacatcccctgccacctggtgcttgggcgggactgatcctgaaggcgagggtcctgcagagctggccttgtccagccctgccgagaggccccagcaacatgcagctacaattccagagacccctggccctcagttcagccaacaacgggaggaagacatctacaggtttctcaaagacaatggtccccagagggccctggtcatcgcccaagcactgggaatgaggacagcaaaagatgtgaaccgagacttgtacaggatgaagagcaggcaccttctggacatggatgagcagtccaaagcatggacgatttaccgcccagaagattctggaagaagagcaaagtcagcctcaattatttaccagcacaatccaatcaacatgatctgccagaatggacccaacagctggatttccattgcaaactccgaagccatccagattggacacgggaacatcattacaagacagacagtctccagggaggacggttccgccggtccacgccacctcccttcaatggcaccaggtgattcctcaacttgggggaccctagttgatccctgggggccccaggacatccacatggagcggtccatactgagacgggtgcagctgggacacagcaatgagatgaggctccacggcgtcccgtccgagggccctgcccacatcccccctggcagccccccagtctctgccactgctgccggcccagaagcttcgtttgaagcaagaattcccagtccaggaactcaccctgagggggaagccgcccagagaatccacatgaaatcgtgctttctcgaggacgccaccatcggcaacagcaacaaaatgtctatcagcccaggggtggctggcccaggaggagtcgcagggtctggagagggggagccaggggaggacgcagttgctgccttcactgaagtcttgaacccctcaaagtcattcatgaaatttggaatcaacttcttccagactcctgtgaatgttgatagtttgacctcctcccatgaatcacaaatgttcttaacggcatgtagattggtgatcttttccagaagattttcaacttactttgcccagatccatctgaggaatcactctgtgttgcacttatgccctcataaaatatatttattgaagaata

SEQ ID NO: 65204 - DNA, 1031 bp, Homo sapiens
gctgacacctgcccagtggaagctggcatccctccccttgtgggttcagagctgcaagaagcaccaggctcggccacttcagaagccccagcctcgacctagcccaccctctcagggccacagtgcagaagcctgcacacctgccaagtctctccgactccttgcagctgctgtcagcatggcccaggctcctgctgacccgggcagagaaggccaccttgaacaaagaatcctgcaggtgctgacagaggctggctccccggtgaaacttgcccagctggtgaaggaatgccaagcacccaagagggagctcaaccaagtcctctaccgaatgaaaaaggagttgaaagtctccctcacatcccctgccacctggtgcttgggcgggactgatcctgaaggcgagggtcctgcagagctggccttgtccagccctggtaactgccaccccggggaggcgggtctgaccctgcagggagcatcctggcaatggacaagcacagatttgagcctgggttcgaatctgaactctgccacatgggagctcacaggtttcctctctctgtgccttggtttctttttctggttgatggagctcacagcagggctgcttggtaggggttgctgagaggaggccctgcgtcaggctcagcccagccctgcacacaggaggtactctgcagaacactaacaattataatagaaaatcatcatgatggagacagcaatgacgccatggtcccaatcacagaacatatgcagtcccaccagccccccttttctagctttacagcccacagccagaaggagctgccatttatcatgcacttaagattagccaggcactgttttggggttcacccagccctcacacaaccccaggaggcaaaggaggctgagccccggagaagttaatcggcaggaagccgcagctgccagggcgcaggcaggatttgaagtcaagtgtgttgaactctggagtctgagtttgcaactaccggcattgccacttacccctagggagctgccca

SEQ ID NO: 65205 - DNA, 1130 bp, Homo sapiens
gctgacacctgcccagtggaagctggcatccctccccttgtgggttcagagctgcaagaagcaccaggctcggccacttcagaagccccagcctcgacctagcccaccctctcagggccacagtgcagaagcctgcacacctgccaagtctctccgactccttgcagctgctgtcagcatggcccaggctcctgctgacccgggcagagaaggccaccttgaacaaagaatcctgcaggtgctgacagaggctggctccccggtgaaacttgcccagctggtgaaggaatgccaagcacccaagagggagctcaaccaagtcctctaccgaatgaaaaaggagttgaaagtctccctcacatcccctgccacctggtgcttgggcgggactgatcctgaaggcgagggtcctgcagagctggccttgtccagccctgccgagaggccccagcaacatgcagctacaattccagagacccctggccctcagttcagccaacaacgggaggaagacatctacaggtttctcaaagacaatggtccccagagggccctggtcatcgcccaagcactgggaatgaggacagcaaaagatgtgaaccgagacttgtacaggatgaagagcaggcaccttctggacatggatgagcagtccaaagcatggacgatttaccgcccagaagattctggaagaagagcaaagtcagcctcaattatttaccagcacaatccaatcaacatgatctgccagaatggacccaacagctggatttccattgcaaactccgaagccatccagattggacacgggaacatcattacaagacagacagtctccagggaggacggtaagtcacccaagagagcccagggaggggacctcggtggggagccaccggatcctctgggtgggggcaaagggtagggatggggagtggggggattctgccctccaaggggaaagggttgcttccagacccccacagtccacctttacggccgtcctgagaatgaggacacctggatcaaagctctcctgatttccctgtactctgatactttctacctcattttaaagtttaatttaatttttatttttctaataaaattttaaaattaagatggggtat

SEQ ID NO: 65206 - DNA, 323 bp, Homo sapiens
caccgcacctggtcaatgttttctattaaaattctacctaagcatctaggctctgttgggggcttatcataacttaggatgtgccaaattgggcaggtgagctgggttttcagtgccagtcccacagaccttttctcatccaaggagggatgctcccaagagtatttatactgtgctctgagtatctgggacccagaatctgaaggcctcatgagtccactacaggaagaggtctctgatggcaaggagcggtaattgatggcatcctccttctaggtctccacatgcggcaaattgctttaaatgaatgcttttgagcccct

SEQ ID NO: 65207 - DNA, 742 bp, Homo sapiens
aagactctgtttggggtactgctggcagccatcttgcccaaagaaagagagcctcatgtgggcaaaggctgatgaggaaaggaagctgggaaatgcagaggaaaaaaaaaccccagcctgttcacattgtttgcgccactagaacagctcttcctagaagtcagccctactctagacctttagattaaacgaagccgataaaataccttgcttatgtgagcagtttggattgaatttttcattatttgcaactgaaagcattcgattggaagaaaccaacagtagaagaccaaatgggacgcaaagtcagcatcgttgctgggagaggacataaagagaggaacacccagttgaaactccacaatgccttcctgttatgccccagatatggagcagctgatgtagtcacaagccttaggccttgttcttgcccctacagagcctgaagttacggaagcaaagtccaagctaaaccctggatcaagattagcagcagtactgtacaggccacagcctgtacctgtaaactggccaatcattaacccctgcttactcttgatgtgcagggagtagcgtgagagagcattggggcctgatgcaatttatgcacaccttcaggaaaactagtggcatcacctcctcatgaaggatgccagtccctcttccctctgttctgacaagttaccaacaaggccaaatgttagcttctccttgataaaataaaagaattctcattgtggac

SEQ ID NO: 65208 - DNA, 281 bp, Homo sapiens
accaaactaccaaatgggcaaacttaatcaacattaccaataaagatgaactttttgatgcaacaggacaatttaaaaaatataccatctattggtaagaactcttactataagaattcttactatacaagcctttaacaaatgctagctcattaaatacctagagtaccctctaaggtaggtattaaaaattttttaacaaatttataatagatttggcacaaataataggacaattaaaggcttgttcttcaacccggcttaaagtgaattcatcctaa

SEQ ID NO: 65209 - DNA, 350 bp, Homo sapiens
gtacatactggttaaaaaaaaaatcaaacagtactaccaaacagtagaaaatatttacgattaaaaaaaaaaagtatctttggtacccttccttagtcccctcagtaaagagacaaacatcactggtagttttctacccctgtagtaccttatagagtaattttgccttattcatcacagacaggtcacctctggacatggaattctaataacaaggacgctctatcaccaaagtcctactgttgaaccttctccagactccagtactatgacccctccatttcccttctgttctcagtcttctctcattcttgcttccttccctgctggcctacatgtagtgattcatc

SEQ ID NO: 65210 - DNA, 468 bp, Homo sapiens
attcacccatcaagatatactgagttcctcaaccctgccccggactaggctaggtttctgggatacacatgtgaacaaggtagatgcagtccccatgctctcattaacttgcattacaaaaaatcacccaagagcacgttaagacatagatctccaagtcccgctcccagattttctgacgatgcccaggagtctacacgtttaatacacatcccaggttaaataaaaagaaagaagatgactggagagtttacgtcaggaggaccccacagcctcccgagtttcctccctcccttcacactgccccttcctgagcttcccgtcatcagccctgtcatctccgtgccacgttcctgctgtggccatccccactctctcgcccctttcatgccatctctgggggtgatcccaatgtgccttcagtcgagcaactctgggttccaaataaatctatgttctcttggaaga

SEQ ID NO: 65211 - DNA, 745 bp, Homo sapiens
tttagggccattaattctgaccacgtgcctgagaggcaaggtggatggccctgggacagaaactgttcatcactatgtcccggggagcaggacgtctgcagggcacgctgtgggctctcgtcttcctaggcatcctagtgggcatggtggtgccctcgcctgcaggcacccgtgccaacaacacgctgctggactcgaggggctggggcaccctgctgtccaggtctcgcgcggggctagctggagagattgccggggtgaactgggaaagtggctatttggtggggatcaagcggcagcggaggctctactgcaacgtgggcatcggctttcacctccaggtgctccccgacggccggatcagcgggacccacgaggagaacccctacagcctgctggaaatttccactgtggagcgaggcgtggtgagtctctttggagtgagaagtgccctcttcgttgccatgaacagtaaaggaagattgtacgcaacggttaaataaaaagaaagaagatgactggagagtttacgtcaggaggaccccacagcctcccgagtttcctccctcccttcacactgccccttcctgagcttcccgtcatcagccctgtcatctccgtgccacgttcctgctgtggccatccccactctctcgcccctttcatgccatctctgggggtgatcccaatgtgccttcagtcgagcaactctgggttccaaataaatctatgttctcttggaaga

SEQ ID NO: 65212 - DNA, 744 bp, Homo sapiens
tttagggccattaattctgaccacgtgcctgagaggcaaggtggatggccctgggacagaaactgttcatcactatgtcccggggagcaggacgtctgcagggcacgctgtgggctctcgtcttcctaggcatcctagtgggcatggtggtgccctcgcctgcaggcacccgtgccaacaacacgctgctggactcgaggggctggggcaccctgctgtccaggtctcgcgcggggctagctggagagattgccggggtgaactgggaaagtggctatttggtggggatcaagcggcagcggaggctctactgcaacgtgggcatcggctttcacctccaggtgctccccgacggccggatcagcgggacccacgaggagaacccctacagcctgctggaaatttccactgtggagcgaggcgtggtgagtctctttggagtgagaagtgccctcttcgttgccatgaacagtaaaggaagattgtacgcaacgcccagcttccaagaagaatgcaagttcagagaaaccctcctgcccaacaattacaatgcctacgagtcagacttgtaccaagggacctacattgccctgagcaaatacggacgggtaaagcggggcagcaaggtgtccccgatcatgactgtcactcatttccttcccaggatctaaggacccacaaaagaaggcttacagatttaaagcatcatctgttcgattgaaattttgcaccagcgaagaattc

SEQ ID NO: 65213 - DNA, 883 bp, Homo sapiens
tttagggccattaattctgaccacgtgcctgagaggcaaggtggatggccctgggacagaaactgttcatcactatgtcccggggagcaggacgtctgcagggcacgctgtgggctctcgtcttcctaggcatcctagtgggcatggtggtgccctcgcctgcaggcacccgtgccaacaacacgctgctggactcgaggggctggggcaccctgctgtccaggtctcgcgcggggctagctggagagattgccggggtgaactgggaaagtggctatttggtggggatcaagcggcagcggaggctctactgcaacgtgggcatcggctttcacctccaggtgctccccgacggccggatcagcgggacccacgaggagaacccctacagcctgctggaaatttccactgtggagcgaggcgtggtgagtctctttggagtgagaagtgccctcttcgttgccatgaacagtaaaggaagattgtacgcaacggctgcagagggcttcacgagcatgatctcacagcacccctaggaggtgcatttgatcttcatcctccctgtgcagctgcggacacccggtctccagggtcacacgtccagccacagctgtgtgcagccccgtctcagggctccgcgacccgagttccagttcctggccaacctaccctccagctactcgtcttactttgggcaacgtcactgaacttctctgggcctggatctctgctctctgaggatgaggcagaaatcagtgaattctagcccccttggtcccctttgaaattcagaaaacaaaatatcaaggatctccacctgacagtggttctattagaatcctttggttgagaaaaatatatactagtaaaaagataccagcaa

SEQ ID NO: 65214 - DNA, 780 bp, Homo sapiens
cggacgcgtgggtcgacccacgcgtcggtactcccaactgtggtcgcgctctcaccccttctgctgctctcgtggccccctcgcgatggcgggcatcctgtttgaggatattttcgatgtgaaggatattgacccggagggcaagaagtttgaccgagtgtctcgactgcattgtgagagtgaatctttcaagatggatctaatcttagatgtaaacattcaaatttaccctgtagacttgggtgacaagtttcggttggtcatagctagtaccttgtatgaagatggtaccctggatgatggtgaatacaaccccactgatgataggccttccagggctgaccagtttgagtatgtaatgtatggaaaagtgtacaggattgagggagatgaaacttctactgaagcagcaacacgcctctctgcgtacgtgtcctatgggggcctgctcatgaggctgcagggggatgccaacaacctgcatggattcgaggtggactccagagtttatctcctgatgaagaagctagccttctgaacctcgcctgaagccagcctctctgccaagtcactcaggtcatgggcattgttcaagcctgagtggcagccgctcttgctcacctgttgaggaagggctggctcactgtccaccgtggcggcatctttaactggcctccactcaatgggaaactgactcgcctgtgaaagacacagtgggagagctgaaaatgaatcagaagctttatgtatatgatttttaaattaaactttactttttca

SEQ ID NO: 65215 - DNA, 260 bp, Homo sapiens
gcggccgcctactactactactactgctcgaattcaagcttctaacgatgtacggggtcatgggcattgttcaagcctgagtggcagccgctcttgctcacctgttgaggaagggctggctcactgtccaccgtggcggcatctttaactggcctccactcaatgggaaactgactcgcctgtgaaagacacagtgggagagctgaaaatgaatcagaagctttatgtatatgatttttaaattaaactttactttttca

SEQ ID NO: 65216 - DNA, 1842 bp, Homo sapiens
cggcccagccaggctggggtccgcgcggggcctcccgagaggcggcaaggggcgctgggaaggcgcaagcccgcgccggctccctgcggatgcccgggtcggagaggggcgcccgggaggggcgggtctactggcacgtggaggggccggcccgggttcgcggttccccgtgcccaggcaggaggggctgcagacgcctgagctccgtaggggttggggctgggggctgcggagctgtctacatcggactcctccgggtcagcccgttaggagccgcctcccctctgcccctccgaagagacgagcggcccagacaggcctgggaaggcccctctgccccgtcaggggtgaaaagcaaagctggaaggattcggagagggttggggccgtcttcctcatccttccttttctcggggctcccgtggcgacgtcatggcaaattcccaaactggacggatccggctcgggttacgtccagcagggccgagccggcccaggccggccccggggtcctcggtgccggctggaggggctgggcacctctggggcggggttctgctccacctgccctcggcgcggactgtgccctcggcgggcacgcggaccggcggggtagggctagggcccggcttctctgggccaaggatcaaggtccctgcctgggttaggcccccacgcattccagtcttcggaacccggcctctgaagagggcgcagtagggccccagcggagcgcgagaacccgctctacagcctattgcttccccgccctgggcagagccacctggacatgagacccgccctcaatgccgaagcctctcggaagcaatctttcgggacggaagttaagtagccccgagcgggaggctgtggcggaagtggtcgcgttaccgcttgtttgtgcgcatgcgccactctcgtctggccgccgcgctttcaggaggtgcttttggttctctccggtcttgtccacgctagggggtgcacgtactcccaactgtggtcgcgctctcaccccttctgctgctctcgtggccccctcgcgatggcgggcatcctgtttgaggatattttcgatgtgaaggatattgacccggagggcaagaagtttgaccgagtgtctcgactgcattgtgagagtgaatctttcaagatggatctaatcttagatgtaaacattcaaatttaccctgtagacttgggtgacaagtttcggttggtcatagctagtaccttgtatgaagatggtaccctggatgatggtgaatacaaccccactgatgataggccttccagggctgaccagtttgagtatgtaatgtatggaaaagtgtacaggattgagggagatgaaacttctactgaagcagcaacacgcctctctgcgtacgtgtcctatgggggcctgctcatgaggctgcagggggatgccaacaacctgcatggattcgaggtggactccagagtttatctcctgatgaagaagctagccttctgaacctcgcctgaagccagcctctctgccaagtcactcaggtcatgggcattgttcaagcctgagtggcagccgctcttgctcacctgttgaggaagggctggctcactgtccaccgtggcggcatctttaactggcctccactcaatgggaaactgactcgcctgtgaaagacacagtgggagagctgaaaatgaatcagaagctttatgtatatgatttttaaattaaactttactttttcagactgcccctcccctttttgtaaaaagtccatttactgtaaaatcgttttttccaaaaaaaaaatcaaccaaaacttttcggccgctggccccaaaaatcta

SEQ ID NO: 65217 - DNA, 2210 bp, Homo sapiens
cggcccagccaggctggggtccgcgcggggcctcccgagaggcggcaaggggcgctgggaaggcgcaagcccgcgccggctccctgcggatgcccgggtcggagaggggcgcccgggaggggcgggtctactggcacgtggaggggccggcccgggttcgcggttccccgtgcccaggcaggaggggctgcagacgcctgagctccgtaggggttggggctgggggctgcggagctgtctacatcggactcctccgggtcagcccgttaggagccgcctcccctctgcccctccgaagagacgagcggcccagacaggcctgggaaggcccctctgccccgtcaggggtgaaaagcaaagctggaaggattcggagagggttggggccgtcttcctcatccttccttttctcggggctcccgtggcgacgtcatggcaaattcccaaactggacggatccggctcgggttacgtccagcagggccgagccggcccaggccggccccggggtcctcggtgccggctggaggggctgggcacctctggggcggggttctgctccacctgccctcggcgcggactgtgccctcggcgggcacgcggaccggcggggtagggctagggcccggcttctctgggccaaggatcaaggtccctgcctgggttaggcccccacgcattccagtcttcggaacccggcctctgaagagggcgcagtagggccccagcggagcgcgagaacccgctctacagcctattgcttccccgccctgggcagagccacctggacatgagacccgccctcaatgccgaagcctctcggaagcaatctttcgggacggaagttaagtagccccgagcgggaggctgtggcggaagtggtcgcgttaccgcttgtttgtgcgcatgcgccactctcgtctggccgccgcgctttcaggaggtgcttttggttctctccggtcttgtccacgctagggggtgcacgtactcccaactgtggtcgcgctctcaccccttctgctgctctcgtggccccctcgcgatggcgggcatcctgtttgaggatattttcgatgtgaaggatattgacccggagggcaagaagtttgaccgagtgtctcgactgcattgtgagagtgaatctttcaagatggatctaatcttagatgtaaacattcaaatttaccctgtagacttgggtgacaagtttcggttggtcatagctagtaccttgtatgaagatggtaccctggatgatggtgaatacaaccccactgatgataggccttccagggctgaccagtttgagtatgtaatgtatggaaaagtgtacaggattgagggagatgaaacttctactgaagcagcaacacgcctctctgcgtacgtgtcctatgggggcctgctcatgaggctgcagggggatgccaacaacctgcatggattcgaggtggactccagagtttatctcctgatgaagaagctagccttctgaacctcgcctgaagccagcctctctgccaagtcactcaggtcatgggcattgttcaagcctgagtggcagccgctcttgctcacctgttgaggaagggctggctcactgtccaccgtggcggcatctttaactggcctccactcaatgggaaactgactcgcctgtgaaagacacagtgggagagctgaaaatgaatcagaagctttatgtatatgatttttaaattaaactttactttttcagactgcccctcccctttttgtaaaaagtccatttactgtaaaatcgttttttccaaaaaaaaaaaaaaaaaaaaaaaacacaaagaagaaaagaaagaaaaaacaaaaaaaagagggggggggggcgcaaaaaaaatatatccgcggaggggggcaccaagatctaagacagccgacccgcaactcttcggtgacacaaaggagggcaccccctaaggtgcgccgacaacataaacaaccacaacagacgcagcgcgggcactacaaacacgcgtctgcgagggggaaaacagtccgccaggcgcaactgggggggaagaacccccccacaggcggggcggaagaagggcggcacacaccccaggcgaaaatgagggcccgcgggaaaaaaacaaccggcggtcagagggacaaccaccgcctaagcggaggcggaaaaagcgacaggcagagtcgaaaacattacagaa

SEQ ID NO: 65218 - DNA, 894 bp, Homo sapiens
  misc_feature (11)..(11): n is a, c, g, or t
  misc_feature (34)..(34): n is a, c, g, or t
tgagagggaanacaacataggctaggtacgaggnctgggtgttatccaactgtggtcgcgctctcaccccttctgctgctctcgtggccccctcgcgatggcgggcatcctgtttgaggatattttcgatgtgaaggatattgacccggagggcaagaagtttgaccgagtgtctcgactgcattgtgagagtgaatctttcaagatggatctaatcttagatgtaaacattcaaatttaccctgtagacttgggtgacaagtttcggttggtcatagctagtaccttgtatgaagatggtaccctggatgatggtgaatacaaccccactgatgataggccttccagggctgaccagtttgagtatgtaatgtatggaaaagtgtacaggattgagggagatgaaacttctactgaagcagcaacacgcctctctgcgtacgtgtcctatgggggcctgctcatgaggctgcagggggatgccaacaacctgcatggattcgaggtggactccagagtttatctcctgatgaagaagctagccttctgaacctcgcctgaagccagcctctctgccaagtcactcaggtcatgggcattgttcaagcctgagtggcagccgctcttgctcacctgttgaggaagggctggctcactgtccaccgtggcggcatctttaactggcctccactcaatgggaaactgactcgcctgtgaaagacacagtgggagagctgaaaatgaatcagaagctttatgtatatgatttttaaattaaactttactttttcagactgcccctcccctttttgtaaaaagtccatttactgtaaaatcgttttttccaaaaaaaaaatcaaccaaaacttttcggccgctggccccaaaaatcta

SEQ ID NO: 65219 - DNA, 783 bp, Homo sapiens
acgcgtccgcccacgcgtccggaaggatattgacccggagggcaagaagtttgaccgagtgtctcgactgcattgtgagagtgaatctttcaagatggatctaatcttagatgtaaacattcaaatttaccctgtagacttgggtgacaagtttcggttggtcatagctagtaccttgtatgaagatggtaccctggatgatggtgaatacaaccccactgatgataggccttccagggctgaccagtttgagtatgtaatgtatggaaaagtgtacaggattgagggagatgaaacttctactgaagcagcaacacgcctctctgcgtacgtgtcctatgggggcctgctcatgaggctgcagggggatgccaacaacctgcatggattcgaggtggactccagagtttatctcctgatgaagaagctagccttctgaacctcgcctgaagccagcctctctgccaagtcactcaggtcatgggcattgttcaagcctgagtggcagccgctcttgctcacctgttgaggaagggctggctcactgtccaccgtggcggcatctttaactggcctccactcaatgggaaactgactcgcctgtgaaagacacagtgggagagctgaaaatgaatcagaagctttatgtatatgatttttaaattaaactttactttttcagactgcccctcccctttttgtaaaaagtccatttactgtaaaatcgttttttccaaaaaaaaaatcaaccaaaacttttcggccgctggccccaaaaatcta

SEQ ID NO: 65220 - DNA, 1740 bp, Homo sapiens
cggcccagccaggctggggtccgcgcggggcctcccgagaggcggcaaggggcgctgggaaggcgcaagcccgcgccggctccctgcggatgcccgggtcggagaggggcgcccgggaggggcgggtctactggcacgtggaggggccggcccgggttcgcggttccccgtgcccaggcaggaggggctgcagacgcctgagctccgtaggggttggggctgggggctgcggagctgtctacatcggactcctccgggtcagcccgttaggagccgcctcccctctgcccctccgaagagacgagcggcccagacaggcctgggaaggcccctctgccccgtcaggggtgaaaagcaaagctggaaggattcggagagggttggggccgtcttcctcatccttccttttctcggggctcccgtggcgacgtcatggcaaattcccaaactggacggatccggctcgggttacgtccagcagggccgagccggcccaggccggccccggggtcctcggtgccggctggaggggctgggcacctctggggcggggttctgctccacctgccctcggcgcggactgtgccctcggcgggcacgcggaccggcggggtagggctagggcccggcttctctgggccaaggatcaaggtccctgcctgggttaggcccccacgcattccagtcttcggaacccggcctctgaagagggcgcagtagggccccagcggagcgcgagaacccgctctacagcctattgcttccccgccctgggcagagccacctggacatgagacccgccctcaatgccgaagcctctcggaagcaatctttcgggacggaagttaagtagccccgagcgggaggctgtggcggaagtggtcgcgttaccgcttgtttgtgcgcatgcgccactctcgtctggccgccgcgctttcaggaggtgcttttggttctctccggtcttgtccacgctagggggtgcacgtactcccaactgtggtcgcgctctcaccccttctgctgctctcgtggccccctcgcgatggcgggcatcctgtttgaggatattttcgatgtgaaggatattgacccggagggcaagaagtttgaccgagtgtctcgactgcattgtgagagtgaatctttcaagatggatctaatcttagatgtaaacattcaaatttaccctgtagacttgggtgacaagtttcggttggtcatagctagtaccttgtatgaagatggtaccctggatgatggtgaatacaaccccactgatgataggccttccagggctgaccagtttgagtatgtaatgtatggaaaagtgtacaggattgagggagatgaaacttctactgaagcagcaacacgcctctctgcgtacgtgtcctatgggggcctgctcatgaggctgcagggggatgccaacaacctgcatggattcgaggtggactccagagtttatctcctgatgaagaagctagccttctgaacctcgcctgaagccagcctctctgccaagtcactcaggtcatgggcattgttcaagcctgagtggcagccgctcttgctcacctgttgaggaagggctggctcactgtccaccgtggcggcatctttaactggcctccactcaatgggaaactgactcgcctgtgaaagacacagtgggagagctgaaaatgaatcagaagctttatgtatatgatttttaaattaaactttactttttca

SEQ ID NO: 65221 - DNA, 2155 bp, Homo sapiens
cggcccagccaggctggggtccgcgcggggcctcccgagaggcggcaaggggcgctgggaaggcgcaagcccgcgccggctccctgcggatgcccgggtcggagaggggcgcccgggaggggcgggtctactggcacgtggaggggccggcccgggttcgcggttccccgtgcccaggcaggaggggctgcagacgcctgagctccgtaggggttggggctgggggctgcggagctgtctacatcggactcctccgggtcagcccgttaggagccgcctcccctctgcccctccgaagagacgagcggcccagacaggcctgggaaggcccctctgccccgtcaggggtgaaaagcaaagctggaaggattcggagagggttggggccgtcttcctcatccttccttttctcggggctcccgtggcgacgtcatggcaaattcccaaactggacggatccggctcgggttacgtccagcagggccgagccggcccaggccggccccggggtcctcggtgccggctggaggggctgggcacctctggggcggggttctgctccacctgccctcggcgcggactgtgccctcggcgggcacgcggaccggcggggtagggctagggcccggcttctctgggccaaggatcaaggtccctgcctgggttaggcccccacgcattccagtcttcggaacccggcctctgaagagggcgcagtagggccccagcggagcgcgagaacccgctctacagcctattgcttccccgccctgggcagagccacctggacatgagacccgccctcaatgccgaagcctctcggaagcaatctttcgggacggaagttaagtagccccgagcgggaggctgtggcggaagtggtcgcgttaccgcttgtttgtgcgcatgcgccactctcgtctggccgccgcgctttcaggaggtgcttttggttctctccggtcttgtccacgctagggggtgcacgtactcccaactgtggtcgcgctctcaccccttctgctgctctcgtggccccctcgcgatggcgggcatcctgtttgaggatattttcgatgtgaaggatattgacccggagggcaagaagtttgaccgagtgtctcgactgcattgtgagagtgaatctttcaagatggatctaatcttagatgtaaacattcaaatttaccctgtagacttgggtgacaagtttcggttggtcatagctagtaccttgtatgaagatggtaccctggatgatggtgaatacaaccccactgatgataggccttccagggctgaccagtttgagtatgtaatgtatggaaaagtgtacaggattgagggagatgaaacttctactgaagcagcaacacgcctctctgcgtacgtgtcctatgggggcctgctcatgaggctgcagggggatgccaacaacctgcatggattcgaggtggactccagagtttatctcctgatgaagaagctagccttctgaacctcgcctgaagccagcctctctgccaagtcactcaggtcatgggcattgttcaagcctgagtggcagccgctcttgctcacctgttgaggaagggctggctcactgtccaccgtggcggcatctttaactggcctccactcaatgggaaactgactcgcctgtgaaagacacagtgggagagctgaaaatgaatcagaagctttatgtatatgatttttaaattaaactttactttttcaaaaaaaaaaaaaaaaaaaaaaaacacaaagaagaaaagaaagaaaaaacaaaaaaaagagggggggggggcgcaaaaaaaatatatccgcggaggggggcaccaagatctaagacagccgacccgcaactcttcggtgacacaaaggagggcaccccctaaggtgcgccgacaacataaacaaccacaacagacgcagcgcgggcactacaaacacgcgtctgcgagggggaaaacagtccgccaggcgcaactgggggggaagaacccccccacaggcggggcggaagaagggcggcacacaccccaggcgaaaatgagggcccgcgggaaaaaaacaaccggcggtcagagggacaaccaccgcctaagcggaggcggaaaaagcgacaggcagagtcgaaaacattacagaa

SEQ ID NO: 65222 - DNA, 2126 bp, Homo sapiens
cggcccagccaggctggggtccgcgcggggcctcccgagaggcggcaaggggcgctgggaaggcgcaagcccgcgccggctccctgcggatgcccgggtcggagaggggcgcccgggaggggcgggtctactggcacgtggaggggccggcccgggttcgcggttccccgtgcccaggcaggaggggctgcagacgcctgagctccgtaggggttggggctgggggctgcggagctgtctacatcggactcctccgggtcagcccgttaggagccgcctcccctctgcccctccgaagagacgagcggcccagacaggcctgggaaggcccctctgccccgtcaggggtgaaaagcaaagctggaaggattcggagagggttggggccgtcttcctcatccttccttttctcggggctcccgtggcgacgtcatggcaaattcccaaactggacggatccggctcgggttacgtccagcagggccgagccggcccaggccggccccggggtcctcggtgccggctggaggggctgggcacctctggggcggggttctgctccacctgccctcggcgcggactgtgccctcggcgggcacgcggaccggcggggtagggctagggcccggcttctctgggccaaggatcaaggtccctgcctgggttaggcccccacgcattccagtcttcggaacccggcctctgaagagggcgcagtagggccccagcggagcgcgagaacccgctctacagcctattgcttccccgccctgggcagagccacctggacatgagacccgccctcaatgccgaagcctctcggaagcaatctttcgggacggaagttaagtagccccgagcgggaggctgtggcggaagtggtcgcgttaccgcttgtttgtgcgcatgcgccactctcgtctggccgccgcgctttcaggaggtgcttttggttctctccggtcttgtccacgctagggggtgcacgtactcccaactgtggtcgcgctctcaccccttctgctgctctcgtggccccctcgcgatggcgggcatcctgtttgaggatattttcgatgtgaaggatattgacccggagggcaagaagtttgaccgagtgtctcgactgcattgtgagagtgaatctttcaagatggatctaatcttagatgtaaacattcaaatttaccctgtagacttgggtgacaagtttcggttggtcatagctagtaccttgtatgaagatggtaccctggatgatggtgaatacaaccccactgatgataggccttccagctctgcgtacgtgtcctatgggggcctgctcatgaggctgcagggggatgccaacaacctgcatggattcgaggtggactccagagtttatctcctgatgaagaagctagccttctgaacctcgcctgaagccagcctctctgccaagtcactcaggtcatgggcattgttcaagcctgagtggcagccgctcttgctcacctgttgaggaagggctggctcactgtccaccgtggcggcatctttaactggcctccactcaatgggaaactgactcgcctgtgaaagacacagtgggagagctgaaaatgaatcagaagctttatgtatatgatttttaaattaaactttactttttcagactgcccctcccctttttgtaaaaagtccatttactgtaaaatcgttttttccaaaaaaaaaaaaaaaaaaaaaaaacacaaagaagaaaagaaagaaaaaacaaaaaaaagagggggggggggcgcaaaaaaaatatatccgcggaggggggcaccaagatctaagacagccgacccgcaactcttcggtgacacaaaggagggcaccccctaaggtgcgccgacaacataaacaaccacaacagacgcagcgcgggcactacaaacacgcgtctgcgagggggaaaacagtccgccaggcgcaactgggggggaagaacccccccacaggcggggcggaagaagggcggcacacaccccaggcgaaaatgagggcccgcgggaaaaaaacaaccggcggtcagagggacaaccaccgcctaagcggaggcggaaaaagcgacaggcagagtcgaaaacattacagaa

SEQ ID NO: 65223 - DNA, 2156 bp, Homo sapiens
cggcccagccaggctggggtccgcgcggggcctcccgagaggcggcaaggggcgctgggaaggcgcaagcccgcgccggctccctgcggatgcccgggtcggagaggggcgcccgggaggggcgggtctactggcacgtggaggggccggcccgggttcgcggttccccgtgcccaggcaggaggggctgcagacgcctgagctccgtaggggttggggctgggggctgcggagctgtctacatcggactcctccgggtcagcccgttaggagccgcctcccctctgcccctccgaagagacgagcggcccagacaggcctgggaaggcccctctgccccgtcaggggtgaaaagcaaagctggaaggattcggagagggttggggccgtcttcctcatccttccttttctcggggctcccgtggcgacgtcatggcaaattcccaaactggacggatccggctcgggttacgtccagcagggccgagccggcccaggccggccccggggtcctcggtgccggctggaggggctgggcacctctggggcggggttctgctccacctgccctcggcgcggactgtgccctcggcgggcacgcggaccggcggggtagggctagggcccggcttctctgggccaaggatcaaggtccctgcctgggttaggcccccacgcattccagtcttcggaacccggcctctgaagagggcgcagtagggccccagcggagcgcgagaacccgctctacagcctattgcttccccgccctgggcagagccacctggacatgagacccgccctcaatgccgaagcctctcggaagcaatctttcgggacggaagttaagtagccccgagcgggaggctgtggcggaagtggtcgcgttaccgcttgtttgtgcgcatgcgccactctcgtctggccgccgcgctttcaggaggtgcttttggttctctccggtcttgtccacgctagggggtgcacgtactcccaactgtggtcgcgctctcaccccttctgctgctctcgtggccccctcgcgatggcgggcatcctgtttgaggatattttcgatgtgaaggatattgacccggagggcaagaagtttgaccgagtgtctcgactgcattgtgagagtgaatctttcaagatggatctaatcttagatgtaaacattcaaatttaccctgtagacttgggtgacaagtttcggttggtcatagctagtaccttgtatgaagatggtaccctggatgatggtgaatacaaccccactgatgataggccttccagggctgaccagtttgagtatgtaatgtatggctctgcgtacgtgtcctatgggggcctgctcatgaggctgcagggggatgccaacaacctgcatggattcgaggtggactccagagtttatctcctgatgaagaagctagccttctgaacctcgcctgaagccagcctctctgccaagtcactcaggtcatgggcattgttcaagcctgagtggcagccgctcttgctcacctgttgaggaagggctggctcactgtccaccgtggcggcatctttaactggcctccactcaatgggaaactgactcgcctgtgaaagacacagtgggagagctgaaaatgaatcagaagctttatgtatatgatttttaaattaaactttactttttcagactgcccctcccctttttgtaaaaagtccatttactgtaaaatcgttttttccaaaaaaaaaaaaaaaaaaaaaaaacacaaagaagaaaagaaagaaaaaacaaaaaaaagagggggggggggcgcaaaaaaaatatatccgcggaggggggcaccaagatctaagacagccgacccgcaactcttcggtgacacaaaggagggcaccccctaaggtgcgccgacaacataaacaaccacaacagacgcagcgcgggcactacaaacacgcgtctgcgagggggaaaacagtccgccaggcgcaactgggggggaagaacccccccacaggcggggcggaagaagggcggcacacaccccaggcgaaaatgagggcccgcgggaaaaaaacaaccggcggtcagagggacaaccaccgcctaagcggaggcggaaaaagcgacaggcagagtcgaaaacattacagaa

SEQ ID NO: 65224 - DNA, 377 bp, Homo sapiens
gaagatgcctcttctgtttcttaggctgagatggaacagtgccttgcacatacctgtgcattgatctttgtcagaattttggttcctagtgacacaacagtaggaagatgcctcttctctttcttaggctgagattgagagctgctgagtggcagtgctccagaatcacgggatggggccttctgtttcagctctgcgtacgtgtcctatgggggcctgctcatgaggctgcagggggatgccaacaacctgcatggattcgaggtggactccagagtttatctcctgatgaagaagctagccttctgaacctcgcctgaagccagcctctctgccaagtcactcaggtcatgggcattgttcaagcctgagtggca

SEQ ID NO: 65225 - DNA, 1207 bp, Homo sapiens
  misc_feature (11)..(11): n is a, c, g, or t
  misc_feature (34)..(34): n is a, c, g, or t
tgagagggaanacaacataggctaggtacgaggnctgggtgttatccaactgtggtcgcgctctcaccccttctgctgctctcgtggccccctcgcgatggcgggcatcctgtttgaggatattttcgatgtgaaggatattgacccggagggcaagaagtttgaccgagtgtctcgactgcattgtgagagtgaatctttcaagatggatctaatcttagatgtaaacattcaaatttaccctgtagacttgggtgacaagtttcggttggtcatagctagtaccttgtatgaagatggtaccctggatgatggtgaatacaaccccactgatgataggccttccagggctgaccagtttgagtatgtaatgtatggaaaagtgtacaggattgagggagatgaaacttctactgaagcagcaacacgcctctctgcgtacgtgtcctatgggggcctgctcatgaggctgcagggggatgccaacaacctgcatggattcgaggtggactccagagtttatctcctgatgaagaagctagccttctgaacctcgcctgaagccagcctctctgccaagtcactcaggtcatgggcattgttcaagcctgagtggcagccgctcttgctcacctgttgaggaagggctggctcactgtccaccgtggcggcatctttaactggcctccactcaatgggaaactgactcgcctgtgaaagacacagtgggagagctgaaaatgaatcagaagctttatgtatatgatttttaaattaaactttactttttcaaaaaaaaaaaaaaaaaaaaaaaacacaaagaagaaaagaaagaaaaaacaaaaaaaagagggggggggggcgcaaaaaaaatatatccgcggaggggggcaccaagatctaagacagccgacccgcaactcttcggtgacacaaaggagggcaccccctaaggtgcgccgacaacataaacaaccacaacagacgcagcgcgggcactacaaacacgcgtctgcgagggggaaaacagtccgccaggcgcaactgggggggaagaacccccccacaggcggggcggaagaagggcggcacacaccccaggcgaaaatgagggcccgcgggaaaaaaacaaccggcggtcagagggacaaccaccgcctaagcggaggcggaaaaagcgacaggcagagtcgaaaacattacagaa

SEQ ID NO: 65226 - DNA, 1599 bp, Homo sapiens
cggcccagccaggctggggtccgcgcggggcctcccgagaggcggcaaggggcgctgggaaggcgcaagcccgcgccggctccctgcggatgcccgggtcggagaggggcgcccgggaggggcgggtctactggcacgtggaggggccggcccgggttcgcggttccccgtgcccaggcaggaggggctgcagacgcctgagctccgtaggggttggggctgggggctgcggagctgtctacatcggactcctccgggtcagcccgttaggagccgcctcccctctgcccctccgaagagacgagcggcccagacaggcctgggaaggcccctctgccccgtcaggggtgaaaagcaaagctggaaggattcggagagggttggggccgtcttcctcatccttccttttctcggggctcccgtgggcccccacgcattccagtcttcggaacccggcctctgaagagggcgcagtagggccccagcggagcgcgagaacccgctctacagcctattgcttccccgccctgggcagagccacctggacatgagacccgccctcaatgccgaagcctctcggaagcaatctttcgggacggaagttaagtagccccgagcgggaggctgtggcggaagtggtcgcgttaccgcttgtttgtgcgcatgcgccactctcgtctggccgccgcgctttcaggaggtgcttttggttctctccggtcttgtccacgctagggggtgcacgtactcccaactgtggtcgcgctctcaccccttctgctgctctcgtggccccctcgcgatggcgggcatcctgtttgaggatattttcgatgtgaaggatattgacccggagggcaagaagtttgaccgagtgtctcgactgcattgtgagagtgaatctttcaagatggatctaatcttagatgtaaacattcaaatttaccctgtagacttgggtgacaagtttcggttggtcatagctagtaccttgtatgaagatggtaccctggatgatggtgaatacaaccccactgatgataggccttccagggctgaccagtttgagtatgtaatgtatggaaaagtgtacaggattgagggagatgaaacttctactgaagcagcaacacgcctctctgcgtacgtgtcctatgggggcctgctcatgaggctgcagggggatgccaacaacctgcatggattcgaggtggactccagagtttatctcctgatgaagaagctagccttctgaacctcgcctgaagccagcctctctgccaagtcactcaggtcatgggcattgttcaagcctgagtggcagccgctcttgctcacctgttgaggaagggctggctcactgtccaccgtggcggcatctttaactggcctccactcaatgggaaactgactcgcctgtgaaagacacagtgggagagctgaaaatgaatcagaagctttatgtatatgatttttaaattaaactttactttttcagactgcccctcccctttttgtaaaaagtccatttactgtaaaatcgttttttccaaaaaaaaaatcaaccaaaacttttcggccgctggccccaaaaatcta

SEQ ID NO: 65227 - DNA, 1174 bp, Homo sapiens
gaagagctggtatccaagggacagggcagtgccaggctgaaggggcacggaggggatccgtgtccaggagaaggcagtggagggggaacgcgcagcactaagctggagggagccacctggacatgagacccgccctcaatgccgaagcctctcggaagcaatctttcgggacggaagttaagtagccccgagcgggaggctgtggcggaagtggtcgcgttaccgcttgtttgtgcgcatgcgccactctcgtctggccgccgcgctttcaggaggtgcttttggttctctccggtcttgtccacgctagggggtgcacgtactcccaactgtggtcgcgctctcaccccttctgctgctctcgtggccccctcgcgatggcgggcatcctgtttgaggatattttcgatgtgaaggatattgacccggagggcaagaagtttgaccgagtgtctcgactgcattgtgagagtgaatctttcaagatggatctaatcttagatgtaaacattcaaatttaccctgtagacttgggtgacaagtttcggttggtcatagctagtaccttgtatgaagatggtaccctggatgatggtgaatacaaccccactgatgataggccttccagggctgaccagtttgagtatgtaatgtatggaaaagtgtacaggattgagggagatgaaacttctactgaagcagcaacacgcctctctgcgtacgtgtcctatgggggcctgctcatgaggctgcagggggatgccaacaacctgcatggattcgaggtggactccagagtttatctcctgatgaagaagctagccttctgaacctcgcctgaagccagcctctctgccaagtcactcaggtcatgggcattgttcaagcctgagtggcagccgctcttgctcacctgttgaggaagggctggctcactgtccaccgtggcggcatctttaactggcctccactcaatgggaaactgactcgcctgtgaaagacacagtgggagagctgaaaatgaatcagaagctttatgtatatgatttttaaattaaactttactttttcagactgcccctcccctttttgtaaaaagtccatttactgtaaaatcgttttttccaaaaaaaaaatcaaccaaaacttttcggccgctggccccaaaaatcta

SEQ ID NO: 65228 - DNA, 903 bp, Homo sapiens
atattccccgagggcactactggcatcggaagcccctacgcgtcgcacgtactcccaactgtggtcgcgctctcaccccttctgctgctctcgtggccccctcgcgatggcgggcatcctgtttgaggatattttcgatgtgaaggatattgacccggagggcaagaagtttgaccgagtgtctcgactgcattgtgagagtgaatctttcaagatggatctaatcttagatgtaaacattcaaatttaccctgtagacttgggtgacaagtttcggttggtcatagctagtaccttgtatgaagatggtaccctggatgatggtgaatacaaccccactgatgataggccttccagggctgaccagtttgagtatgtaatgtatggaaaagtgtacaggattgagggagatgaaacttctactgaagcagcaacacgcctctctgcgtacgtgtcctatgggggcctgctcatgaggctgcagggggatgccaacaacctgcatggattcgaggtggactccagagtttatctcctgatgaagaagctagccttctgaacctcgcctgaagccagcctctctgccaagtcactcaggtcatgggcattgttcaagcctgagtggcagccgctcttgctcacctgttgaggaagggctggctcactgtccaccgtggcggcatctttaactggcctccactcaatgggaaactgactcgcctgtgaaagacacagtgggagagctgaaaatgaatcagaagctttatgtatatgatttttaaattaaactttactttttcagactgcccctcccctttttgtaaaaagtccatttactgtaaaatcgttttttccaaaaaaaaaatcaaccaaaacttttcggccgctggccccaaaaatcta

SEQ ID NO: 65229 - DNA, 793 bp, Homo sapiens
  misc_feature (33)..(33): n is a, c, g, or t
gcatacaatcccacactgtagtatctcccttgncgatacctctgtcactcttttcctgcttctccccagtgtctcgactgcattgtgagagtgaatctttcaagatggatctaatcttagatgtaaacattcaaatttaccctgtagacttgggtgacaagtttcggttggtcatagctagtaccttgtatgaagatggtaccctggatgatggtgaatacaaccccactgatgataggccttccagggctgaccagtttgagtatgtaatgtatggaaaagtgtacaggattgagggagatgaaacttctactgaagcagcaacacgcctctctgcgtacgtgtcctatgggggcctgctcatgaggctgcagggggatgccaacaacctgcatggattcgaggtggactccagagtttatctcctgatgaagaagctagccttctgaacctcgcctgaagccagcctctctgccaagtcactcaggtcatgggcattgttcaagcctgagtggcagccgctcttgctcacctgttgaggaagggctggctcactgtccaccgtggcggcatctttaactggcctccactcaatgggaaactgactcgcctgtgaaagacacagtgggagagctgaaaatgaatcagaagctttatgtatatgatttttaaattaaactttactttttcagactgcccctcccctttttgtaaaaagtccatttactgtaaaatcgttttttccaaaaaaaaaatcaaccaaaacttttcggccgctggccccaaaaatcta

SEQ ID NO: 65230 - DNA, 2274 bp, Homo sapiens
cggcccagccaggctggggtccgcgcggggcctcccgagaggcggcaaggggcgctgggaaggcgcaagcccgcgccggctccctgcggatgcccgggtcggagaggggcgcccgggaggggcgggtctactggcacgtggaggggccggcccgggttcgcggttccccgtgcccaggcaggaggggctgcagacgcctgagctccgtaggggttggggctgggggctgcggagctgtctacatcggactcctccgggtcagcccgttaggagccgcctcccctctgcccctccgaagagacgagcggcccagacaggcctgggaaggcccctctgccccgtcaggggtgaaaagcaaagctggaaggattcggagagggttggggccgtcttcctcatccttccttttctcggggctcccgtggcgacgtcatggcaaattcccaaactggacggatccggctcgggttacgtccagcagggccgagccggcccaggccggccccggggtcctcggtgccggctggaggggctgggcacctctggggcggggttctgctccacctgccctcggcgcggactgtgccctcggcgggcacgcggaccggcggggtagggctagggcccggcttctctgggccaaggatcaaggtccctgcctgggttaggcccccacgcattccagtcttcggaacccggcctctgaagagggcgcagtagggccccagcggagcgcgagaacccgctctacagcctattgcttccccgccctgggcagagccacctggacatgagacccgccctcaatgccgaagcctctcggaagcaatctttcgggacggaagttaagtagccccgagcgggaggctgtggcggaagtggtcgcgttaccgcttgtttgtgcgcatgcgccactctcgtctggccgccgcgctttcaggaggtgcttttggttctctccggtcttgtccacgctagggggtgcacgtactcccaactgtggtcgcgctctcaccccttctgctgctctcgtggccccctcgcgatggcgggcatcctgtttgaggatattttcgatgtgaaggatattgacccggagggcaagaagtttgaccgagtgtctcgactgcattgtgagagtgaatctttcaagatggatctaatcttagatgtaaacattcaaatttaccctgtagacttgggtgacaagtttcggttggtcatagctagtaccttgtatgaagatggtaccctggatgatggtgaatacaaccccactgatgataggccttccagggctgaccagtttgagtatgtaatgtatggaaaagtgtacaggattgagggagatgaaacttctactgaagcagcaacacgcctgctgagattgagagctgctgagtggcagtgctccagaatcacgggatggggccttctgtttcagctctgcgtacgtgtcctatgggggcctgctcatgaggctgcagggggatgccaacaacctgcatggattcgaggtggactccagagtttatctcctgatgaagaagctagccttctgaacctcgcctgaagccagcctctctgccaagtcactcaggtcatgggcattgttcaagcctgagtggcagccgctcttgctcacctgttgaggaagggctggctcactgtccaccgtggcggcatctttaactggcctccactcaatgggaaactgactcgcctgtgaaagacacagtgggagagctgaaaatgaatcagaagctttatgtatatgatttttaaattaaactttactttttcagactgcccctcccctttttgtaaaaagtccatttactgtaaaatcgttttttccaaaaaaaaaaaaaaaaaaaaaaaacacaaagaagaaaagaaagaaaaaacaaaaaaaagagggggggggggcgcaaaaaaaatatatccgcggaggggggcaccaagatctaagacagccgacccgcaactcttcggtgacacaaaggagggcaccccctaaggtgcgccgacaacataaacaaccacaacagacgcagcgcgggcactacaaacacgcgtctgcgagggggaaaacagtccgccaggcgcaactgggggggaagaacccccccacaggcggggcggaagaagggcggcacacaccccaggcgaaaatgagggcccgcgggaaaaaaacaaccggcggtcagagggacaaccaccgcctaagcggaggcggaaaaagcgacaggcagagtcgaaaacattacagaa

SEQ ID NO: 65231 - DNA, 1804 bp, Homo sapiens
cggcccagccaggctggggtccgcgcggggcctcccgagaggcggcaaggggcgctgggaaggcgcaagcccgcgccggctccctgcggatgcccgggtcggagaggggcgcccgggaggggcgggtctactggcacgtggaggggccggcccgggttcgcggttccccgtgcccaggcaggaggggctgcagacgcctgagctccgtaggggttggggctgggggctgcggagctgtctacatcggactcctccgggtcagcccgttaggagccgcctcccctctgcccctccgaagagacgagcggcccagacaggcctgggaaggcccctctgccccgtcaggggtgaaaagcaaagctggaaggattcggagagggttggggccgtcttcctcatccttccttttctcggggctcccgtggcgacgtcatggcaaattcccaaactggacggatccggctcgggttacgtccagcagggccgagccggcccaggccggccccggggtcctcggtgccggctggaggggctgggcacctctggggcggggttctgctccacctgccctcggcgcggactgtgccctcggcgggcacgcggaccggcggggtagggctagggcccggcttctctgggccaaggatcaaggtccctgcctgggttaggcccccacgcattccagtcttcggaacccggcctctgaagagggcgcagtagggccccagcggagcgcgagaacccgctctacagcctattgcttccccgccctgggcagagccacctggacatgagacccgccctcaatgccgaagcctctcggaagcaatctttcgggacggaagttaagtagccccgagcgggaggctgtggcggaagtggtcgcgttaccgcttgtttgtgcgcatgcgccactctcgtctggccgccgcgctttcaggaggtgcttttggttctctccggtcttgtccacgctagggggtgcacgtactcccaactgtggtcgcgctctcaccccttctgctgctctcgtggccccctcgcgatggcgggcatcctgtttgaggatattttcgatgtgaaggatattgacccggagggcaagaagtttgaccgagtgtctcgactgcattgtgagagtgaatctttcaagatggatctaatcttagatgtaaacattcaaatttaccctgtagacttgggtgacaagtttcggttggtcatagctagtaccttgtatgaagatggtaccctggatgatggtgaatacaaccccactgatgataggccttccagggctgaccagtttgagtatgtaatgtatggaaaagtgtacaggattgagggagatgaaacttctactgaagcagcaacacgcctgctgagattgagagctgctgagtggcagtgctccagaatcacgggatggggccttctgtttcagctctgcgtacgtgtcctatgggggcctgctcatgaggctgcagggggatgccaacaacctgcatggattcgaggtggactccagagtttatctcctgatgaagaagctagccttctgaacctcgcctgaagccagcctctctgccaagtcactcaggtcatgggcattgttcaagcctgagtggcagccgctcttgctcacctgttgaggaagggctggctcactgtccaccgtggcggcatctttaactggcctccactcaatgggaaactgactcgcctgtgaaagacacagtgggagagctgaaaatgaatcagaagctttatgtatatgatttttaaattaaactttactttttca

SEQ ID NO: 65232 - DNA, 385 bp, Homo sapiens
catggacccttcaatgatatggacactgaaactaaagcaaacagtgaaagattggtatcatagagaaacattcttagagaaatgaaaagccaataacgtcagacaagaaattatgatgtatttccataaagttaaaccaagtgtccttgcctcttctgcctcctcttccaccgcctccacctcttccatctctcccactcctgagatagcaaaccaactcctcttcctactcaacttgaagatggtgaggatgaggatgatgatccacttacacttaatgaagagtcaacatattctatctcccttatgattttattaacaatattttcttttctctagctgtgttattgtaagaaacagtattatataaatatgccgtaaagat

SEQ ID NO: 65233 - DNA, 390 bp, Homo sapiens
ccagctttacctttattcacatttttcctttagaaaagtttgtgttactttttgcctgaagaataatctatgttttattcttccatcaaagcctacctcatcaagtatgttttctgagtactttctagcctgagatatttcactgaattcctaatgtgatatacatttgattatataccatctttttattctattttattacaaaattttagatatccagaagataatgagggcctactgcgatggtgcacgccttgtaatctcagcactttgtggggctgaggtgggaggattgcttgagcccagcagtgggaggtttcagtgagctatgattgtgccactgcactctatcctggatgacaaagtgagaccctgtctcaaagaaacaaa

SEQ ID NO: 65234 - DNA, 472 bp, Homo sapiens
tggtagaggattcattctcttgctttgttgccaaagctggtcttgaactcctggtttcaagtggtcctcccacttctgcctcccaagtgctcagattacaggcatgagccataggacccagccagatacttgattttaatgacttacatgactgaaaaaaaggtaccttcggagattcatagatcctaatggaaaaactgatgctaattgaagaattgctgtactcctactgtttcaattctaaatgatcaattatgcaaagaattttgttgaactcagcaatgacattcctttcattcctgatctcaattagtttttctattatggctaattgacattgcatatatacacacaattaggtttaaaattcagtttttcaagctctttgttcagaagacttagattggttggaatagtcttttcatgtttttaaacattttgtaaactatatagataatgacttaaaaaataa

SEQ ID NO: 65235 - DNA, 609 bp, Homo sapiens
ctgaacactgcagcttgaatgagaatatcactgtcccagacaccaaagttaatttctatgcctggaagaggatggaggtcgggcagcaggccgtagaagtctggcagggcctggccctgctgtcggaagctgtcctgcggggccaggccctgttggtcaactcttcccagccgtgggagcccctgcagctgcatgtggataaagccgtcagtggccttcgcagcctcaccactctgcttcgggctctgggagcccagaaggaagccatctcccctccagatgcggcctcagctgctccactccgaacaatcactgctgacactttccgcaaactcttccgagtctactccaatttcctccggggaaagctgaagctgtacacaggggaggcctgcaggacaggggacagatgaccaggtgtgtccacctgggcatatccaccacctccctcaccaacattgcttgtgccacaccctcccccgccactcctgaaccccttgacaccggggtggtgggaaccatgaagacaggatgggggctggcctctggctctcatggggtccaagttttgtgtattcttcaacctcattgacaagaactgaaaccacc

SEQ ID NO: 65236 - DNA, 738 bp, Homo sapiens
ctgaacactgcagcttgaatgagaatatcactgtcccagacaccaaagttaatttctatgcctggaagaggatggaggtcgggcagcaggccgtagaagtctggcagggcctggccctgctgtcggaagctgtcctgcggggccaggccctgttggtcaactcttcccagccgtgggagcccctgcagctgcatgtggataaagccgtcagtggccttcgcagcctcaccactctgcttcgggctctgggagcccagaaggaagccatctcccctccagatgcggcctcagctgctccactccgaacaatcactgctgacactttccgcaaactcttccgagtctactccaatttcctccggggaaagctgaagctgtacacaggggaggcctgcaggacaggggacagatgaccaggtgtgtccacctgggcatatccaccacctccctcaccaacattgcttgtgccacaccctcccccgccactcctgaaccccgtcgaggggctctcagctcagcgccagcctgtcccatggacactccagtgccagcaatgacatctcaggggccagaggaactgtccagagagcaactctgagatctaaggatgtcacagggccaacttgagggcccagagcaggaagcattcagagagcagctttaaactcagggacagagccatgctgggaagacgcctgagctcactcggcaccctgcaaaatttgatgccaggacacg

SEQ ID NO: 65237 - DNA, 491 bp, Homo sapiens
tcaaaactcactttactcagttaagtgaggaaaggagagggacagtgggaaaagtaagtttgaggttagctggccctagtgattccctcccttttcgttctcttgacctggccctagggcgtcactcttagaagatcatagagattgctttctttagctgttttcttttgtgaggttgagctaaggctcctttgataggaaactagacaaaaaagtaggggcgggccaggcgcggaggctcacacctgtaatcccagcactttgggaggtggaggcaggtggatcacctgaggtcaggagttcgagaccagcccagccaacatggcaaaaccccgtttattgaaaattagcaggggatggtgcatgcgcctgtagtcccagctactttggaggtcaaggctggagaattgcttgaacctgggaagcagaggttgcagtgagcgaagattgcgccagtgcactccagcctaggcgactgagactgtctaaaa

SEQ ID NO: 65238 - DNA, 418 bp, Homo sapiens
tccaggctggttttgaactcctgatctcaaatgatctgcccttcttggcctcccaaagtgctgggattacaggtgtgagccaccgtgcctggcctaaaaaatatttttaaagacaggatctagctatgttgcctcagctggtcttgaactctcagtcttggcctcaagtgatccttctgtctcagccttctgagtagctggaagcacagctgtgagccagcacacctggcttttttttatttctaataaaaaagttaatagagtttcttgtttcactggacaaaatatgcatatataggaaggaaagacttttggacttgagattgcgctgaagaagaaaaatggaaaaattaagcattttagtctctcagtgtgttatttttgtagcttatacagatatgtctttttaaagtgtctt

SEQ ID NO: 65239 - DNA, 445 bp, Homo sapiens
tagggtcactcactgaaagactgaaacctaatcaaaggagcataaaatgcttcccctgtcatgtcattattaaaggtctattcataaaactctttttcccaagtacttcatgtccaagtattaagacaaaattgacagtccatactaaaaagcaaaaaacacaacttaaagagaaagagcaagcattagaaccagatccagacatggcagtgaggtttgaattgttagatagaaaatttaaaactacgataattaagatgttaagggctctaatagatagagtagagagcatgcaagaaaagatggacaaaaaaaaaaagagaaataacagatggacagtgtaagcagagagagagaaattctgagaaagaacccccccaaaaatgctagagataaacccactgtaagagaaattaagaatgccttttacgggcttactggtaga

SEQ ID NO: 65240 - DNA, 4217 bp, Homo sapiens
attcttccacccggcaccggctccgcaatgaacaacttcaggttcactgagctgagcggattccactcgctgtgccctcggagcctgcctgaatctcccgcccagtctcaaaccatgcagctgagtaactgcaagggcgcctttgaggagtagcacgcagagagtgtcaatgaagacctcaaagtctggagaaaaatgacctttcatggaataagaagtatacctccttctacatgtttttgtcttactgacctctgataactggaacacatgactctgggtctgtagaaagtcaactgatcaaactcatcctcaccatgcatcaactgttcagactggttttgggacaaaaagatctttcacgagctggggacctcttctccttagatgactctgagattgaagacagccttacagaagctttggagcaaattaagataattagctcatcttcagattaccaaaccaataacaatgaccaggcagtagttgaaatctgtatcacaagaatcacaacagccatcagagagaccgagtccattgaaaagcatgcaaaggcccttgtggggctctgggactcctgcttggaacataacctgagaccctttgggaaagacgaagacactcctcatgcaaaaatcgcatctgatatcatgagttgcattttacagaattacaaccgacccccagtgatggcattagccatccccattgcagtgaaattcctccacagaggcaacaaggaactgtgcaggaatatgtctaactacctgtctctggctgcaattaccaaggcagatctcctggctgatcacacggaagttatagtaaagagcatactccaaggtaacaccatgttgttgagagtgttacctgctgtgtatgaaaagcagcctcagccaattaatagacacctgacagaactcctggccttgatgtctcagctggaacagccagaacagtaccatctactacggcttttgcatgtagcagcaaagaaaaaacaactcgaggtagttcagaagtgtattcctttcctaattgggcatttgaaggattcaacccataatgacatcatcctaaacatcctcatagagatagcagtctatgagccagtggctttgaacagttttcttccaatgctgaaagagattggtgagagattcccctacctcactggacagatggcaaggatttatggagctgttgggcatgtggatgaagagagagccaggagctgcctgacatacctggtgagccaactggccaacatggagcattcgtttcaccatattctcctgctggagattaaaagcatcaccgacaccttctcctcaatcttgggccctcagagcagagacatcttccgcatgagcaacagcttcaccgccattgctaaactccttacccgacaactggaaaataccaaggctggaagtggcaggagaaaaatcagcactgaaattgaattccctgagaaactggaagaaaccaagctcatagtaactgaaaatgaagaccatgaaaaactccaagttaaaatccaggcttttgaagacaagataaatgcagggagcaatacccctggctctatcagaagatatagtctgggccaagtttctaaagaagaaagaaaaaacattagatttaacaggtcaaaaagtttggctttccacactatgctcacaaagggtgtgggttcagatgacggcgaagatgaaaacaggggagacataccagccagcatctctctttcagaaatagacccacttggccaaggaaatgacaagctgccgtttaagacagacactgagagatcacagctgggggagtcttcagtttcatacccaaatattatacatatagactcagagaatttgtcagaaactgttaaagaaaactcccaggaagaaactccagagacaactgcaagtcctatagaataccaagataagctctacttgcacttaaaaaaaaacctcagcaaagtgaaagcatatgccatggaaattggaaagaagattccagtccctgatcagtgtaccattgaagacactgtgagaagttgtgtagcaaagttgttcttcacctgctccctgaagggtcattactgcctatacagtaagtccagttttattctcatcagccaagaacctcagccatggatccagatcatgtttctatttcagcagagcctgtttcctgaacccctgtccattcagagtcattctgtgcaattcctcagagctctgtgggagaagacccaggcagggggtgctcacagctttgaaactgccatgatggagtccacgtttccacagcagaaggatctggaccaggtacagctccatctggaagaagtgaggttctttgacgtgtttggcttcagtgaaacagcaggagcatggcaatgcttcatgtgcaacaatcctgagaaagcaactgttgtaaatcaagatggccagcctctcatagaaggaaaacttaaagagaagcaagtcagatggaagttcatcaaaaggtggaaaacacgctattttacactggctggaaatcaacttctgtttcaaaaaggaaagtctaaagatgaccctgacgactgcccaatagaactcagcaaagtacagagtgtgaaggctgtggccaagaaacgcagggaccgctctctcccccgggctttcgaaatcttcacagacaataaaacctatgtctttaaggccaaggatgagaagaatgcagaagaatggctccagtgcatcaacgtggcagttgcccaagccaaagaaagggaaagtagagaagtaaccacatatctgtagggatttataagtcagccatgacaattatacaccacaggcattgtattatcattgccaatgtcaagaaaaagagctaaatttaccaagccatgttgttttttactaaataccaatggaattgttgtcctttaagaagaagggcctaaaatggcaggattcttagtaaatgtcatactctaacagctttagtattgacttcagaatatatctgatgcccacaaaaataaaataaaataaaaggagctacagagtatgccctcagatagtgtggggccaggaagggaaaagtcactgataaaagaacttctgtagatatgtcatttaaaactgtgagaaaacaacatgaaaagatgcctgaactctccatcctgaggaaagattagcacttctgatgaaaatcacagtctgtcaaaggtattaaaagaaaactttaaaaaaaaaaacctttagaaacgttgaactaatgtacactgagaaaaaccatataacttacttatagacatataattacatgatcctctcttactacaactgaggctaacacatggtaaaatggttcccaaatcaagccagttatgtcattaaatacttgtctttcagaattacttatttaattattccatttaagttcatataatataatctacagtttagatacttggacatatatcctgcccaaggcactaagtgtaatataggaaaaggatagaaagccattttctctatcttcaaaataatgtgccatctccgttaaaattaagactttaaagttctataattttttctttgtattcaactttttaatacctccaaattacaaacatctatttttttcactacatagatatataattacactatgatagacagaattctagagtgattctcaataatccatgccttggtataatcctctcccccattgagtgtgggtgggacatgtaacctgcttctaaccaacagaatatggcaaaagtgatgggatcatctctcccatattatgttatgttatataacaaaagtgaagagaagttgcagatatacataaggtttctaatcagctgactttgagttaatcaaagagatcccctgggtgggcctgacctaatcagactagtcctttaaaagagagtgaaccagtcagagactctctctcctattagccttaaataagcaagctgccatgagctctacggctgcaaggaaataagttttgtgaacaaccatgtgatcttggaagaagcatctgaacctcagataaaagcccagccccagccaacgccttgcttgcagctttgtgaaactctgagcagaggacccagctaaatcacgtttggactcctgacccacagaaactttcagataataaatgtatgctgttttaaatctaaaaaaagg

SEQ ID NO: 65241 - DNA, 532 bp, Homo sapiens
gtgttgatatagctcaatgttgtatatattattcaggagcagagtttattctaattacaaccgacccccagtgatggcattagccatccccattgcagtgaaattcctccacagaggcaacaaggaactgtgcaggaatatgtctaactacctgtctctggctgcaattaccaaggcagatctcctggctgatcacacggaagttatagtaaagagcatactccaagtttgaagaactgcatttccgtgcttctggtcacctgttcaactaccaactgtggagatcttatctctgtgtactgagtggaacacgtcactcagtggggtatgaaaaacctgtcttcatttgcttccaaaagcaagaaatgtcttttgttagataaaatacatcagaaaatgtgtaatgacttcttaaatgtgaacatgatttggataacaagcataaatactagcataaaaagccaaatagtacacctctgttaattgttacaacatttgaatgaataagaagctcaaattagttcatgcaaaa

SEQ ID NO: 65242 - DNA, 4356 bp, Homo sapiens
ggttgttaggcaaatctaattctttcaaactacagatctgctcagagaaatctgtaaatctagtgtagaaataagtgaagctttgcgtcaattgttaggtctaagcagaagtttgggagagagaagaaaagttactcatttgcctgattccgcacgagagtgtcaatgaagacctcaaagtctggagaaaaatgacctttcatggaataagaagtatacctccttctacatgtttttgtcttactgacctctgataactggaacacatgactctgggtctgtagaaagtcaactgatcaaactcatcctcaccatgcatcaactgttcagactggttttgggacaaaaagatctttcacgagctggggacctcttctccttagatgactctgagattgaagacagccttacagaagctttggagcaaattaagataattagctcatcttcagattaccaaaccaataacaatgaccaggcagtagttgaaatctgtatcacaagaatcacaacagccatcagagagaccgagtccattgaaaagcatgcaaaggcccttgtggggctctgggactcctgcttggaacataacctgagaccctttgggaaagacgaagacactcctcatgcaaaaatcgcatctgatatcatgagttgcattttacagaattacaaccgacccccagtgatggcattagccatccccattgcagtgaaattcctccacagaggcaacaaggaactgtgcaggaatatgtctaactacctgtctctggctgcaattaccaaggcagatctcctggctgatcacacggaagttatagtaaagagcatactccaaggtaacaccatgttgttgagagtgttacctgctgtgtatgaaaagcagcctcagccaattaatagacacctgacagaactcctggccttgatgtctcagctggaacagccagaacagtaccatctactacggcttttgcatgtagcagcaaagaaaaaacaactcgagcttgcaaataggaaggactcaatcagtatttgtgaatgagtgaattaatggataaatataaagagaagggagtgaacagatctgtgggattcttgggcattggaatcaacaggacatgatgattgcttggataacagctgctggtagttcagaagtgtattcctttcctaattgggcatttgaaggattcaacccataatgacatcatcctaaacatcctcatagagatagcagtctatgagccagtggctttgaacagttttcttccaatgctgaaagagattggtgagagattcccctacctcactggacagatggcaaggatttatggagctgttgggcatgtggatgaagagagagccaggagctgcctgacatacctggtgagccaactggccaacatggagcattcgtttcaccatattctcctgctggagattaaaagcatcaccgacaccttctcctcaatcttgggccctcagagcagagacatcttccgcatgagcaacagcttcaccgccattgctaaactccttacccgacaactggaaaataccaaggctggaagtggcaggagaaaaatcagcactgaaattgaattccctgagaaactggaagaaaccaagctcatagtaactgaaaatgaagaccatgaaaaactccaagttaaaatccaggcttttgaagacaagataaatgcagggagcaatacccctggctctatcagaagatatagtctgggccaagtttctaaagaagaaagaaaaaacattagatttaacaggtcaaaaagtttggctttccacactatgctcacaaagggtgtgggttcagatgacggcgaagatgaaaacaggggagacataccagccagcatctctctttcagaaatagacccacttggccaaggaaatgacaagctgccgtttaagacagacactgagagatcacagctgggggagtcttcagtttcatacccaaatattatacatatagactcagagaatttgtcagaaactgttaaagaaaactcccaggaagaaactccagagacaactgcaagtcctatagaataccaagataagctctacttgcacttaaaaaaaaacctcagcaaagtgaaagcatatgccatggaaattggaaagaagattccagtccctgatcagtgtaccattgaagacactgtgagaagttgtgtagcaaagttgttcttcacctgctccctgaagggtcattactgcctatacagtaagtccagttttattctcatcagccaagaacctcagccatggatccagatcatgtttctatttcagcagagcctgtttcctgaacccctgtccattcagagtcattctgtgcaattcctcagagctctgtgggagaagacccaggcagggggtgctcacagctttgaaactgccatgatggagtccacgtttccacagcagaaggatctggaccaggtacagctccatctggaagaagtgaggttctttgacgtgtttggcttcagtgaaacagcaggagcatggcaatgcttcatgtgcaacaatcctgagaaagcaactgttgtaaatcaagatggccagcctctcatagaaggaaaacttaaagagaagcaagtcagatggaagttcatcaaaaggtggaaaacacgctattttacactggctggaaatcaacttctgtttcaaaaaggaaagtctaaagatgaccctgacgactgcccaatagaactcagcaaagtacagagtgtgaaggctgtggccaagaaacgcagggaccgctctctcccccgggctttcgaaatcttcacagacaataaaacctatgtctttaaggccaaggatgagaagaatgcagaagaatggctccagtgcatcaacgtggcagttgcccaagccaaagaaagggaaagtagagaagtaaccacatatctgtagggatttataagtcagccatgacaattatacaccacaggcattgtattatcattgccaatgtcaagaaaaagagctaaatttaccaagccatgttgttttttactaaataccaatggaattgttgtcctttaagaagaagggcctaaaatggcaggattcttagtaaatgtcatactctaacagctttagtattgacttcagaatatatctgatgcccacaaaaataaaataaaataaaaggagctacagagtatgccctcagatagtgtggggccaggaagggaaaagtcactgataaaagaacttctgtagatatgtcatttaaaactgtgagaaaacaacatgaaaagatgcctgaactctccatcctgaggaaagattagcacttctgatgaaaatcacagtctgtcaaaggtattaaaagaaaactttaaaaaaaaaaacctttagaaacgttgaactaatgtacactgagaaaaaccatataacttacttatagacatataattacatgatcctctcttactacaactgaggctaacacatggtaaaatggttcccaaatcaagccagttatgtcattaaatacttgtctttcagaattacttatttaattattccatttaagttcatataatataatctacagtttagatacttggacatatatcctgcccaaggcactaagtgtaatataggaaaaggatagaaagccattttctctatcttcaaaataatgtgccatctccgttaaaattaagactttaaagttctataattttttctttgtattcaactttttaatacctccaaattacaaacatctatttttttcactacatagatatataattacactatgatagacagaattctagagtgattctcaataatccatgccttggtataatcctctcccccattgagtgtgggtgggacatgtaacctgcttctaaccaacagaatatggcaaaagtgatgggatcatctctcccatattatgttatgttatataacaaaagtgaagagaagttgcagatatacataaggtttctaatcagctgactttgagttaatcaaagagatcccctgggtgggcctgacctaatcagactagtcctttaaaagagagtgaaccagtcagagactctctctcctattagccttaaataagcaagctgccatgagctctacggctgcaaggaaataagttttgtgaacaaccatgtgatcttggaagaagcatctgaacctcagataaaagcccagccccagccaacgccttgcttgcagctttgtgaaactctgagcagaggacccagctaaatcacgtttggactcctgacccacagaaactttcagataataaatgtatgctgttttaaatctaaaaaaagg

SEQ ID NO: 65243 - DNA, 3869 bp, Homo sapiens
aagtggatgcaattgttgaggagaagagtgaaggagaagagaagagagcccgaaactaaacagggaggaatccaccatttagaagtctggcaggcaaagaggacaaggattaccaaaccaataacaatgaccaggcagtagttgaaatctgtatcacaagaatcacaacagccatcagagagaccgagtccattgaaaagcatgcaaaggcccttgtggggctctgggactcctgcttggaacataacctgagaccctttgggaaagacgaagacactcctcatgcaaaaatcgcatctgatatcatgagttgcattttacagaattacaaccgacccccagtgatggcattagccatccccattgcagtgaaattcctccacagaggcaacaaggaactgtgcaggaatatgtctaactacctgtctctggctgcaattaccaaggcagatctcctggctgatcacacggaagttatagtaaagagcatactccaaggtaacaccatgttgttgagagtgttacctgctgtgtatgaaaagcagcctcagccaattaatagacacctgacagaactcctggccttgatgtctcagctggaacagccagaacagtaccatctactacggcttttgcatgtagcagcaaagaaaaaacaactcgaggtagttcagaagtgtattcctttcctaattgggcatttgaaggattcaacccataatgacatcatcctaaacatcctcatagagatagcagtctatgagccagtggctttgaacagttttcttccaatgctgaaagagattggtgagagattcccctacctcactggacagatggcaaggatttatggagctgttgggcatgtggatgaagagagagccaggagctgcctgacatacctggtgagccaactggccaacatggagcattcgtttcaccatattctcctgctggagattaaaagcatcaccgacaccttctcctcaatcttgggccctcagagcagagacatcttccgcatgagcaacagcttcaccgccattgctaaactccttacccgacaactggaaaataccaaggctggaagtggcaggagaaaaatcagcactgaaattgaattccctgagaaactggaagaaaccaagctcatagtaactgaaaatgaagaccatgaaaaactccaagttaaaatccaggcttttgaagacaagataaatgcagggagcaatacccctggctctatcagaagatatagtctgggccaagtttctaaagaagaaagaaaaaacattagatttaacaggtcaaaaagtttggctttccacactatgctcacaaagggtgtgggttcagatgacggcgaagatgaaaacaggggagacataccagccagcatctctctttcagaaatagacccacttggccaaggaaatgacaagctgccgtttaagacagacactgagagatcacagctgggggagtcttcagtttcatacccaaatattatacatatagactcagagaatttgtcagaaactgttaaagaaaactcccaggaagaaactccagagacaactgcaagtcctatagaataccaagataagctctacttgcacttaaaaaaaaacctcagcaaagtgaaagcatatgccatggaaattggaaagaagattccagtccctgatcagtgtaccattgaagacactgtgagaagttgtgtagcaaagttgttcttcacctgctccctgaagggtcattactgcctatacagtaagtccagttttattctcatcagccaagaacctcagccatggatccagatcatgtttctatttcagcagagcctgtttcctgaacccctgtccattcagagtcattctgtgcaattcctcagagctctgtgggagaagacccaggcagggggtgctcacagctttgaaactgccatgatggagtccacgtttccacagcagaaggatctggaccaggtacagctccatctggaagaagtgaggttctttgacgtgtttggcttcagtgaaacagcaggagcatggcaatgcttcatgtgcaacaatcctgagaaagcaactgttgtaaatcaagatggccagcctctcatagaaggaaaacttaaagagaagcaagtcagatggaagttcatcaaaaggtggaaaacacgctattttacactggctggaaatcaacttctgtttcaaaaaggaaagtctaaagatgaccctgacgactgcccaatagaactcagcaaagtacagagtgtgaaggctgtggccaagaaacgcagggaccgctctctcccccgggctttcgaaatcttcacagacaataaaacctatgtctttaaggccaaggatgagaagaatgcagaagaatggctccagtgcatcaacgtggcagttgcccaagccaaagaaagggaaagtagagaagtaaccacatatctgtagggatttataagtcagccatgacaattatacaccacaggcattgtattatcattgccaatgtcaagaaaaagagctaaatttaccaagccatgttgttttttactaaataccaatggaattgttgtcctttaagaagaagggcctaaaatggcaggattcttagtaaatgtcatactctaacagctttagtattgacttcagaatatatctgatgcccacaaaaataaaataaaataaaaggagctacagagtatgccctcagatagtgtggggccaggaagggaaaagtcactgataaaagaacttctgtagatatgtcatttaaaactgtgagaaaacaacatgaaaagatgcctgaactctccatcctgaggaaagattagcacttctgatgaaaatcacagtctgtcaaaggtattaaaagaaaactttaaaaaaaaaaacctttagaaacgttgaactaatgtacactgagaaaaaccatataacttacttatagacatataattacatgatcctctcttactacaactgaggctaacacatggtaaaatggttcccaaatcaagccagttatgtcattaaatacttgtctttcagaattacttatttaattattccatttaagttcatataatataatctacagtttagatacttggacatatatcctgcccaaggcactaagtgtaatataggaaaaggatagaaagccattttctctatcttcaaaataatgtgccatctccgttaaaattaagactttaaagttctataattttttctttgtattcaactttttaatacctccaaattacaaacatctatttttttcactacatagatatataattacactatgatagacagaattctagagtgattctcaataatccatgccttggtataatcctctcccccattgagtgtgggtgggacatgtaacctgcttctaaccaacagaatatggcaaaagtgatgggatcatctctcccatattatgttatgttatataacaaaagtgaagagaagttgcagatatacataaggtttctaatcagctgactttgagttaatcaaagagatcccctgggtgggcctgacctaatcagactagtcctttaaaagagagtgaaccagtcagagactctctctcctattagccttaaataagcaagctgccatgagctctacggctgcaaggaaataagttttgtgaacaaccatgtgatcttggaagaagcatctgaacctcagataaaagcccagccccagccaacgccttgcttgcagctttgtgaaactctgagcagaggacccagctaaatcacgtttggactcctgacccacagaaactttcagataataaatgtatgctgttttaaatctaaaaaaagg

SEQ ID NO: 65244 - DNA, 3823 bp, Homo sapiens
tcacatccatatttcatcgtccatcaactcccagtcagcccaagatgggcttcggctataagattaccaaaccaataacaatgaccaggcagtagttgaaatctgtatcacaagaatcacaacagccatcagagagaccgagtccattgaaaagcatgcaaaggcccttgtggggctctgggactcctgcttggaacataacctgagaccctttgggaaagacgaagacactcctcatgcaaaaatcgcatctgatatcatgagttgcattttacagaattacaaccgacccccagtgatggcattagccatccccattgcagtgaaattcctccacagaggcaacaaggaactgtgcaggaatatgtctaactacctgtctctggctgcaattaccaaggcagatctcctggctgatcacacggaagttatagtaaagagcatactccaaggtaacaccatgttgttgagagtgttacctgctgtgtatgaaaagcagcctcagccaattaatagacacctgacagaactcctggccttgatgtctcagctggaacagccagaacagtaccatctactacggcttttgcatgtagcagcaaagaaaaaacaactcgaggtagttcagaagtgtattcctttcctaattgggcatttgaaggattcaacccataatgacatcatcctaaacatcctcatagagatagcagtctatgagccagtggctttgaacagttttcttccaatgctgaaagagattggtgagagattcccctacctcactggacagatggcaaggatttatggagctgttgggcatgtggatgaagagagagccaggagctgcctgacatacctggtgagccaactggccaacatggagcattcgtttcaccatattctcctgctggagattaaaagcatcaccgacaccttctcctcaatcttgggccctcagagcagagacatcttccgcatgagcaacagcttcaccgccattgctaaactccttacccgacaactggaaaataccaaggctggaagtggcaggagaaaaatcagcactgaaattgaattccctgagaaactggaagaaaccaagctcatagtaactgaaaatgaagaccatgaaaaactccaagttaaaatccaggcttttgaagacaagataaatgcagggagcaatacccctggctctatcagaagatatagtctgggccaagtttctaaagaagaaagaaaaaacattagatttaacaggtcaaaaagtttggctttccacactatgctcacaaagggtgtgggttcagatgacggcgaagatgaaaacaggggagacataccagccagcatctctctttcagaaatagacccacttggccaaggaaatgacaagctgccgtttaagacagacactgagagatcacagctgggggagtcttcagtttcatacccaaatattatacatatagactcagagaatttgtcagaaactgttaaagaaaactcccaggaagaaactccagagacaactgcaagtcctatagaataccaagataagctctacttgcacttaaaaaaaaacctcagcaaagtgaaagcatatgccatggaaattggaaagaagattccagtccctgatcagtgtaccattgaagacactgtgagaagttgtgtagcaaagttgttcttcacctgctccctgaagggtcattactgcctatacagtaagtccagttttattctcatcagccaagaacctcagccatggatccagatcatgtttctatttcagcagagcctgtttcctgaacccctgtccattcagagtcattctgtgcaattcctcagagctctgtgggagaagacccaggcagggggtgctcacagctttgaaactgccatgatggagtccacgtttccacagcagaaggatctggaccaggtacagctccatctggaagaagtgaggttctttgacgtgtttggcttcagtgaaacagcaggagcatggcaatgcttcatgtgcaacaatcctgagaaagcaactgttgtaaatcaagatggccagcctctcatagaaggaaaacttaaagagaagcaagtcagatggaagttcatcaaaaggtggaaaacacgctattttacactggctggaaatcaacttctgtttcaaaaaggaaagtctaaagatgaccctgacgactgcccaatagaactcagcaaagtacagagtgtgaaggctgtggccaagaaacgcagggaccgctctctcccccgggctttcgaaatcttcacagacaataaaacctatgtctttaaggccaaggatgagaagaatgcagaagaatggctccagtgcatcaacgtggcagttgcccaagccaaagaaagggaaagtagagaagtaaccacatatctgtagggatttataagtcagccatgacaattatacaccacaggcattgtattatcattgccaatgtcaagaaaaagagctaaatttaccaagccatgttgttttttactaaataccaatggaattgttgtcctttaagaagaagggcctaaaatggcaggattcttagtaaatgtcatactctaacagctttagtattgacttcagaatatatctgatgcccacaaaaataaaataaaataaaaggagctacagagtatgccctcagatagtgtggggccaggaagggaaaagtcactgataaaagaacttctgtagatatgtcatttaaaactgtgagaaaacaacatgaaaagatgcctgaactctccatcctgaggaaagattagcacttctgatgaaaatcacagtctgtcaaaggtattaaaagaaaactttaaaaaaaaaaacctttagaaacgttgaactaatgtacactgagaaaaaccatataacttacttatagacatataattacatgatcctctcttactacaactgaggctaacacatggtaaaatggttcccaaatcaagccagttatgtcattaaatacttgtctttcagaattacttatttaattattccatttaagttcatataatataatctacagtttagatacttggacatatatcctgcccaaggcactaagtgtaatataggaaaaggatagaaagccattttctctatcttcaaaataatgtgccatctccgttaaaattaagactttaaagttctataattttttctttgtattcaactttttaatacctccaaattacaaacatctatttttttcactacatagatatataattacactatgatagacagaattctagagtgattctcaataatccatgccttggtataatcctctcccccattgagtgtgggtgggacatgtaacctgcttctaaccaacagaatatggcaaaagtgatgggatcatctctcccatattatgttatgttatataacaaaagtgaagagaagttgcagatatacataaggtttctaatcagctgactttgagttaatcaaagagatcccctgggtgggcctgacctaatcagactagtcctttaaaagagagtgaaccagtcagagactctctctcctattagccttaaataagcaagctgccatgagctctacggctgcaaggaaataagttttgtgaacaaccatgtgatcttggaagaagcatctgaacctcagataaaagcccagccccagccaacgccttgcttgcagctttgtgaaactctgagcagaggacccagctaaatcacgtttggactcctgacccacagaaactttcagataataaatgtatgctgttttaaatctaaaaaaagg

SEQ ID NO: 65245 - DNA, 1251 bp, Homo sapiens
ccattaagtacaaaagtcctgaggttgtaggctggagtttctgaggtcggtgtggctgtagtgaagggaacaatgtggaaagggagatgaggttaggagagaagtggaggctggattgttggagtcttgggcagccactggagagttctgagcagaagtaacatggtctaatttttctattcctgttttgggaacagtctgtggaaaggcaagagtgaaatcagaaaggccagttgagtggctactgaaataattcagataagaagaagcagaggttctgaccatcatggagcagtggtggtggattaccaaaccaataacaatgaccaggcagtagttgaaatctgtatcacaagaatcacaacagccatcagagagaccgagtccattgaaaagcatgcaaaggcccttgtggggctctgggactcctgcttggaacataacctgagaccctttgggaaagacgaagacactcctcatgcaaaaatcgcatctgatatcatgagttgcattttacagaattacaaccgacccccagtgatggcattagccatccccattgcagtgaaattcctccacagaggcaacaaggaactgtgcaggaatatgtctaactacctgtctctggctgcaattaccaaggcagatctcctggctgatcacacggaagttatagtaaagagcatactccaagatggtgcgaaagttgagcttggggacatgttttgggagatatttaaaagtattttcatcaagcatttatggtttgtgggaagcaagacctagagtattagaagcaaattaatttctctgttttgctgccagttgacctgtgaacatgcaaaaggttacttaatctggctgtctgtgtcccttcccaaggcagatgaattacttagactcattaaaagaattgtaagcattcttccaaatctgtgtttctcagtttgaagaactgcatttccgtgcttctggtcacctgttcaactaccaactgtggagatcttatctctgtgtactgagtggaacacgtcactcagtggggtatgaaaaacctgtcttcatttgcttccaaaagcaagaaatgtcttttgttagataaaatacatcagaaaatgtgtaatgacttcttaaatgtgaacatgatttggataacaagcataaatactagcataaaaagccaaatagtacacctctgttaattgttacaacatttgaatgaataagaagctcaaattagttcatgcaaaa

SEQ ID NO: 65246 - DNA, 1147 bp, Homo sapiens
ggttgttaggcaaatctaattctttcaaactacagatctgctcagagaaatctgtaaatctagtgtagaaataagtgaagctttgcgtcaattgttaggtctaagcagaagtttgggagagagaagaaaagttactcatttgcctgattccgcacgagagtgtcaatgaagacctcaaagtctggagaaaaatgacctttcatggaataagaagtatacctccttctacatgtttttgtcttactgacctctgataactggaacacatgactctgggtctgtagaaagtcaactgatcaaactcatcctcaccatgcatcaactgttcagactggttttgggacaaaaagatctttcacgagctggggacctcttctccttagatgactctgagattgaagacagccttacagaagctttggagcaaattaagataattagctcatcttcagattaccaaaccaataacaatgaccaggcagtagttgaaatctgtatcacaagaatcacaacagccatcagagagaccgagtccattgaaaagcatgcaaaggcccttgtggggctctgggactcctgcttggaacataacctgagaccctttgggaaagacgaagacactcctcatgcaaaaatcgcatctgatatcatgagttgcattttacagaattacaaccgacccccagtgatggcattagccatccccattgcagtgaaattcctccacagaggcaacaaggaactgtgcaggaatatgtctaactacctgtctctggctgcaattaccaaggcagatctcctggctgatcacacggaagttatagtaaagagcatactccaagtttgaagaactgcatttccgtgcttctggtcacctgttcaactaccaactgtggagatcttatctctgtgtactgagtggaacacgtcactcagtggggtatgaaaaacctgtcttcatttgcttccaaaagcaagaaatgtcttttgttagataaaatacatcagaaaatgtgtaatgacttcttaaatgtgaacatgatttggataacaagcataaatactagcataaaaagccaaatagtacacctctgttaattgttacaacatttgaatgaataagaagctcaaattagttcatgcaaaa

SEQ ID NO: 65247 - DNA, 1173 bp, Homo sapiens
  misc_feature (1171)..(1171): n is a, c, g, or t
ggttgttaggcaaatctaattctttcaaactacagatctgctcagagaaatctgtaaatctagtgtagaaataagtgaagctttgcgtcaattgttaggtctaagcagaagtttgggagagagaagaaaagttactcatttgcctgattccgcacgagagtgtcaatgaagacctcaaagtctggagaaaaatgacctttcatggaataagaagtatacctccttctacatgtttttgtcttactgacctctgataactggaacacatgactctgggtctgtagaaagtcaactgatcaaactcatcctcaccatgcatcaactgttcagactggttttgggacaaaaagatctttcacgagctggggacctcttctccttagatgactctgagattgaagacagccttacagaagctttggagcaaattaagataattagctcatcttcagattaccaaaccaataacaatgaccaggcagtagttgaaatctgtatcacaagaatcacaacagccatcagagagaccgagtccattgaaaagcatgcaaaggcccttgtggggctctgggactcctgcttggaacataacctgagaccctttgggaaagacgaagacactcctcatgcaaaaatcgcatctgatatcatgagttgcattttacagaattacaaccgacccccagtgatggcattagccatccccattgcagtgaaattcctccacagaggcaacaaggaactgtgcaggaatatgtctaactacctgtctctggctgcaattaccaaggcagatctcctggctgatcacacggaagttatagtaaagagcatactccaagtttgaagaactgcatttccgtgcttctggtcacctgttcaactaccaactgtggagatcttatctctgtgtactgagtggaacacgtcactcagtggggtatgaaaaacctgtcttcatttgcttccaaaagcaagaaatgtcttttgttagataaaatacatcagaaaatgtgtaatgacttcttaaatgtgaacatgatttggataacaagcataaatactagcataaaaagccaaatagtacacctctgttaattgttacaacatttgaatgaataagaagctcaaattagttcatgcaaaaaaaaaaatggccctcgttggcctnca

SEQ ID NO: 65248 - DNA, 405 bp, Homo sapiens
ctgcatttccgtgcttctggtcacctgttcaactaccaactgtggagatcttatctctgtgtactgagtggaacacgtcactcagtggggtatgaaaaacctgtcttcatttgcttccaaaagcaagaaatgtcttttgttagataaaatacatcagaaaatgtgtaatgacttcttaaatgtgaacatgatttggataacaagcataaatactagcataaaaagccaaatagtacacctctgttaattgttacaacatttgaatgaataagaagctcaaattagttcatgcaaaatattctccttgtcttcttttattttctttggtttcagatcaatcaaaaaacatgtttttgaacttgaagtcagagaacaatacatgatattaattgatgtgcatccaaa

SEQ ID NO: 65249 - DNA, 4128 bp, Homo sapiens
cagctgcagtgctctaaagatcaaggattttgccttctattttctatgaccagagattcctgtgcaaagagagagtgtcaatgaagacctcaaagtctggagaaaaatgacctttcatggaataagaagtatacctccttctacatgtttttgtcttactgacctctgataactggaacacatgactctgggtctgtagaaagtcaactgatcaaactcatcctcaccatgcatcaactgttcagactggttttgggacaaaaagatctttcacgagctggggacctcttctccttagatgactctgagattgaagacagccttacagaagctttggagcaaattaagataattagctcatcttcagattaccaaaccaataacaatgaccaggcagtagttgaaatctgtatcacaagaatcacaacagccatcagagagaccgagtccattgaaaagcatgcaaaggcccttgtggggctctgggactcctgcttggaacataacctgagaccctttgggaaagacgaagacactcctcatgcaaaaatcgcatctgatatcatgagttgcattttacagaattacaaccgacccccagtgatggcattagccatccccattgcagtgaaattcctccacagaggcaacaaggaactgtgcaggaatatgtctaactacctgtctctggctgcaattaccaaggcagatctcctggctgatcacacggaagttatagtaaagagcatactccaaggtaacaccatgttgttgagagtgttacctgctgtgtatgaaaagcagcctcagccaattaatagacacctgacagaactcctggccttgatgtctcagctggaacagccagaacagtaccatctactacggcttttgcatgtagcagcaaagaaaaaacaactcgaggtagttcagaagtgtattcctttcctaattgggcatttgaaggattcaacccataatgacatcatcctaaacatcctcatagagatagcagtctatgagccagtggctttgaacagttttcttccaatgctgaaagagattggtgagagattcccctacctcactggacagatggcaaggatttatggagctgttgggcatgtggatgaagagagagccaggagctgcctgacatacctggtgagccaactggccaacatggagcattcgtttcaccatattctcctgctggagattaaaagcatcaccgacaccttctcctcaatcttgggccctcagagcagagacatcttccgcatgagcaacagcttcaccgccattgctaaactccttacccgacaactggaaaataccaaggctggaagtggcaggagaaaaatcagcactgaaattgaattccctgagaaactggaagaaaccaagctcatagtaactgaaaatgaagaccatgaaaaactccaagttaaaatccaggcttttgaagacaagataaatgcagggagcaatacccctggctctatcagaagatatagtctgggccaagtttctaaagaagaaagaaaaaacattagatttaacaggtcaaaaagtttggctttccacactatgctcacaaagggtgtgggttcagatgacggcgaagatgaaaacaggggagacataccagccagcatctctctttcagaaatagacccacttggccaaggaaatgacaagctgccgtttaagacagacactgagagatcacagctgggggagtcttcagtttcatacccaaatattatacatatagactcagagaatttgtcagaaactgttaaagaaaactcccaggaagaaactccagagacaactgcaagtcctatagaataccaagataagctctacttgcacttaaaaaaaaacctcagcaaagtgaaagcatatgccatggaaattggaaagaagattccagtccctgatcagtgtaccattgaagacactgtgagaagttgtgtagcaaagttgttcttcacctgctccctgaagggtcattactgcctatacagtaagtccagttttattctcatcagccaagaacctcagccatggatccagatcatgtttctatttcagcagagcctgtttcctgaacccctgtccattcagagtcattctgtgcaattcctcagagctctgtgggagaagacccaggcagggggtgctcacagctttgaaactgccatgatggagtccacgtttccacagcagaaggatctggaccaggtacagctccatctggaagaagtgaggttctttgacgtgtttggcttcagtgaaacagcaggagcatggcaatgcttcatgtgcaacaatcctgagaaagcaactgttgtaaatcaagatggccagcctctcatagaaggaaaacttaaagagaagcaagtcagatggaagttcatcaaaaggtggaaaacacgctattttacactggctggaaatcaacttctgtttcaaaaaggaaagtctaaagatgaccctgacgactgcccaatagaactcagcaaagtacagagtgtgaaggctgtggccaagaaacgcagggaccgctctctcccccgggctttcgaaatcttcacagacaataaaacctatgtctttaaggccaaggatgagaagaatgcagaagaatggctccagtgcatcaacgtggcagttgcccaagccaaagaaagggaaagtagagaagtaaccacatatctgtagggatttataagtcagccatgacaattatacaccacaggcattgtattatcattgccaatgtcaagaaaaagagctaaatttaccaagccatgttgttttttactaaataccaatggaattgttgtcctttaagaagaagggcctaaaatggcaggattcttagtaaatgtcatactctaacagctttagtattgacttcagaatatatctgatgcccacaaaaataaaataaaataaaaggagctacagagtatgccctcagatagtgtggggccaggaagggaaaagtcactgataaaagaacttctgtagatatgtcatttaaaactgtgagaaaacaacatgaaaagatgcctgaactctccatcctgaggaaagattagcacttctgatgaaaatcacagtctgtcaaaggtattaaaagaaaactttaaaaaaaaaaacctttagaaacgttgaactaatgtacactgagaaaaaccatataacttacttatagacatataattacatgatcctctcttactacaactgaggctaacacatggtaaaatggttcccaaatcaagccagttatgtcattaaatacttgtctttcagaattacttatttaattattccatttaagttcatataatataatctacagtttagatacttggacatatatcctgcccaaggcactaagtgtaatataggaaaaggatagaaagccattttctctatcttcaaaataatgtgccatctccgttaaaattaagactttaaagttctataattttttctttgtattcaactttttaatacctccaaattacaaacatctatttttttcactacatagatatataattacactatgatagacagaattctagagtgattctcaataatccatgccttggtataatcctctcccccattgagtgtgggtgggacatgtaacctgcttctaaccaacagaatatggcaaaagtgatgggatcatctctcccatattatgttatgttatataacaaaagtgaagagaagttgcagatatacataaggtttctaatcagctgactttgagttaatcaaagagatcccctgggtgggcctgacctaatcagactagtcctttaaaagagagtgaaccagtcagagactctctctcctattagccttaaataagcaagctgccatgagctctacggctgcaaggaaataagttttgtgaacaaccatgtgatcttggaagaagcatctgaacctcagataaaagcccagccccagccaacgccttgcttgcagctttgtgaaactctgagcagaggacccagctaaatcacgtttggactcctgacccacagaaactttcagataataaatgtatgctgttttaaatctaaaaaaagg

SEQ ID NO: 65250 - DNA, 4213 bp, Homo sapiens
ggttgttaggcaaatctaattctttcaaactacagatctgctcagagaaatctgtaaatctagtgtagaaataagtgaagctttgcgtcaattgttaggtctaagcagaagtttgggagagagaagaaaagttactcatttgcctgattccgcacgagagtgtcaatgaagacctcaaagtctggagaaaaatgacctttcatggaataagaagtatacctccttctacatgtttttgtcttactgacctctgataactggaacacatgactctgggtctgtagaaagtcaactgatcaaactcatcctcaccatgcatcaactgttcagactggttttgggacaaaaagatctttcacgagctggggacctcttctccttagatgactctgagattgaagacagccttacagaagctttggagcaaattaagataattagctcatcttcagattaccaaaccaataacaatgaccaggcagtagttgaaatctgtatcacaagaatcacaacagccatcagagagaccgagtccattgaaaagcatgcaaaggcccttgtggggctctgggactcctgcttggaacataacctgagaccctttgggaaagacgaagacactcctcatgcaaaaatcgcatctgatatcatgagttgcattttacagaattacaaccgacccccagtgatggcattagccatccccattgcagtgaaattcctccacagaggcaacaaggaactgtgcaggaatatgtctaactacctgtctctggctgcaattaccaaggcagatctcctggctgatcacacggaagttatagtaaagagcatactccaaggtaacaccatgttgttgagagtgttacctgctgtgtatgaaaagcagcctcagccaattaatagacacctgacagaactcctggccttgatgtctcagctggaacagccagaacagtaccatctactacggcttttgcatgtagcagcaaagaaaaaacaactcgaggtagttcagaagtgtattcctttcctaattgggcatttgaaggattcaacccataatgacatcatcctaaacatcctcatagagatagcagtctatgagccagtggctttgaacagttttcttccaatgctgaaagagattggtgagagattcccctacctcactggacagatggcaaggatttatggagctgttgggcatgtggatgaagagagagccaggagctgcctgacatacctggtgagccaactggccaacatggagcattcgtttcaccatattctcctgctggagattaaaagcatcaccgacaccttctcctcaatcttgggccctcagagcagagacatcttccgcatgagcaacagcttcaccgccattgctaaactccttacccgacaactggaaaataccaaggctggaagtggcaggagaaaaatcagcactgaaattgaattccctgagaaactggaagaaaccaagctcatagtaactgaaaatgaagaccatgaaaaactccaagttaaaatccaggcttttgaagacaagataaatgcagggagcaatacccctggctctatcagaagatatagtctgggccaagtttctaaagaagaaagaaaaaacattagatttaacaggtcaaaaagtttggctttccacactatgctcacaaagggtgtgggttcagatgacggcgaagatgaaaacaggggagacataccagccagcatctctctttcagaaatagacccacttggccaaggaaatgacaagctgccgtttaagacagacactgagagatcacagctgggggagtcttcagtttcatacccaaatattatacatatagactcagagaatttgtcagaaactgttaaagaaaactcccaggaagaaactccagagacaactgcaagtcctatagaataccaagataagctctacttgcacttaaaaaaaaacctcagcaaagtgaaagcatatgccatggaaattggaaagaagattccagtccctgatcagtgtaccattgaagacactgtgagaagttgtgtagcaaagttgttcttcacctgctccctgaagggtcattactgcctatacagtaagtccagttttattctcatcagccaagaacctcagccatggatccagatcatgtttctatttcagcagagcctgtttcctgaacccctgtccattcagagtcattctgtgcaattcctcagagctctgtgggagaagacccaggcagggggtgctcacagctttgaaactgccatgatggagtccacgtttccacagcagaaggatctggaccaggtacagctccatctggaagaagtgaggttctttgacgtgtttggcttcagtgaaacagcaggagcatggcaatgcttcatgtgcaacaatcctgagaaagcaactgttgtaaatcaagatggccagcctctcatagaaggaaaacttaaagagaagcaagtcagatggaagttcatcaaaaggtggaaaacacgctattttacactggctggaaatcaacttctgtttcaaaaaggaaagtctaaagatgaccctgacgactgcccaatagaactcagcaaagtacagagtgtgaaggctgtggccaagaaacgcagggaccgctctctcccccgggctttcgaaatcttcacagacaataaaacctatgtctttaaggccaaggatgagaagaatgcagaagaatggctccagtgcatcaacgtggcagttgcccaagccaaagaaagggaaagtagagaagtaaccacatatctgtagggatttataagtcagccatgacaattatacaccacaggcattgtattatcattgccaatgtcaagaaaaagagctaaatttaccaagccatgttgttttttactaaataccaatggaattgttgtcctttaagaagaagggcctaaaatggcaggattcttagtaaatgtcatactctaacagctttagtattgacttcagaatatatctgatgcccacaaaaataaaataaaataaaaggagctacagagtatgccctcagatagtgtggggccaggaagggaaaagtcactgataaaagaacttctgtagatatgtcatttaaaactgtgagaaaacaacatgaaaagatgcctgaactctccatcctgaggaaagattagcacttctgatgaaaatcacagtctgtcaaaggtattaaaagaaaactttaaaaaaaaaaacctttagaaacgttgaactaatgtacactgagaaaaaccatataacttacttatagacatataattacatgatcctctcttactacaactgaggctaacacatggtaaaatggttcccaaatcaagccagttatgtcattaaatacttgtctttcagaattacttatttaattattccatttaagttcatataatataatctacagtttagatacttggacatatatcctgcccaaggcactaagtgtaatataggaaaaggatagaaagccattttctctatcttcaaaataatgtgccatctccgttaaaattaagactttaaagttctataattttttctttgtattcaactttttaatacctccaaattacaaacatctatttttttcactacatagatatataattacactatgatagacagaattctagagtgattctcaataatccatgccttggtataatcctctcccccattgagtgtgggtgggacatgtaacctgcttctaaccaacagaatatggcaaaagtgatgggatcatctctcccatattatgttatgttatataacaaaagtgaagagaagttgcagatatacataaggtttctaatcagctgactttgagttaatcaaagagatcccctgggtgggcctgacctaatcagactagtcctttaaaagagagtgaaccagtcagagactctctctcctattagccttaaataagcaagctgccatgagctctacggctgcaaggaaataagttttgtgaacaaccatgtgatcttggaagaagcatctgaacctcagataaaagcccagccccagccaacgccttgcttgcagctttgtgaaactctgagcagaggacccagctaaatcacgtttggactcctgacccacagaaactttcagataataaatgtatgctgttttaaatctaaaaaaagg

SEQ ID NO: 65251 - DNA, 4377 bp, Homo sapiens
aagtggatgcaattgttgaggagaagagtgaaggagaagagaagagagcccgaaactaaacagggaggaatccaccatttagaagtctggcaggcaaagaggacaagagagtgtcaatgaagacctcaaagtctggagaaaaatgacctttcatggaataagaagtatacctccttctacatgtttttgtcttactgacctctgataactggaacacatgactctgggtctgtagaaagtcaactgatcaaactcatcctcaccatgcatcaactgttcagactggttttgggacaaaaagatctttcacgagctggggacctcttctccttagatgactctgagattgaagacagccttacagaagctttggagcaaattaagataattagctcatcttcaaaacgtagaacaggaagggatcgtctaaattgccccttccaacttccagcacagaagattgctgaaaaataggtggcttctcctgcacttgcaatgatgcgaatatgtctgtggaaaggcaagagtgaaatcagaaaggccagttgagtggctactgaaataattcagataagaagaagcagaggttctgaccatcatggagcagtggtggtggattaccaaaccaataacaatgaccaggcagtagttgaaatctgtatcacaagaatcacaacagccatcagagagaccgagtccattgaaaagcatgcaaaggcccttgtggggctctgggactcctgcttggaacataacctgagaccctttgggaaagacgaagacactcctcatgcaaaaatcgcatctgatatcatgagttgcattttacagaattacaaccgacccccagtgatggcattagccatccccattgcagtgaaattcctccacagaggcaacaaggaactgtgcaggaatatgtctaactacctgtctctggctgcaattaccaaggcagatctcctggctgatcacacggaagttatagtaaagagcatactccaaggtaacaccatgttgttgagagtgttacctgctgtgtatgaaaagcagcctcagccaattaatagacacctgacagaactcctggccttgatgtctcagctggaacagccagaacagtaccatctactacggcttttgcatgtagcagcaaagaaaaaacaactcgaggtagttcagaagtgtattcctttcctaattgggcatttgaaggattcaacccataatgacatcatcctaaacatcctcatagagatagcagtctatgagccagtggctttgaacagttttcttccaatgctgaaagagattggtgagagattcccctacctcactggacagatggcaaggatttatggagctgttgggcatgtggatgaagagagagccaggagctgcctgacatacctggtgagccaactggccaacatggagcattcgtttcaccatattctcctgctggagattaaaagcatcaccgacaccttctcctcaatcttgggccctcagagcagagacatcttccgcatgagcaacagcttcaccgccattgctaaactccttacccgacaactggaaaataccaaggctggaagtggcaggagaaaaatcagcactgaaattgaattccctgagaaactggaagaaaccaagctcatagtaactgaaaatgaagaccatgaaaaactccaagttaaaatccaggcttttgaagacaagataaatgcagggagcaatacccctggctctatcagaagatatagtctgggccaagtttctaaagaagaaagaaaaaacattagatttaacaggtcaaaaagtttggctttccacactatgctcacaaagggtgtgggttcagatgacggcgaagatgaaaacaggggagacataccagccagcatctctctttcagaaatagacccacttggccaaggaaatgacaagctgccgtttaagacagacactgagagatcacagctgggggagtcttcagtttcatacccaaatattatacatatagactcagagaatttgtcagaaactgttaaagaaaactcccaggaagaaactccagagacaactgcaagtcctatagaataccaagataagctctacttgcacttaaaaaaaaacctcagcaaagtgaaagcatatgccatggaaattggaaagaagattccagtccctgatcagtgtaccattgaagacactgtgagaagttgtgtagcaaagttgttcttcacctgctccctgaagggtcattactgcctatacagtaagtccagttttattctcatcagccaagaacctcagccatggatccagatcatgtttctatttcagcagagcctgtttcctgaacccctgtccattcagagtcattctgtgcaattcctcagagctctgtgggagaagacccaggcagggggtgctcacagctttgaaactgccatgatggagtccacgtttccacagcagaaggatctggaccaggtacagctccatctggaagaagtgaggttctttgacgtgtttggcttcagtgaaacagcaggagcatggcaatgcttcatgtgcaacaatcctgagaaagcaactgttgtaaatcaagatggccagcctctcatagaaggaaaacttaaagagaagcaagtcagatggaagttcatcaaaaggtggaaaacacgctattttacactggctggaaatcaacttctgtttcaaaaaggaaagtctaaagatgaccctgacgactgcccaatagaactcagcaaagtacagagtgtgaaggctgtggccaagaaacgcagggaccgctctctcccccgggctttcgaaatcttcacagacaataaaacctatgtctttaaggccaaggatgagaagaatgcagaagaatggctccagtgcatcaacgtggcagttgcccaagccaaagaaagggaaagtagagaagtaaccacatatctgtagggatttataagtcagccatgacaattatacaccacaggcattgtattatcattgccaatgtcaagaaaaagagctaaatttaccaagccatgttgttttttactaaataccaatggaattgttgtcctttaagaagaagggcctaaaatggcaggattcttagtaaatgtcatactctaacagctttagtattgacttcagaatatatctgatgcccacaaaaataaaataaaataaaaggagctacagagtatgccctcagatagtgtggggccaggaagggaaaagtcactgataaaagaacttctgtagatatgtcatttaaaactgtgagaaaacaacatgaaaagatgcctgaactctccatcctgaggaaagattagcacttctgatgaaaatcacagtctgtcaaaggtattaaaagaaaactttaaaaaaaaaaacctttagaaacgttgaactaatgtacactgagaaaaaccatataacttacttatagacatataattacatgatcctctcttactacaactgaggctaacacatggtaaaatggttcccaaatcaagccagttatgtcattaaatacttgtctttcagaattacttatttaattattccatttaagttcatataatataatctacagtttagatacttggacatatatcctgcccaaggcactaagtgtaatataggaaaaggatagaaagccattttctctatcttcaaaataatgtgccatctccgttaaaattaagactttaaagttctataattttttctttgtattcaactttttaatacctccaaattacaaacatctatttttttcactacatagatatataattacactatgatagacagaattctagagtgattctcaataatccatgccttggtataatcctctcccccattgagtgtgggtgggacatgtaacctgcttctaaccaacagaatatggcaaaagtgatgggatcatctctcccatattatgttatgttatataacaaaagtgaagagaagttgcagatatacataaggtttctaatcagctgactttgagttaatcaaagagatcccctgggtgggcctgacctaatcagactagtcctttaaaagagagtgaaccagtcagagactctctctcctattagccttaaataagcaagctgccatgagctctacggctgcaaggaaataagttttgtgaacaaccatgtgatcttggaagaagcatctgaacctcagataaaagcccagccccagccaacgccttgcttgcagctttgtgaaactctgagcagaggacccagctaaatcacgtttggactcctgacccacagaaactttcagataataaatgtatgctgttttaaatctaaaaaaagg

SEQ ID NO: 65252 - DNA, 1399 bp, Homo sapiens
ggttgttaggcaaatctaattctttcaaactacagatctgctcagagaaatctgtaaatctagtgtagaaataagtgaagctttgcgtcaattgttaggtctaagcagaagtttgggagagagaagaaaagttactcatttgcctgattccgcacgagagtgtcaatgaagacctcaaagtctggagaaaaatgacctttcatggaataagaagtatacctccttctacatgtttttgtcttactgacctctgataactggaacacatgactctgggtctgtagaaagtcaactgatcaaactcatcctcaccatgcatcaactgttcagactggttttgggacaaaaagatctttcacgagctggggacctcttctccttagatgactctgagattgaagacagccttacagaagctttggagcaaattaagataattagctcatcttcagattaccaaaccaataacaatgaccaggcagtagttgaaatctgtatcacaagaatcacaacagccatcagagagaccgagtccattgaaaagcatgcaaaggcccttgtggggctctgggactcctgcttggaacataacctgagaccctttgggaaagacgaagacactcctcatgcaaaaatcgcatctgatatcatgagttgcattttacagaattacaaccgacccccagtgatggcattagccatccccattgcagtgaaattcctccacagaggcaacaaggaactgtgcaggaatatgtctaactacctgtctctggctgcaattaccaaggcagatctcctggctgatcacacggaagttatagtaaagagcatactccaagatggtgcgaaagttgagcttggggacatgttttgggagatatttaaaagtattttcatcaagcatttatggtttgtgggaagcaagacctagagtattagaagcaaattaatttctctgttttgctgccagttgacctgtgaacatgcaaaaggttacttaatctggctgtctgtgtcccttcccaaggcagatgaattacttagactcattaaaagaattgtaagcattcttccaaatctgtgtttctcagtttgaagaactgcatttccgtgcttctggtcacctgttcaactaccaactgtggagatcttatctctgtgtactgagtggaacacgtcactcagtggggtatgaaaaacctgtcttcatttgcttccaaaagcaagaaatgtcttttgttagataaaatacatcagaaaatgtgtaatgacttcttaaatgtgaacatgatttggataacaagcataaatactagcataaaaagccaaatagtacacctctgttaattgttacaacatttgaatgaataagaagctcaaattagttcatgcaaaa

SEQ ID NO: 65253 - DNA, 2748 bp, Homo sapiens
  misc_feature (2704)..(2704): n is a, c, g, or t
ggttgttaggcaaatctaattctttcaaactacagatctgctcagagaaatctgtaaatctagtgtagaaataagtgaagctttgcgtcaattgttaggtctaagcagaagtttgggagagagaagaaaagttactcatttgcctgattccgcacgagagtgtcaatgaagacctcaaagtctggagaaaaatgacctttcatggaataagaagtatacctccttctacatgtttttgtcttactgacctctgataactggaacacatgactctgggtctgtagaaagtcaactgatcaaactcatcctcaccatgcatcaactgttcagactggttttgggacaaaaagatctttcacgagctggggacctcttctccttagatgactctgagattgaagacagccttacagaagctttggagcaaattaagataattagctcatcttcagattaccaaaccaataacaatgaccaggcagtagttgaaatctgtatcacaagaatcacaacagccatcagagagaccgagtccattgaaaagcatgcaaaggcccttgtggggctctgggactcctgcttggaacataacctgagaccctttgggaaagacgaagacactcctcatgcaaaaatcgcatctgatatcatgagttgcattttacagaattacaaccgacccccagtgatggcattagccatccccattgcagtgaaattcctccacagaggcaacaaggaactgtgcaggaatatgtctaactacctgtctctggctgcaattaccaaggcagatctcctggctgatcacacggaagttatagtaaagagcatactccaaggtaacaccatgttgttgagagtgttacctgctgtgtatgaaaagcagcctcagccaattaatagacacctgacagaactcctggccttgatgtctcagctggaacagccagaacagtaccatctactacggcttttgcatgtagcagcaaagaaaaaacaactcgaggtagttcagaagtgtattcctttcctaattgggcatttgaaggattcaacccataatgacatcatcctaaacatcctcatagagatagcagtctatgagccagtggctttgaacagttttcttccaatgctgaaagagattggtgagagattcccctacctcactggacagatggcaaggatttatggagctgttgggcatgtggatgaagagagagccaggagctgcctgacatacctggtgagccaactggccaacatggagcattcgtttcaccatattctcctgctggagattaaaagcatcaccgacaccttctcctcaatcttgggccctcagagcagagacatcttccgcatgagcaacagcttcaccgccattgctaaactccttacccgacaactggaaaataccaaggctggaagtggcaggagaaaaatcagcactgaaattgaattccctgagaaactggaagaaaccaagctcatagtaactgaaaatgaagaccatgaaaaactccaagttaaaatccaggcttttgaagacaagataaatgcagggagcaatacccctggctctatcagaagatatagtctgggccaagtttctaaagaagaaagaaaaaacattagatttaacaggtcaaaaagtttggctttccacactatgctcacaaagggtgtgggttcagatgacggcgaagatgaaaacaggggagacataccagccagcatctctctttcagaaatagacccacttggccaaggaaatgacaagctgccgtttaagacagacactgagagatcacagctgggggagtcttcagtttcatacccaaatattatacatatagactcagagaatttgtcagaaactgttaaagaaaactcccaggaagaaactccagagacaactgcaagtcctatagaataccaagataagctctacttgcacttaaaaaaaaacctcagcaaagtgaaagcatatgccatggaaattggaaagaagattccagtccctgatcagtgtaccattgaagacactgtgagaagttgtgtagcaaagttgttcttcacctgctccctgaagggtcattactgcctatacagtaagtccagttttattctcatcagccaagaacctcagccatggatccagatcatgtttctatttcagcagagcctgtttcctgaacccctgtccattcagagtcattctgtgcaattcctcagagctctgtgggagaagacccaggcagggggtgctcacagctttgaaactgccatgatggagtccacgtttccacagcagaaggatctggaccaggtacagctccatctggaagaagtgaggttctttgacgtgtttggcttcagtgaaacagcaggagcatggcaatgcttcatgtgcaacaatcctgagaaagcaactgttgtaaatcaagatggccagcctctcatagaaggaaaacttaaagagaagcaagtcagatggaagttcatcaaaaggtggaaaacacgctattttacactggctggaaatcaacttctgtttcaaaaaggaaagtctaaagatgaccctgacgactgcccaatagaactcagcaaagtacagagtgtgaaggctgtggccaagaaacgcagggaccgctctctcccccgggctttcgaaatcttcacagaaggaaaaacccgnttcgcccgagccccccccctcgctttggtgacacgctaaggaaa

SEQ ID NO: 65254 - DNA, 356 bp, Homo sapiens
tagagacagggtctcgctttgtcaccttacagaagaaatatctactcctactgtcactactgctcaggggatgaggtatcccccctgcctaagttgaatcctctgctttctaaatctgtgccccatcctgaccccatcacactagctgtgtaaccctgagtaaattaacgaccctctctgtgtctcatctcctcatctgtaaagtggggatagcaatggttcttgccacagaacgtggttgtgagggctaacaagatgatgcatatgatgcatataaagcacttaacaccattttgggcaaatagtaagtgcctgataaatgtgagctacaattattctagttgtctcatatcccc

SEQ ID NO: 65255 - DNA, 544 bp, Homo sapiens
gcatatatgtggtctgaccaaaaagtcattatgcagcacatgactactcgaagtttaaccgcgtggcatgtaaatatttgaatagaatgttaggacaatgacctcacattatttctgaaaataataaatagcttttcaatatgtaaatacctgaaaagatgggtaattacataatcagatgttaaattagactaaaagttttcaaaagattattcttgagtgtagtcattttttaagtcattatcatctgaaatgatattttattgaccttttatggaggagaaatggaaacatgaagacaaaatgactcaaagcaattattggtatcaggatcagtgattatatccatcacggggaaaaaatttatttaaacaggaaattttcccagaagtctctgttttcttttggaagatatctgcagttcattcggaattagctactgtctataagtccctgaaggattatagcttgtgcagcaagtttaattgcagaattttaaaaaatatatcatgagattcttcaaaatctttttaaatttgtaagt

SEQ ID NO: 65256 - DNA, 360 bp, Homo sapiens
cgtgcaacgcatccactcagggctgttaataattgggttttacggatgcccagattcacaggctatagcttagtgcctctccatcgatttaactatcatttcaggtccatagctcacagctagaaaccaacctacataaaaccccacattaggacgcttcccttcttgtttaggacactgctttccattaggaaaaccaaactacttagcggagagcttgatggatgaggctgacgttataatctcactgaacaattacagggctgtcctattagcgggagacaccccagtacacacataagatttggtagacgagatctgttgaacattgaggggagccgggaagacagagtgcaggtg

SEQ ID NO: 65257 - DNA, 1785 bp, Homo sapiens
  misc_feature (1662)..(1662): n is a, c, g, or t
cctgaagggaggatgggctaaggcaggcacacagtggcggagaagatgccctcctgggccctcttcatggtcacctcctgcctcctcctggcccctcaaaacctggcccaagtcagcagccaagatgtctccttgctggcatcagactcagagcccctgaagtgtttctcccgaacatttgaggacctcacttgcttctgggatgaggaagaggcagcgcccagtgggacataccagctgctgtatgcctacccgcgggagaagccccgtgcttgccccctgagttcccagagcatgccccactttggaacccgatacgtgtgccagtttccagaccaggaggaagtgcgtctcttctttccgctgcacctctgggtgaagaatgtgttcctaaaccagactcggactcagcgagtcctctttgtggacagtgtaggcctgccggctccccccagtatcatcaaggccatgggtgggagccagccaggggaacttcagatcagctgggaggagccagctccagaaatcagtgatttcctgaggtacgaactccgctatggccccagagatcccaagaactccactggtcccacggtcatacagctgattgccacagaaacctgctgccctgctctgcagaggcctcactcagcctctgctctggaccagtctccatgtgctcagcccacaatgccctggcaagatggaccaaagcagacctccccaagtagagaagcttcagctctgacagcagagggtggaagctgcctcatctcaggactccagcctggcaactcctactggctgcagctgcgcagcgaacctgatgggatctccctcggtggctcctggggatcctggtccctccctgtgactgtggacctgcctggagatgcagtggcacttggactgcaatgctttaccttggacctgaagaatgttacctgtcaatggcagcaacaggaccatgctagctcccaaggcttcttctaccacagcagggcacggtgctgccccagagacaggtaccccatctgggagaactgcgaagaggaagagaaaacaaatccaggactacagaccccacagttctctcgctgccacttcaagtcacgaaatgacagcattattcacatccttgtggaggtgaccacagccccgggtactgttcacagctacctgggctcccctttctggatccaccaggctgtgcgcctccccaccccaaacttgcactggagggagatctccagtgggcatctggaattggagtggcagcacccatcgtcctgggcagcccaagagacctgttatcaactccgatacacaggagaaggccatcaggactggaaggtgctggagccgcctctcggggcccgaggagggaccctggagctgcgcccgcgatctcgctaccgtttacagctgcgcgccaggctcaacggccccacctaccaaggtccctggagctcgtggtcggacccaactagggtggagaccgccaccgagaccgcctggatctccttggtgaccgctctgcatctagtgctgggcctcagcgccgtcctgggcctgctgctgctgaggtggcagtttcctgcacactacaggtaccgcccccgccaggcaggagactggcggtggaccaggtggagccgaacntgtaaacaggcattcttggttcgctctgtgaccccagatctccgtccaccgcccgtgcgcacctacggcttcgcacttcctgcacgtcacctctgggactcgccgcggctccttacactctaa

SEQ ID NO: 65258 - DNA, 3838 bp, Homo sapiens
  misc_feature (2185)..(2185): n is a, c, g, or t
cctgaagggaggatgggctaaggcaggcacacagtggcggagaagatgccctcctgggccctcttcatggtcacctcctgcctcctcctggcccctcaaaacctggcccaagtcagcagccaagatgtctccttgctggcatcagactcagagcccctgaagtgtttctcccgaacatttgaggacctcacttgcttctgggatgaggaagaggcagcgcccagtgggacataccagctgctgtatgcctacccgcgggagaagccccgtgcttgccccctgagttcccagagcatgccccactttggaacccgatacgtgtgccagtttccagaccaggaggaagtgcgtctcttctttccgctgcacctctgggtgaagaatgtgttcctaaaccagactcggactcagcgagtcctctttgtggacagtgtaggcctgccggctccccccagtatcatcaaggccatgggtgggagccagccaggggaacttcagatcagctgggaggagccagctccagaaatcagtgatttcctgaggtacgaactccgctatggccccagagatcccaagaactccactggtcccacggtcatacagctgattgccacagaaacctgctgccctgctctgcagaggcctcactcagcctctgctctggaccagtctccatgtgctcagcccacaatgccctggcaagatggaccaaagcagacctccccaagtagagaagcttcagctctgacagcagagggtggaagctgcctcatctcaggactccagcctggcaactcctactggctgcagctgcgcagcgaacctgatgggatctccctcggtggctcctggggatcctggtccctccctgtgactgtggacctgcctggagatgcagtggcacttggactgcaatgctttaccttggacctgaagaatgttacctgtcaatggcagcaacaggaccatgctagctcccaaggcttcttctaccacagcagggcacggtgctgccccagagacaggtaccccatctgggagaactgcgaagaggaagagaaaacaaatccaggactacagaccccacagttctctcgctgccacttcaagtcacgaaatgacagcattattcacatccttgtggaggtgaccacagccccgggtactgttcacagctacctgggctcccctttctggatccaccaggctgtgcgcctccccaccccaaacttgcactggagggagatctccagtgggcatctggaattggagtggcagcacccatcgtcctgggcagcccaagagacctgttatcaactccgatacacaggagaaggccatcaggactggaaggtgctggagccgcctctcggggcccgaggagggaccctggagctgcgcccgcgatctcgctaccgtttacagctgcgcgccaggctcaacggccccacctaccaaggtccctggagctcgtggtcggacccaactagggtggagaccgccaccgagaccgcctggatctccttggtgaccgctctgcatctagtgctgggcctcagcgccgtcctgggcctgctgctgctgaggtggcagtttcctgcacactacaggagactgaggcatgccctgtggccctcacttccagacctgcaccgggtcctaggccagtaccttagggacactgcagccctgagcccgcccaaggccacagtctcagatacctgtgaagaagtggaacccagcctccttgaaatcctccccaagtcctcagagaggactcctttgcccctgtgttcctcccaggcccagatggactaccgaagattgcagccttcttgcctggggaccatgcccctgtctgtgtgcccacccatggctgagtcagggtcctgctgtaccacccacattgccaaccattcctacctaccactaagctattggcagcagccttgaggacaggctcctcactcccagttccctggacagagctaaactctcgagacttctctgtgaacttccctaccctacccccacaacacaagcaccccagacctcacctccatccccctctgtctgccctcacaattaggcttcattgcactgatcttactctactgctgctgacataaaaccaggaccctttctccacaggcaggctcatttcactaagctcctcctttacttnctctctcctctttgatgtcaaacgccttgaaaacaagcctccacttccccacacttcccatttactcttgagactacttcaattagttcccctactacactttgctagtgaactgcccaggcaaagtgcacctcaaatcttctaattccaagatccaataggatctcgttaatcatcagttcctttgatctcgctgtaagatttgtcaaggctgactactcacttctcctttaaattctttcctaccttggtcctgcctctttgagtatattagtaggttttttttatttgtttgagacagggtctcactctgtcacccaggctgcagtgcaatggcgcgatctcagctcactgcaacctccacctccgggttcaagcgattcttgtgcctcggcctccctagtagctgggattacaggcgcacaccaccacacacagctaattttttttttttttttttttttttttttttagacggagccttgcctgttgccagactggagtgcagtggcacgatctcggctcactgcaacctctgcctcccgggttcaagccattctgcctcagcctcccaagtagctgggagtacagcgtctgccaccatgcctaatttttttctatttttaggagagaccggttttcaccacgttggccaggatggtctcgatatctgatctcgtgatccgcctgcctctgcctcccaaagtgctgggattacaggtgtgacccactgcgcacagccccagctaattttcatatttttagtagagacagggttttgccatgttgcccaggctggtcttgaactcctaacctcgggtgatccacccaccttggcctcccaaagtgttaggattacaggcatgagccactgcgcccggctgagtgtactagtagttaagagaataaactagatctagaatcagagctggattcaattcctgtccttcacatttactagctgtgcaaccttgggcacataacttaatgtctttgagccttagttttttcatctgtaaaacagggataataacagcaccccatagagttgtgacgaggattgagataatctaagtaaagcacagtccctaggacatagtaaatgattcatatatccgaactactgttataattattccttcttactctcctcttctagcatttcttccaattattacagtccttcaagattccatttcttaacagtctccaatcccatctattctctgcctttactatatgttgaccattccaaagttcttatctctagctcagacatctactacagcactgtgatgctttatgcaactaactgtttacatatctgtcccctgctactagattgtgagctccttgagggaaaggaacatgatttatttgtccttttcccccagcacctagagtagtgcttggtgcatgatagtaggccttcaataaattttttctaaatgaatgaaatctttctggacaaggttaccttaatcccatgccagctgtcctcatcctctaaaccattcataggcagcagtaaatgtgctcagacagttctgattatggactctcctaacacattctaattctcaaacaaatggttttgttgtcattgttttttctggctccaaatatacccactgtatcagtcagggtcttgga

SEQ ID NO: 65259 - DNA, 402 bp, Homo sapiens
actgaggcgccttctctttttattcttgagccaatgagatatcagtgtgtttattaataaggattgcaatagtatagtgcttaatatgtgccaggcatagtgctaagggtttacatacgttatcccttttaatccagaaaacagcctttgattaggtattgttgtctccattttatagatgaggaaactgaggcagtatgactgaggccgagagcagtggttaagacagactttgggatcaaatcaccctaggtgcgggcaggtttctaggctgctctaagcttctaccttgaaggcagttgggtctgataatagtaccttcttcctggggtggttgtgaggatataacgaggtaatgcatgtaagcatttagtaccatgcctggcacatagtaagcactca

SEQ ID NO: 65260 - DNA, 255 bp, Homo sapiens
ataagagaatcaaggtgctacagcctgggctactgtttttcaaactcattatccaggaaaggagaaaaataaaagaaacccatagttttaatacagtgtgacaagtgctttgataaaccaatcgtaaggtgctgtgcaaggatataagatatacaccaaactcaaccttggggtttcactgaaagcttctaataggccttagccctgatggagtttaaaggattaaattgaattcaacagatttctaaaattaaa

SEQ ID NO: 65261 - DNA, 324 bp, Homo sapiens
gcagaagaatcgcttaaacccgggaggcagaagttgctgtgagccaatattacgccactgcacttcagcttgggtgacagagcaagacgctgtctcaaaaaaaaaaaaaaaaaatctattgaacgctaagagccaggcactggaatatggagatgaataagatactttctttccatagaaacatctgtggcctgtttatatacttaacaaagcatgtgctttacagccatcatttgttaagtcttaacagtttatcttgccaaaataaacagactggtaacatatcacaagaggaatttaggaatagcatcctctgactcaccc

SEQ ID NO: 65262 - DNA, 3890 bp, Homo sapiens
cggccgccagccggctcctgcgtccgtccgtcggccgggcagtctgtccacgcgcggaaagctcggcgcggcggccgaggggcctgggagggaacgggcgcggaggcgggaccgcggctccctcccactccggggggagcccaggaggcggcggtgctggagcgcgagccggagccggagccggagacgaagagaggcggtcgcgagcacgagtggggtggggcgtgccacgggcccccgcccccctcgtccccctcgtcccccagcccagctccggagccgcagtccaggcgcgccgcccgagggtccacgccgcacccctcccccgtgcgttctgcggccacccaggccttccaggacaccgtggagagggaacaagggggcagggacgcccccttcggcaggagccgtcggagaagggggcccagaccggagggaggcgagaagccccactgaagccgggcgcagggtctgggacgcagttgggagtgcaaagggctggctgagagccgcaggagcagcaggctgtggcccaggcctcctgggtgacaggccctgtctggcggggaacagggaccaagagacaacacagaagaggctggacctcgaacaggggcggctgcctcactccctacctgagccagccgagggggccaaggactttagagctgtttcctccggcataagagagacacttgctttccagggcagcaccctttatcggagaaggctctacagggaaggggtctttgcagcctggatggccatcccacattcctttaacggaggtctctaggcctcagagagaacccagagttagaaaggaggccagacggtccttgctgtccccctggggagagaggaagttgccgcctgctgccaggcccaggaggagctgggcctgcaatagtgggggacctggcccctgaggcagtggcggccatgtcacggccaggccacggtgggctgatgcctgtgaatggtctgggcttcccaccgcagaacgtggcccgggtggtggtgtgggagtgtctgaatgagcacagccgctggcggccctacacggccaccgtgtgccaccacattgagaacgtgctgaaggaggacgctcgcggttccgtggtcctggggcaggtggacgcccagcttgtgccctacatcatcgacctgcagtccatgcaccagtttcgccaggacacaggcaccatgcggcccgtgcggcgcaacttctacgacccgtcgtcggcgccgggcaagggcatcgtgtgggagtgggagaacgacggcggcgcatggacggcctacgatatggacatctgcatcaccatccagaacgcctacgagaagcagcacccgtggctcgacctctcatcgctaggcttctgctacctcatctacttcaacagcatgtcgcagatgaaccgccagacgcgccggcgccgccgcctgcgccgccgcctggacctcgcctacccgctcaccgtgggctccatccctaagtcgcagtcgtggcccgtgggcgccagctcgggccagccctgctcctgccagcagtgcctgctggtcaacagcacgcgcgccgcctccaacgccatcctggcctcgcagcgccgcaaggtgccccccgcgcccccgctgccgccgccgccgccacctggagggcctccaggcgcgcttgccgtgcgccccagcgccaccttcacaggcgccgcgctctgggcagcgcccgccgccggccccgccgagcccgcgccgcctcccggggcgcccccacggagcccgggcgcccccggcggagcgcgcaccccggggcagaacaacctcaaccggcccgggccccagcgcaccaccagcgtgagcgcgcgcgcctccatcccgccgggggtccccgcactcccggtgaagaacttgaatggtactgggccggtccatccggccctggcagggatgaccgggatactgctgtgcgcggccgggctgcccgtgtgcctgacgcgggcccccaagcccatcctgcacccgccgcccgtgagcaagagcgacgtgaagcccgtgcctggcgtgcccggggtgtgccgcaagaccaagaagaagcaccttaaaaagagtaagaatcccgaggatgtggttcgaagatacatgcagaaggtgaaaaacccacctgatgaggactgcaccatctgcatggagcgactggtcacagcatcaggctacgagggcgtgcttcggcacaagggcgtgcggcctgagctcgtgggccgcctgggccgctgtggccacatgtaccacctgctgtgcctcgtggccatgtactccaatggcaacaaggatggcagcctgcagtgccccacctgcaaggccatctacggggagaagacgggtacgcagccgcctgggaagatggagttccacctcatcccccactcgctgcccggcttccctgatacccagaccatccgcatcgtctatgacatccccacaggcatccagggccctgagcaccccaaccccgggaagaagttcaccgcaagaggattccctcgccactgctatctacccaacaacgagaaaggccggaaggtgctgcggctgctcatcacggcctgggagagaagactcatcttcactatcggcacgtccaacaccacgggcgagtcggacaccgtggtgtggaacgagatccaccacaagaccgagtttggatccaacctcacgggccacggctacccggacgctagctacctagacaacgtgctggctgagctcacagcccagggcgtatccgaggctgcagccaaggcttgaggcccaaggctgcccaccttccctcctgctttgcccctggtccggcaaatgcctccttcgccaggtgtgtcctggtagcccaggttcagggctggggaggagcctgcggaaggggccgcagccattcaggggacctgcctggtggcagctgggatgaagagagatggcatgtcaggctggccccgaatcatagctccctgagagggccaagcagagagtactggaaacctccctaccaaaaagacagagacccgccccctcacacacaaacacacatgtcctgttgaactcatgcacgcacacccacgtgcctgtacttgcccccaggctggaagagaagagacagaaagaccccatgacccccccatgtggatccccatctgtgtctcagttgcatctgtacagccttgtctgcaaactggaggatgcggggcaagcccttaggggcctgccagggctcggggggcaaagagggactcgggaaactcagtgtaccccagatgcctcacccattccgtgtcatcacccatgtctgccacccactgattgggcaattgtgggcccatggggtggaagcccccagatgactgagcagttctacaaaaaatggccagcacgagcggggactagagggtcctgattttgtgtctgtgcctcttcatctctctggactctgatctccttctcccttcccatctccaggccttctgtctgtcccagataaaggcgctgttctcccatcctccctaccccatcctctccaccaaatcgctcccaattttgagagccaaaggctggcgcttctgacttcaggagcgaaaggaggaggcctagtttgggccgatgtattttaaagcagagtggacagcagagagtcaatttccctttcgttgggagtgggcagtggggtggctaattgtcttcggccaaccaggggcctgttgcccaggcaactcaccagctccgcctctgctgattggctgccacggtgggagtcagccaagatttaaagggatgccagcgattgctcttttcaaaacctaccagtcccactgtgggtggagaaataaatggtctttctcctc

SEQ ID NO: 65263 - DNA, 1811 bp, Homo sapiens
cacggcccttccgcaggctcctccccagccctgaacctgggctaccaggttcgaagatacatgcagaaggtgaaaaacccacctgatgaggactgcaccatctgcatggagcgactggtcacagcatcaggctacgagggcgtgcttcggcacaagggcgtgcggcctgagctcgtgggccgcctgggccgctgtggccacatgtaccacctgctgtgcctcgtggccatgtactccaatggcaacaaggatggcagcctgcagtgccccacctgcaaggccatctacggggagaagacgggtacgcagccgcctgggaagatggagttccacctcatcccccactcgctgcccggcttccctgatacccagaccatccgcatcgtctatgacatccccacaggcatccagggccctgagcaccccaaccccgggaagaagttcaccgcaagaggattccctcgccactgctatctacccaacaacgagaaaggccggaaggtgctgcggctgctcatcacggcctgggagagaagactcatcttcactatcggcacgtccaacaccacgggcgagtcggacaccgtggtgtggaacgagatccaccacaagaccgagtttggatccaacctcacgggccacggctacccggacgctagctacctagacaacgtgctggctgagctcacagcccagggcgtatccgaggctgcagccaaggcttgaggcccaaggctgcccaccttccctcctgctttgcccctggtccggcaaatgcctccttcgccaggtgtgtcctggtagcccaggttcagggctggggaggagcctgcggaaggggccgcagccattcaggggacctgcctggtggcagctgggatgaagagagatggcatgtcaggctggccccgaatcatagctccctgagagggccaagcagagagtactggaaacctccctaccaaaaagacagagacccgccccctcacacacaaacacacatgtcctgttgaactcatgcacgcacacccacgtgcctgtacttgcccccaggctggaagagaagagacagaaagaccccatgacccccccatgtggatccccatctgtgtctcagttgcatctgtacagccttgtctgcaaactggaggatgcggggcaagcccttaggggcctgccagggctcggggggcaaagagggactcgggaaactcagtgtaccccagatgcctcacccattccgtgtcatcacccatgtctgccacccactgattgggcaattgtgggcccatggggtggaagcccccagatgactgagcagttctacaaaaaatggccagcacgagcggggactagagggtcctgattttgtgtctgtgcctcttcatctctctggactctgatctccttctcccttcccatctccaggccttctgtctgtcccagataaaggcgctgttctcccatcctccctaccccatcctctccaccaaatcgctcccaattttgagagccaaaggctggcgcttctgacttcaggagcgaaaggaggaggcctagtttgggccgatgtattttaaagcagagtggacagcagagagtcaatttccctttcgttgggagtgggcagtggggtggctaattgtcttcggccaaccaggggcctgttgcccaggcaactcaccagctccgcctctgctgattggctgccacggtgggagtcagccaagatttaaagggatgccagcgattgctcttttcaaaacctaccagtcccactgtgggtggagaaataaatggtctttctcctc

SEQ ID NO: 65264 - DNA, 1518 bp, Homo sapiens
aacatttttaacttggaaagagcttttactggaagttcaggaaatacaaatgcaaaggaaatggccaagccagcagtacgtagttggtgctaatggacgaagccataaggtagccatgatgtggcaggggagggagggaggctgaggctggtgggctggaagctgcctgtgacctcctcccggccccactgtgtccctgtccccccaggtgctgcggctgctcatcacggcctgggagagaagactcatcttcactatcggcacgtccaacaccacgggcgagtcggacaccgtggtgtggaacgagatccaccacaagaccgagtttggatccaacctcacgggccacggctacccggacgctagctacctagacaacgtgctggctgagctcacagcccagggcgtatccgaggctgcagccaaggcttgaggcccaaggctgcccaccttccctcctgctttgcccctggtccggcaaatgcctccttcgccaggtgtgtcctggtagcccaggttcagggctggggaggagcctgcggaaggggccgcagccattcaggggacctgcctggtggcagctgggatgaagagagatggcatgtcaggctggccccgaatcatagctccctgagagggccaagcagagagtactggaaacctccctaccaaaaagacagagacccgccccctcacacacaaacacacatgtcctgttgaactcatgcacgcacacccacgtgcctgtacttgcccccaggctggaagagaagagacagaaagaccccatgacccccccatgtggatccccatctgtgtctcagttgcatctgtacagccttgtctgcaaactggaggatgcggggcaagcccttaggggcctgccagggctcggggggcaaagagggactcgggaaactcagtgtaccccagatgcctcacccattccgtgtcatcacccatgtctgccacccactgattgggcaattgtgggcccatggggtggaagcccccagatgactgagcagttctacaaaaaatggccagcacgagcggggactagagggtcctgattttgtgtctgtgcctcttcatctctctggactctgatctccttctcccttcccatctccaggccttctgtctgtcccagataaaggcgctgttctcccatcctccctaccccatcctctccaccaaatcgctcccaattttgagagccaaaggctggcgcttctgacttcaggagcgaaaggaggaggcctagtttgggccgatgtattttaaagcagagtggacagcagagagtcaatttccctttcgttgggagtgggcagtggggtggctaattgtcttcggccaaccaggggcctgttgcccaggcaactcaccagctccgcctctgctgattggctgccacggtgggagtcagccaagatttaaagggatgccagcgattgctcttttcaaaacctaccagtcccactgtgggtggagaaataaatggtctttctcctc

SEQ ID NO: 65265 - DNA, 2789 bp, Homo sapiens
cggccgccagccggctcctgcgtccgtccgtcggccgggcagtctgtccacgcgcggaaagctcggcgcggcggccgaggggcctgggagggaacgggcgcggaggcgggaccgcggctccctcccactccggggggagcccaggaggcggcggtgctggagcgcgagccggagccggagccggagacgaagagaggcggtcgcgagcacgagtggggtggggcgtgccacgggcccccgcccccctcgtccccctcgtcccccagcccagctccggagccgcagtccaggcgcgccgcccgagggtccacgccgcacccctcccccgtgcgttctgcggccacccaggccttccaggacaccgtggagagggaacaagggggcagggacgcccccttcggcaggagccgtcggagaagggggcccagaccggagggaggcgagaagccccactgaagccgggcgcagggtctgggacgcagttgggagtgcaaagggctggctgagagccgcaggagcagcaggctgtggcccaggcctcctgggtgacaggccctgtctggcggggaacagggaccaagagacaacacagaagaggctggacctcgaacaggggcggctgcctcactccctacctgagccagccgagggggccaaggactttagagctgtttcctccggcataagagagacacttgctttccagggcagcaccctttatcggagaaggctctacagggaaggggtctttgcagcctggatggccatcccacattcctttaacggaggtctctaggcctcagagagaacccagagttagaaaggaggccagacggtccttgctgtccccctggggagagaggaagttgccgcctgctgccaggcccaggaggagctgggcctgcaatagtgggggacctggcccctgaggcagtggcggccatgtcacggccaggccacggtgggctgatgcctgtgaatggtctgggcttcccaccgcagaacgtggcccgggtggtggtgtgggagtgtctgaatgagcacagccgctggcggccctacacggccaccgtgtgccaccacattgagaacgtgctgaaggaggacgctcgcggttccgtggtcctggggcaggtggacgcccagcttgtgccctacatcatcgacctgcagtccatgcaccagtttcgccaggacacaggcaccatgcggcccgtgcggcgcaacttctacgacccgtcgtcggcgccgggcaagggcatcgtgtgggagtgggagaacgacggcggcgcatggacggcctacgatatggacatctgcatcaccatccagaacgcctacgagaagcagcacccgtggctcgacctctcatcgctaggcttctgctacctcatctacttcaacagcatgtcgcagatgaaccgccagacgcgccggcgccgccgcctgcgccgccgcctggacctcgcctacccgctcaccgtgggctccatccctaagtcgcagtcgtggcccgtgggcgccagctcgggccagccctgctcctgccagcagtgcctgctggtcaacagcacgcgcgccgcctccaacgccatcctggcctcgcagcgccgcaaggtgccccccgcgcccccgctgccgccgccgccgccacctggagggcctccaggcgcgcttgccgtgcgccccagcgccaccttcacaggcgccgcgctctgggcagcgcccgccgccggccccgccgagcccgcgccgcctcccggggcgcccccacggagcccgggcgcccccggcggagcgcgcaccccggggcagaacaacctcaaccggcccgggccccagcgcaccaccagcgtgagcgcgcgcgcctccatcccgccgggggtccccgcactcccggtgaagaacttgaatggtactgggccggtccatccggccctggcagggatgaccgggatactgctgtgcgcggccgggctgcccgtgtgcctgacgcgggcccccaagcccatcctgcacccgccgcccgtgagcaagagcgacgtgaagcccgtgcctggcgtgcccggggtgtgccgcaagaccaagaagaagcaccttaaaaagagtaagaatcccgaggatgtggttcgaagatacatgcagaaggtgaaaaacccacctgatgaggactgcaccatctgcatggagcgactggtcacagcatcaggctacgagggcgtgcttcggcacaagggcgtgcggcctgagctcgtgggccgcctgggccgctgtggccacatgtaccacctgctgtgcctcgtggccatgtactccaatggcaacaaggatggcagcctgcagtgccccacctgcaaggccatctacggggagaagacgggtacgcagccgcctgggaagatggagttccacctcatcccccactcgctgcccggcttccctgatacccagaccatccgcatcgtctatgacatccccacaggcatccagggccctgagcaccccaaccccgggaagaagttcaccgcaagaggattccctcgccactgctatctacccaacaacgagaaaggccggaaggtgggtgcccagccgtgagggcatgggagataggcacaggcaggggctccagcaaccactggcctgggcctgtggtccccatcattcccaatccctgctctcacattcctcccaaaagcagcacccaaacagtaacgaccacagccacctccttcacacatcttatctcgtttcctgagccactgaggtcaagatcctgaccccatttt

SEQ ID NO: 65266 - DNA, 3653 bp, Homo sapiens
cggccgccagccggctcctgcgtccgtccgtcggccgggcagtctgtccacgcgcggaaagctcggcgcggcggccgaggggcctgggagggaacgggcgcggaggcgggaccgcggctccctcccactccggggggagcccaggaggcggcggtgctggagcgcgagccggagccggagccggagacgaagagaggcggtcgcgagcacgagtggggtggggcgtgccacgggcccccgcccccctcgtccccctcgtcccccagcccagctccggagccgcagtccaggcgcgccgcccgagggtccacgccgcacccctcccccgtgcgttctgcggccacccaggccttccaggacaccgtggagagggaacaagggggcagggacgcccccttcggcaggagccgtcggagaagggggcccagaccggagggaggcgagaagccccactgaagccgggcgcagggtctgggacgcagttgggagtgcaaagggctggctgagagccgcaggagcagcaggctgtggcccaggcctcctgggtgacaggccctgtctggcggggaacagggaccaagagacaacacagaagaggctggacctcgaacaggggcggctgcctcactccctacctgagccagccgagggggccaaggactttagagctgtttcctccggcataagagagacacttgctttccagggcagcaccctttatcggagaaggctctacagggaaggggtctttgcagcctggatggccatcccacattcctttaacggaggtctctaggcctcagagagaacccagagttagaaaggaggccagacggtccttgctgtccccctggggagagaggaagttgccgcctgctgccaggcccaggaggagctgggcctgcaatagtgggggacctggcccctgaggcagtggcggccatgtcacggccaggccacggtgggctgatgcctgtgaatggtctgggcttcccaccgcagaacgtggcccgggtggtggtgtgggagtgtctgaatgagcacagccgctggcggccctacacggccaccgtgtgccaccacattgagaacgtgctgaaggaggacgctcgcggttccgtggtcctggggcaggtggacgcccagcttgtgccctacatcatcgacctgcagtccatgcaccagtttcgccaggacacaggcaccatgcggcccgtgcggcgcaacttctacgacccgtcgtcggcgccgggcaagggcatcgtgtgggagtgggagaacgacggcggcgcatggacggcctacgatatggacatctgcatcaccatccagaacgcctacgagaagcagcacccgtggctcgacctctcatcgctaggcttctgctacctcatctacttcaacagcatgtcgcagatgaaccgccagacgcgccggcgccgccgcctgcgccgccgcctggacctcgcctacccgctcaccgtgggctccatccctaagtcgcagtcgtggcccgtgggcgccagctcgggccagccctgctcctgccagcagtgcctgctggtcaacagcacgcgcgccgcctccaacgccatcctggcctcgcagcgccgcaaggtgccccccgcgcccccgctgccgccgccgccgccacctggagggcctccaggcgcgcttgccgtgcgccccagcgccaccttcacaggcgccgcgctctgggcagcgcccgccgccggccccgccgagcccgcgccgcctcccggggcgcccccacggagcccgggcgcccccggcggagcgcgcaccccggggcagaacaacctcaaccggcccgggccccagcgcaccaccagcgtgagcgcgcgcgcctccatcccgccgggggtccccgcactcccggtgaagaacttgaatggtactgggccggtccatccggccctggcagggatgaccgggatactgctgtgcgcggccgggctgcccgtgtgcctgacgcgggcccccaagcccatcctgcacccgccgcccgtgagcaagagcgacgtgaagcccgtgcctggcgtgcccggggtgtgccgcaagaccaagaagaagcaccttaaaaagagtaagaatcccgaggatgtggttcgaagatacatgcagaaggtgaaaaacccacctgatgaggactgcaccatctgcatggagcgactggtcacagcatcaggctacgagggcgtgcttcggcacaagggcgtgcggcctgagctcgtgggccgcctgggccgctgtggccacatgtaccacctgctgtgcctcgtggccatgtactccaatggcaacaaggatggcagcctgcagtgccccacctgcaaggccatctacggggagaagacgggtacgcagccgcctgggaagatggagttccacctcatcccccactcgctgcccggcttccctgatacccagaccatccgcatcgtctatgacatccccacaggcatccagggccctgagcaccccaaccccgggaagaagttcaccgcaagaggattccctcgccactgctatctacccaacaacgagaaaggccggaaggtgctgcggctgctcatcacggcctgggagagaagactcatcttcactatcggcacgtccaacaccacgggcgagtcggacaccgtggtgtggaacgagatccaccacaagaccgagtttggatccaacctcacgggccacggctacccggacgctagctacctagacaacgtgctggctgagctcacagcccagggcgtatccgaggctgcagccaaggcttgaggcccaaggctgcccaccttccctcctgctttgcccctggtccggcaaatgcctccttcgccaggtgtgtcctggtagcccaggttcagggctggggaggagcctgcggaaggggccgcagccattcaggggacctgcctggtggcagctgggatgaagagagatggcatgtcaggctggccccgaatcatagctccctgagagggccaagcagagagtactggaaacctccctaccaaaaagacagagacccgccccctcacacacaaacacacatgtcctgttgaactcatgcacgcacacccacgtgcctgtacttgcccccaggctggaagagaagagacagaaagaccccatgacccccccatgtggatccccatctgtgtctcagttgcatctgtacagccttgtctgcaaactggaggatgcggggcaagcccttaggggcctgccagggctcggggggcaaagagggactcgggaaactcagtgtaccccagatgcctcacccattccgtgtcatcacccatgtctgccacccactgattgggcaattgtgggcccatggggtggaagcccccagatgactgagcagttctacaaaaaatggccagcacgagcggggactagagggtcctgattttgtgtctgtgcctcttcatctctctggactctgatctccttctcccttccattcgggcttctgttggccaattaagggtgttccattcttcctaaccattctttcaccaatggtccatttggaaccagggggtctgattcgacgaagggagcatggcgggataagcagggggagaaacctctgggggggggggagttgcccaccg

SEQ ID NO: 65267 - DNA, 2068 bp, Homo sapiens
ggcagtgacttcctggagcactgtgttgaggaggactctgaagttgcatcttggcttagcgggtccccgcactcccggtgaagaacttgaatggtactgggccggtccatccggccctggcagggatgaccgggatactgctgtgcgcggccgggctgcccgtgtgcctgacgcgggcccccaagcccatcctgcacccgccgcccgtgagcaagagcgacgtgaagcccgtgcctggcgtgcccggggtgtgccgcaagaccaagaagaagcaccttaaaaagagtaagaatcccgaggatgtggttcgaagatacatgcagaaggtgaaaaacccacctgatgaggactgcaccatctgcatggagcgactggtcacagcatcaggctacgagggcgtgcttcggcacaagggcgtgcggcctgagctcgtgggccgcctgggccgctgtggccacatgtaccacctgctgtgcctcgtggccatgtactccaatggcaacaaggatggcagcctgcagtgccccacctgcaaggccatctacggggagaagacgggtacgcagccgcctgggaagatggagttccacctcatcccccactcgctgcccggcttccctgatacccagaccatccgcatcgtctatgacatccccacaggcatccagggccctgagcaccccaaccccgggaagaagttcaccgcaagaggattccctcgccactgctatctacccaacaacgagaaaggccggaaggtgctgcggctgctcatcacggcctgggagagaagactcatcttcactatcggcacgtccaacaccacgggcgagtcggacaccgtggtgtggaacgagatccaccacaagaccgagtttggatccaacctcacgggccacggctacccggacgctagctacctagacaacgtgctggctgagctcacagcccagggcgtatccgaggctgcagccaaggcttgaggcccaaggctgcccaccttccctcctgctttgcccctggtccggcaaatgcctccttcgccaggtgtgtcctggtagcccaggttcagggctggggaggagcctgcggaaggggccgcagccattcaggggacctgcctggtggcagctgggatgaagagagatggcatgtcaggctggccccgaatcatagctccctgagagggccaagcagagagtactggaaacctccctaccaaaaagacagagacccgccccctcacacacaaacacacatgtcctgttgaactcatgcacgcacacccacgtgcctgtacttgcccccaggctggaagagaagagacagaaagaccccatgacccccccatgtggatccccatctgtgtctcagttgcatctgtacagccttgtctgcaaactggaggatgcggggcaagcccttaggggcctgccagggctcggggggcaaagagggactcgggaaactcagtgtaccccagatgcctcacccattccgtgtcatcacccatgtctgccacccactgattgggcaattgtgggcccatggggtggaagcccccagatgactgagcagttctacaaaaaatggccagcacgagcggggactagagggtcctgattttgtgtctgtgcctcttcatctctctggactctgatctccttctcccttcccatctccaggccttctgtctgtcccagataaaggcgctgttctcccatcctccctaccccatcctctccaccaaatcgctcccaattttgagagccaaaggctggcgcttctgacttcaggagcgaaaggaggaggcctagtttgggccgatgtattttaaagcagagtggacagcagagagtcaatttccctttcgttgggagtgggcagtggggtggctaattgtcttcggccaaccaggggcctgttgcccaggcaactcaccagctccgcctctgctgattggctgccacggtgggagtcagccaagatttaaagggatgccagcgattgctcttttcaaaacctaccagtcccactgtgggtggagaaataaatggtctttctcctc

SEQ ID NO: 65268 - DNA, 423 bp, Homo sapiens
cagacctcaggactccccaggcaagagccataacaccccttggggttctgcagttgctggcatctcctagttttggggcactgctgcatcctcctcatccagacgccagcatccaaggtgaaagatggtcacagcatgcccaggccagccgcaggctgagcacagaaccatggcaggtgcagaatcccagccagtggcacaagctgagtgcagccagccaggctgagtgggtggagcaagcccagcagtgagccaggagccaagcaaggcccaggcaggggcaccactctctgagagagacccggagcaatcttcaaggaaattcaaaagggaaacaattggtagattggtaaggtgacaaggaaaaagaaaggatgaagggagagaggtaaggaacaatctgcatagcacagagaagacctg

SEQ ID NO: 65269 - DNA, 363 bp, Homo sapiens
gccatggtctctaataactgcaggcacatatctttctggatggaaaagactctcttattccaggtttaggaataaaattctcagggaataattttgatgggctcatcttaagccagtttttatctattaaacaagcatggtggttacagatataatgtaagcaaagcacagttaacattagatctgtgtggtatggagaatgttccaggttggatgactggagagatggtgataccaccaacttaggcagaaacacaggaggactgagctagtatgggaggaaggacatggagagttcaattttggatattctgagttagaactataactaggacattcaggtggatgaatctcagggcagtt

SEQ ID NO: 65270 - DNA, 1243 bp, Homo sapiens
  misc_feature (1)..(1): n is a, c, g, or t
  misc_feature (9)..(9): n is a, c, g, or t
  misc_feature (11)..(15): n is a, c, g, or t
  misc_feature (17)..(17): n is a, c, g, or t
  misc_feature (395)..(395): n is a, c, g, or t
  misc_feature (930)..(930): n is a, c, g, or t
  misc_feature (1224)..(1224): n is a, c, g, or t
ngatccacncnnnnngngtggattcctgccctgttcccacaggacagccctcaaccaatggagacaggaacctggagttaaatgcttctccctttttcactgagagagagacatgcacagtctgatgcactttctttccttctttctttttctttctttttttttcttaagacagagtctctctctgtcaccaaggctggagtgcaggggcacgatctgggctcactgccacctccacctcccgggttcaagcaattctcccacctcagcctcccgagtagctgggattacaggcactagttaccacgcccagctaatttttgtatttttagtagagatgcggtttcaccatattggtcaggctggtctcagactcctgatctcaggtaatctgnctgcctcagcctcccaaggtgctggaattacaggcatgagccaccacacctggccgtgatgcactttctagatgctgtcctagagatcacactgtgttaagcctcagttgccttcaatgtggtcatctctacagtatacccttagcttttttctcctccgttactttcccagaccctcactctgctccctggattcacttttcgaaatagtcctcctgctgcaaagtcctgggcacctgccctactttcagcattggaaggggggcccaggctaagaccatgaggccccactgtgggcgcccacagccccgttcctccctctattcccaccacagtcacatcctcctgtccctcagtgcttcctcgcctttccctccagcccaccgtgagatcccaggggacggagcagccccttctctgccccagtgcagggcttggccttagcacacggtcagtctgtgctggggtgaagtgatgaatgagtgagtggttgagtgataatgcatcatcagatctgtcttttccacatgtctcnatctccacccagaaccagttttctcatccacaaatgggcatttgaggctgggtgctcctaaaccctacaaaattcagagctggcacagttggggactgaccttccttgatctcacctcactttctgtatctataaaatggggtacctttctctaagagtaaaaaggaggcctggcatagggaaagaaactcagctcgagcatccagaacatccatcttgctctcaaatacctaatacaggggaccatgttttctgctataattggtattggagctggtaccatttattaaaggnaattcagttacaaagcttc

SEQ ID NO: 65271 - DNA, 474 bp, Homo sapiens
gatatttttatcataagccctatcaaaactctggctatcttccggagatcaggaaacaaccacacacttccatctattttaaacgtggaagaattagaacgtggcacagcagaccctaaaaatgatggaaaaggctgtgaaggtgacacactaatcgctaaccgagaaatgcctgattgaaaagtataatcgtgtgtcccatacggaagtatattgtgtcctcggaccccaagcggcgtgcccggaggctcaatgtcaccttcgccgaggcgctgcaggccggcggcggccactctcggtcaggtggccgcagggtcggcgctggggcagggtcatggcccgggaaccgaaggggagcgctgcgtcccctcctcggcgcccacagcaggtccacatctgacctgtccgcggtggcacagccaggaagttgcgcggggggaggccccgggggcgcgctttcaggtcctccactac

SEQ ID NO: 65272 - DNA, 293 bp, Homo sapiens
gattcagagctaaaacatttggggttcttcaaagaagagaggcatttatcaagaggaagctgcctctaagcatgagttgaaagcagttgtatatcagactttatggagagtagtggtatttagttgccgttttgtaagctgttcttatatggtactaattttgttttgttttgttttttgtttttgtgaggttttggtttcgttttgttttggtagagatgccagggactgaatatggtactaatttgtgactcatacttaagagtagttaaatttttgcatgctaattttcc

SEQ ID NO: 65273 - DNA, 607 bp, Homo sapiens
taaccaaaatttgctgtgctagagctagactttggtctgaattggcagaggtagaacccatgttgcatgtttatcctaaatctgtaggaatttcccaaaccttgtttttcaaagttgagaagtagaaagtaataaattcaatcagggcccagacatgttttgtaccccctttaccctttggtctttcttccttttatcctattccactgagcttgttctttggggattgtggtgcctgacatcactgtctttcctcccctaggacactgacttgagtggagagacctcggcaattcaaggctgtcctgcagctctctgttgcctcagcaatgtcaggacgactgtctctttcctaagtaacataattttaaagaacaatttgttcctcagggaataatgtcttggattgtggggaatcctattaaaagtacaactattgcagtcatttgcttttacttttaccagcctcactcataaaccctccatctgtttgttgctttaaatagaagcacattataagagattatcacttgatcaggctgcatgtctgagtgttgtgtgttttcacatactcatgtatactaaggaataaaagaaagcaaaccac

SEQ ID NO: 65274 - DNA, 658 bp, Homo sapiens
cttagatcttaagccactgctgatcttcttagaaccacacaccgcaggtgcttccctgtggaaactgcaaatgtttactctgtcttccacctttgaatgacttagaacatgttgtggctaaggttcattcgttatcaacattcagaaactgccatttccttttctacctgcaaagcctaataataactttttaaactattgcttcctttgcatattcaccatacatcctgctttcagatgtggaatctaaaaccttgctgagaaactgcctccaatgttgctcccttaactttcactgtggaaaactctgaaggaagttggccgcaccatttaatggaagcatgaggaactagtctctttcctttagatatgtatgaaaatggctccactgtgactcagcagatggctccactgtgactcagcagatctccaggattttcctgtgtagtttctgttttggctttcatctggtgggaactgactgctacaggaccgaggcttttaaatcaaacccaaataacaaaatgtatttagagctgaaaaaggtggtgccatcaggctggggtggggatgaggaagtgattcattaccccagttggaatgtaaattcaatgagtttaattactagtggtgtcaaaaaaggattttcactgatagc

SEQ ID NO: 65275 - DNA, 267 bp, Homo sapiens
gcaggggaggggagaattaagacagcttctataaattaaaaaccaagaagctttccaacaatctaagacaagattctagaaggagtggaatatagagttctgtaggctagactgaggtgtcttgctaaaatctgacaatggcagtcttttttcaaccatggagaaaagtaagttaatcgataaaacaatttaaatgtcaagcttttccctcaaacttttcttaatcagcatctgccaccactagcctattcttgaatttagtttaag

SEQ ID NO: 65276 - DNA, 497 bp, Homo sapiens
gagttgtgcaactgtaaaaggccttgtgtgctgtgtttggacaaaggcaatgacaaccggaatggagaggaagccttattttagaggtccatacctggaagaactgacaacataaccagttgaatgtgggaaatctgcaacagcaaagcaagcatctaggataactctaagagccagcttgggcaaccgagtggatggtagtgccactgagtgtgacagggatggcaagaaaagcattaagttccaaggggaaagaaaactaggacatgtccaggttggggtatctatatactatctaaatggagcaatccactaggcaagtgagaatttgagattagagttcaaggttatgatcaaggctaaaggcattgatcttagagatgacaataaaaacaccaagagaggtgatggtaaaagccttaggactgaatggcgtcgcccagctctcatgtgtaaagtggaaggcagaggagctactcttggtaagagcaacattg

SEQ ID NO: 65277 - DNA, 507 bp, Homo sapiens
tcaaattggagagaataactgtcaaatgcagagaatagtggcttgtctgagcaataacccatgagcataaaccaccttgagaaccagtgctgaggtagggaaacgtgaactgtgagaaattactagaggctcagcatggacaggtttgagacataaaaacctccagggggacccaatcactgagtacccccatacgtttgtaagttttatctccaaaagttctaccaggttcacgggccgggcgcgttggctcaagcctgtaatcccagcactttgggaggccaaggcaggtggatcatctgaggtcaggagttcgagatcagcctggccaacatggtgaaaccccatctctactaaaaatacaaaaattagccaggcacgttggcatgcacctgtaataccagctactagggaggctgtgacaggagaatcacttgaacacaggaggcggaggttgcagtgagccgagattgtgccactacactccagcctgggcaacagagcaag

SEQ ID NO: 65278 - DNA, 516 bp, Homo sapiens
gtgaaagtgggcatgagggcagcagaaggagtaaagcatgagggaggaggtctcctctggcacctgagctgaagggccctcagggcagccccaaggccgcagcctcccggttgccctgcagcctggctgctgagtcccagctgcttcagctggctagaggtccttacttagttgtctcaagcacctgaagcctaccttgcccacctgcgagtcactcgccccacaagcagggcacccatctgagtcctgtgcccagggcaaaccccacaactgcctggtagtggagccacgacagggcagtcagtgctcaggaggtgccacacagcccccaagcacagatgcggccacacaaagccgctattatagttaacaggttgagccagattctctgtgtgccacccaccgcactgcacagggcctctaggaccccatccctgcctgggttcctggggcccctcaggccgccacccactcaaccagagggccagatctgaggggcagggctcgctggccgca

SEQ ID NO: 65279 - DNA, 2352 bp, Homo sapiens
  misc_feature (1)..(2): n is a, c, g, or t
  misc_feature (2138)..(2138): n is a, c, g, or t
nngaggtttgggagcctctgcctagatttcagaggatgtatggaaactcctggatgtccaggcagaggtgtgctgcagatgcacagccctcatggagaacctctgatgggggagtggagaagggaaatctgaggttggagcccttacacagagtctgcactggggcatggcctagtggagttgtgaaaaaagggttgccatctttcagatcccagactggtaggtccattgacagcttgcaccacatgcctggaaaagctgctaacactcaatgccagcctgtgaaagcagccaggaagagggctgtaccctgcaaaacaacaggactggagctgccccaggccttgggagcccactcttgcatcagtgtactaggatgtgagatatggagtcgaaggagatcattttggaactttaaggtttaataattgccctattggatttcaaacttgcatggggcctgtagccccatttttggacaatttctcccatttgtgatgggtttatttacccaattcctctacccccgttgtatctaggcagtaattaacttggttttgattttacaggctcataggcagaagggacttgccctgtctcagatgaggcttggaacttggagttttgagttagtgttggaatgagttaagaatttgggggaccgttggaaaggcatgattgtgttttaaaaagtgagtacatgagatatgggaggggtcagggacagaacgatatggtttgactgtgttaccacccaaatctcatctggaattttagttcccataatccgcacctgtcatgggagggacctagtgggaggtaattaaatcatgggtgcagttacccccatgctgctgttctcatgataatgagtgagtcctcacaagatctggtggttttataagggacttttcccctctttgctgccgtgtgaagaaggatgtgtttacttccttttccaccatgattgtaaatttcctgaggcctcccaagccatgcagaactgtgagtcaattaaacttctttcttttataaattacccaggatcaggcacttctttatagcaacgtgaaaatggactactatataaaccctaccattaaaactcttcccttggagagtcactgttcacctcagcctattcatgacactgataatgtttgcaataaaaatctgtttaactttttttgacatgtgtcctccaaacatcttgaccttggaactccttaccttccacagatagctccctaagtatatgtacatacataaacacacatacatgtagcacccattaaccagaattctgggcaaataattctcacttgcattttcctaaagctggtttttcttgattacttgagaagcatatattatagtagctagagctcatggcctagcagagtgaccttcagcaagttttaaaatagtgactatcttaaaaagttgttgcaaaagttcaatataacaaaagagctagaaacaacatcagtttccttgtaagcaggtaatgaaaattaattattgttaattcgtatgtagactatatttttggaagtcctaaattattcttgttagtcacattgtttatttttttcctacatagtcaattttaaatatttctctttttaaagcttctgccaaaatgatgtttcttatcagtgttaagtctaggatttattttttgtcagcaaggtaaccaatgcagtgaccttctgcaaaccagccatagatacatcttgctctgactccagctgagctaagctgggcctagagcagtaggacccagctcctgcagtggcacctaagttcctctttactaaacttgcatgcttttgggaaaataaaggaggggatatctaaagctctggacaaccttgagaagctcaatttttgctgccctgaagaaagtgtaaggatagatatttaatggagctgctgctgctgggtctgttgctcttgtaagtccttcctctggggaagtgaagggtacaacaatatcggatgtcagattttaaaggaagggaatatcttcatctctcctgaaccactaattgagattatccattgcttgctgccaaaagaaagacataaatagaaacaaaactgaaagtagacaataaagcaaacaaaaatctgcnaacaatgaaactaaatcaaatcttcccagtgtaaactctgggcttaacatgcctcctgttgtgttttgatatttttggtgtcataaaaaagtaaacaggatattttatttccagggccttataaagccagatggtaggggccttatctattctttggataattctggtatcctccattggcttaagccagatttagactcacctcatactaggt

SEQ ID NO: 65280 - DNA, 285 bp, Homo sapiens
tttttccactccaaacttcagcactgttacatggctttgacccacaaaacactgattgctttggaggggtcatctgatcttatgagtcaataacattcttccttggatttttgaactttggtccaaaaagaataatagatgcatcttttttccagatgatagtcataagatataaaatgttggcactttcagttgtcatgttttctactatgtgcaggaagccaattgttggtaagagaggagtatttagtagaagaaggtaagtcaatccctgataaattataa

SEQ ID NO: 65281 - DNA, 4804 bp, Homo sapiens
  misc_feature (641)..(641): n is a, c, g, or t
  misc_feature (655)..(655): n is a, c, g, or t
  misc_feature (1549)..(1549): n is a, c, g, or t
gtggagtgcccctgaaaggtcatactcctccattttgtcttttaatgttgatgccccgggagttacttcttcctggtatcttccttcaattaacactttaacgtgacagctgtggaccatcaggagattgtcgctccctggcagtgacagccaaattatcatttttagagaggcaacgcgataactgtcaaatcatcctccaataatcaccttagggtcctggtgggttggggagagagccctctcctcccctactcatggcctgtctaactctctgcaacaagttgctttattgcaatatttgttttattgtgttggtctggaactgaacctgcagtatctttgagggttgcctgcattaaagaatttctatgataaaggaaatcaaacttaaaaagttacgtgaatggtttaagaaagcaaacttcagaagagcccatgacctttaatagaaatatctatgttcgtttatttaaaaactattcatagttgcttaaggtgatatctcttgatgtgatagctctatttttcttataatatggcagttgaatcccaaagaaaaaacagtttcacaggacaatacctcaagtaagatctcttattttctcctgtgacgctctctaatgtcccattgaccaaanccagtcatatgaanaggctcactgtgaaagtgtgacaggactgccccaagcatgaaatctgggagacatggatcatggtgagcatcaaaataacatcaatatgaaaatatttctacaattttggtgggaaagtgtaagaaaaagatatttattatttattcgtggatgaacattcaagagtagtaagaaacaaagtgcttccttccattataacgcaaaataagcatttaataagtacatttaaaatgttactaatatggagtaaagattatgctagagccgtatgtctaaaaataatatttttaaaatgtgtaagtgtagtttttaaacatatgaggtttcttctcagcaagcagactaagtagctttattgagaatcttactgggaaaacaagagaaaaatatcaaaaatgtacaattaaacattttgaaaaaaatgttcttaatggaattgattaaatactgatatagttagaaatatttaaataccaaaactaagtgaaaataaaaattctatatctggctttttcgttaagaatatttgcaaatagggtaaatttgagtttcaattaccttgaccttgaggcacacaggggcagttggtaaaagcccgtgtcagccaatttgaggcaaactacaaaggtagaagccaaaatttcttccccttgagttattaaatccaaactcaaaaaatcacatacacacacacacacacacacacacacacatacacacacacaaatgcaacaaaacctctggactgtgagaaatgtatttctgctcattaaaaattagtctcaggttttctgttatagcagcattttggtaataactaataataaaacaatacactcttgagaattcatagctatgtgatataagtattatttataagaactagtttacanctaagatgtaattcactgtgaaatcagaaaaaagtattaatgcctaattattgggagttatgactgcatattgtaacaattttgaactgcttgagttcagtaaaagaagtcttcatggaagtaaagtaactaacatcaaattagagaaaataattcagaagcaaaacaataacaagtaacagtgaaccttcagtacacttctctgcattaaaaattatttgtatattttaaagacataatttagaacttcctgacactgctgtaaaacatagtctactgatcagaaatataagttttccacacataatgcttatcttacttgaagaaaaatgtttcaagcaaagatgtcttttataacaaaagacagccacctaagaaaaagtagaacacttctgtggtttgaatatgatcttcaaaaagcatgtgctggagacttaattcctaatacagcagtgttgggaggtagatcctaatgaagggtgattagactgtgagggcagagtgaatgaatcaatgtcattattgcaggggtaggttagttataagacgggaagttctgcaatctctctctctctctctgtctcctcttcccctctctttccctctctttgccctttcatgatctgatacctccaatgtgttatgaggcagcaataaattattcaccagatgccagcccctcaattctggaattcccagtctccaggactgtgagaaatggatttctgctcattataaattgctcagtctcaggttttctgttatagcagcataaaatggactaaaacagacactatcttgatttatagctctttgcaattatgtttaattattttggaaattttgttgcattcactggtttaccctagtgtattagtccattctcacaatgctatgaaacattgaactgcctgtgactccgtaatttataaagaaaagaggttaaattgaatcacagttctgtagggctggggaggcctcaggaaacttacaatcatggcagaaggggaagcaaacatgttatttttcacatggcagcaggaaggagaaatgccaaacaaagagggaaaagtcccttataaaaccatcagatctcctgagaactcactcactatcataataacagcagcatgggagtaactgccccagtgattcaattatcttccactgagtccctcccaggacacgtgggaattacgggaacctcagttcaagatgagatttcagttaggacacagtgaaaccataccattctgcccctggcccctcctaaatctcatgtcctcacatttcaaaacacaatcatgccttcccaagagtctcccaaagtcttaattcatttcagcattaactaaaaagttcatagtccaaagtccattctgagacaaggcaagtcccttctgccaatgagcctgtaaaattgaaagcaagttaattatttcctagatacaatagggatacaggcattgggtaaatacagccatttcaaatgggagtgattggtcaaaacaaaggggctacaagccccatgcaaatctgacatccagcaggcattcaaatcttaaagctccaaaatgacctcctttgactctatgtctcatatcctgctcacattgatgcaagaggtgggctcccatggccttggacagctccacctctgtggctttgcagggtacaacccccttcctggccgctttcacagactggcattgagtgtgtgctgattttccgggtgtacagtgcaagccatcggtggatctcccatgctggggtctgaaggatggtgaccctcttatcacagctccgctaggcagtgccccagtgaggagtctgtgtggggactctgaccctacattttccttctgcactgccctagcagagattctgtttctgtttatcctactctgtgtgggccaggcccagggctccctgctctatgcagcttagagatattgtgccctgcatcccagctgcttcagctccagccatggctaaaaggggccaatgtacagctcaggccgttgcttcaaaggatgcaagcctcaagccttggtggcttacatgtggggttagacctgtgggtgcacagaagacaagaattgaggtttgggaacctccacctagatttcagaggatctatggaaattcctggatatcaagccagaaattagctgcaggggcagaaacctcatgaagaatataaggttatttttatttatctttttatgtgatccatattttttctctctctctctctctgtctgtactttcctccttcattctctcaaattgcaggttattctttttctctccagtgtgctaaactttctttacttcctgccctagaaaaagtctatattcttgcccaggtttagggcctcagtggaccctgaattaggaaatgttctttagtcctgacctattttcatgatctcattaagggttttctacactgttttctttttggaaacaatgtataggtttatgcgtaatctgttcataggaatggtgcattaaggaggggcctcactgacagtctcttcagtatttcattttgggctggtcagtttctctgggaactattcccgaaaggtctttgtttgatagtagaggacagggtgaaaataaagatgggcattggctttcagtttgcatgcataatgaagatttctgcttttggcctgttacctctgcctacaaaagtgtctgaattcccctcattaataagtcctattctttatcatctccagagaacaaattggcattcttctctctgtttgagggactgttagacatgtggctgaatgcagtggaggaagaaactcaggatgctgctcattcttgaataggttttaagtgactatcctaattttgtgacccctgggttatcactactttcagaggtatcagacgcttttaattcatgaatcttgacaataatgcaagtttgttgaacaatttttgctgaagcaccccccaaaaccaaaaacaaatatttaactacatggatattgggagtaccaacaaactcatataatgtagaagaccatagaataatttgtacaaattgaaagatgatacgggaacttgacaatgacattgcctttaatgttaaacatgatgcagaattcaaaaaagattatggaaaggttgtattaatttcagcagagatggaaggatttggacatattgtttggtactgtcatatgagatacaaaatcagaagagggaaaataataaagaccaatgaaattt

SEQ ID NO: 65282 - DNA, 367 bp, Homo sapiens
tttttttaatgagcagtttaatggaaaataattgctccaggtacaggtcttctaggcacattttgtctctgcagctattgttttaattagtgggcctgcttgttcgctgtccctttgttgtggcccgctctggggcaggggtgcccggggagggttcctcttgtggaacgcaggcgttaatgagccatttcagtaataagagtcctgccttgagccagaagtcagagcacccaagacaccccaagcagcagaaatgctcatgaatttctgaaactgcctttctaatttgcatttaaacataacttccaaagaacaatttcacctgtgattttctgaggtcgacaggtaagggactttagatgttgaa

SEQ ID NO: 65283 - DNA, 1704 bp, Homo sapiens
cgcctctactcccagaaggccgcggggggtggaccgcctaagagggcgtgcgctcccgacatgccccgcggcgcgccattaaccgccagatttgaatcgcgggacccgttggcagaggtggcggcggcggcatgggtgccccgacgttgccccctgcctggcagccctttctcaaggaccaccgcatctctacattcaagaactggcccttcttggagggctgcgcctgcaccccggagcggatggccgaggctggcttcatccactgccccactgagaacgagccagacttggcccagtgtttcttctgcttcaaggagctggaaggctgggagccagatgacgaccccatagaggaacataaaaagcattcgtccggttgcgctttcctttctgtcaagaagcagtttgaagaattaacccttggtgaatttttgaaactggacagagaaagagccaagaacaaaattgcaaaggaaaccaacaataagaagaaagaatttgaggaaactgcgaagaaagtgcgccgtgccatcgagcagctggctgccatggattgaggcctctggccggagctgcctggtcccagagtggctgcaccacttccagggtttattccctggtgccaccagccttcctgtgggccccttagcaatgtcttaggaaaggagatcaacattttcaaattagatgtttcaactgtgctcttgttttgtcttgaaagtggcaccagaggtgcttctgcctgtgcagcgggtgctgctggtaacagtggctgcttctctctctctctctcttttttgggggctcatttttgctgttttgattcccgggcttaccaggtgagaagtgagggaggaagaaggcagtgtcccttttgctagagctgacagctttgttcgcgtgggcagagccttccacagtgaatgtgtctggacctcatgttgttgaggctgtcacagtcctgagtgtggacttggcaggtgcctgttgaatctgagctgcaggttccttatctgtcacacctgtgcctcctcagaggacagtttttttgttgtgtgttttttgttttttttttttggtagatgcatgacttgtgtgtgatgagagaatggagacagagtccctggctcctctactgtttaacaacatggctttcttattttgtttgaattgttaattcacagaatagcacaaactacaattaaaactaagcacaaagccattctaagtcattggggaaacggggtgaacttcaggtggatgaggagacagaatagagtgataggaagcgtctggcagatactccttttgccactgctgtgtgattagacaggcccagtgagccgcggggcacatgctggccgctcctccctcagaaaaaggcagtggcctaaatcctttttaaatgacttggctcgatgctgtgggggactggctgggctgctgcaggccgtgtgtctgtcagcccaaccttcacatctgtcacgttctccacacgggggagagacgcagtccgcccaggtccccgctttctttggaggcagcagctcccgcagggctgaagtctggcgtaagatgatggatttgattcgccctcctccctgtcatagagctgcagggtggattgttacagcttcgctggaaacctctggaggtcatctcggctgttcctgagaaataaaaagcctgtcatttcaaaca

SEQ ID NO: 65284 - DNA, 545 bp, Homo sapiens
cgcctctactcccagaaggccgcggggggtggaccgcctaagagggcgtgcgctcccgacatgccccgcggcgcgccattaaccgccagatttgaatcgcgggacccgttggcagaggtggcggcggcggcatgggtgccccgacgttgccccctgcctggcagccctttctcaaggaccaccgcatctctacattcaagaactggcccttcttggagggctgcgcctgcaccccggagcggatggccgaggctggcttcatccactgccccactgagaacgagccagacttggcccagtgtttcttctgcttcaaggagctggaaggctgggagccagatgacgaccccatgtaagtcttctctggccagcctcgatgggctttgttttgaactgagttgtcaaaagatttgagttgcaaagacacttagtatgggagggttgctttccaccctcattgcttcttaaacagctgttgtgaacggatacctctctatatgctggtgccttggtgatgcttacaacctaattaaatctcatttgac

SEQ ID NO: 65285 - DNA, 530 bp, Homo sapiens
  misc_feature (447)..(447): n is a, c, g, or t
gagagaaggtgctaagaggtgccatatgggaatgtggcttgggcaaagcactgatgccatcaacttcagacttgacgtcttactcctgaggcagagcagggtgtgcctgtggagggcgtggggaggtggcccgtggggagtggactgccgctttaatcccttcagctgcctttccgctgttgttttgatttttctagagaggaacataaaaagcattcgtccggttgcgctttcctttctgtcaagaagcagtttgaagaattaacccttggtgaatttttgaaactggacagagaaagagccaagaacaaaattgtatgtattgggaataagaactgctcaaaccctgttcaatgtctttagcactaaactacctagtccctcaaagggactctgtgttttcctcaggaagcattttttttttttttctgagatagagtttcactncttcttgcagtgagccgagatcgcgccactgcactccagcctgggcgacagagcgagactccgtctcaaaaaaaaaaaaaaaa

SEQ ID NO: 65286 - DNA, 2639 bp, Homo sapiens
cgcctctactcccagaaggccgcggggggtggaccgcctaagagggcgtgcgctcccgacatgccccgcggcgcgccattaaccgccagatttgaatcgcgggacccgttggcagaggtggcggcggcggcatgggtgccccgacgttgccccctgcctggcagccctttctcaaggaccaccgcatctctacattcaagaactggcccttcttggagggctgcgcctgcaccccggagcggatggccgaggctggcttcatccactgccccactgagaacgagccagacttggcccagtgtttcttctgcttcaaggagctggaaggctgggagccagatgacgaccccatagaggaacataaaaagcattcgtccggttgcgctttcctttctgtcaagaagcagtttgaagaattaacccttggtgaatttttgaaactggacagagaaagagccaagaacaaaattgcaaaggaaaccaacaataagaagaaagaatttgaggaaactgcgaagaaagtgcgccgtgccatcgagcagctggctgccatggattgaggcctctggccggagctgcctggtcccagagtggctgcaccacttccagggtttattccctggtgccaccagccttcctgtgggccccttagcaatgtcttaggaaaggagatcaacattttcaaattagatgtttcaactgtgctcttgttttgtcttgaaagtggcaccagaggtgcttctgcctgtgcagcgggtgctgctggtaacagtggctgcttctctctctctctctcttttttgggggctcatttttgctgttttgattcccgggcttaccaggtgagaagtgagggaggaagaaggcagtgtcccttttgctagagctgacagctttgttcgcgtgggcagagccttccacagtgaatgtgtctggacctcatgttgttgaggctgtcacagtcctgagtgtggacttggcaggtgcctgttgaatctgagctgcaggttccttatctgtcacacctgtgcctcctcagaggacagtttttttgttgtgtgttttttgttttttttttttggtagatgcatgacttgtgtgtgatgagagaatggagacagagtccctggctcctctactgtttaacaacatggctttcttattttgtttgaattgttaattcacagaatagcacaaactacaattaaaactaagcacaaagccattctaagtcattggggaaacggggtgaacttcaggtggatgaggagacagaatagagtgataggaagcgtctggcagatactccttttgccactgctgtgtgattagacaggcccagtgagccgcggggcacatgctggccgctcctccctcagaaaaaggcagtggcctaaatcctttttaaatgacttggctcgatgctgtgggggactggctgggctgctgcaggccgtgtgtctgtcagcccaaccttcacatctgtcacgttctccacacgggggagagacgcagtccgcccaggtccccgctttctttggaggcagcagctcccgcagggctgaagtctggcgtaagatgatggatttgattcgccctcctccctgtcatagagctgcagggtggattgttacagcttcgctggaaacctctggaggtcatctcggctgttcctgagaaataaaaagcctgtcatttcaaacactgctgtggaccctactgggtttttaaaatattgtcagtttttcatcgtcgtccctagcctgccaacagccatctgcccagacagccgcagtgaggatgagcgtcctggcagagacgcagttgtctctgggcgcttgccagagccacgaaccccagacctgtttgtatcatccgggctccttccgggcagaaacaactgaaaatgcacttcagacccacttatttctgccacatctgagtcggcctgagatagacttttccctctaaactgggagaatatcacagtggtttttgttagcagaaaatgcactccagcctctgtactcatctaagctgcttatttttgatatttgtgtcagtctgtaaatggatacttcactttaataactgttgcttagtaattggctttgtagagaagctggaaaaaaatggttttgtcttcaactcctttgcatgccaggcggtgatgtggatctcggcttctgtgagcctgtgctgtgggcagggctgagctggagccgcccctctcagcccgcctgccacggcctttccttaaaggccatccttaaaaccagaccctcatggctgccagcacctgaaagcttcctcgacatctgttaataaagccgtaggcccttgtctaagcgcaaccgcctagactttctttcagatacatgtccacatgtccatttttcaggttctctaagttggagtggagtctgggaagggttgtgaatgaggcttctgggctatgggtgaggttccaatggcaggttagagcccctcgggccaactgccatcctggaaagtagagacagcagtgcccgctgcccagaagagaccagcaagccaaactggagcccccattgcaggctgtcgccatgtggaaagagtaactcacaattgccaataaagtctcatgtggttttatctac

SEQ ID NO: 65287 - DNA, 1733 bp, Homo sapiens
cgcctctactcccagaaggccgcggggggtggaccgcctaagagggcgtgcgctcccgacatgccccgcggcgcgccattaaccgccagatttgaatcgcgggacccgttggcagaggtggcggcggcggcatgggtgccccgacgttgccccctgcctggcagccctttctcaaggaccaccgcatctctacattcaagaactggcccttcttggagggctgcgcctgcaccccggagcggatggccgaggctggcttcatccactgccccactgagaacgagccagacttggcccagtgtttcttctgcttcaaggagctggaaggctgggagccagatgacgaccccatagaggaacataaaaagcattcgtccggttgcgctttcctttctgtcaagaagcagtttgaagaattaacccttggtgaatttttgaaactggacagagaaagagccaagaacaaaattgcaaaggaaaccaacaataagaagaaagaatttgaggaaactgcgaagaaagtgcgccgtgccatcgagcagctggctgccatggattgaggcctctggccggagctgcctggtcccagagtggctgcaccacttccagggtttattccctggtgccaccagccttcctgtgggccccttagcaatgtcttaggaaaggagatcaacattttcaaattagatgtttcaactgtgctcttgttttgtcttgaaagtggcaccagaggtgcttctgcctgtgcagcgggtgctgctggtaacagtggctgcttctctctctctctctcttttttgggggctcatttttgctgttttgattcccgggcttaccaggtgagaagtgagggaggaagaaggcagtgtcccttttgctagagctgacagctttgttcgcgtgggcagagccttccacagtgaatgtgtctggacctcatgttgttgaggctgtcacagtcctgagtgtggacttggcaggtgcctgttgaatctgagctgcaggttccttatctgtcacacctgtgcctcctcagaggacagtttttttgttgtgtgttttttgttttttttttttggtagatgcatgacttgtgtgtgatgagagaatggagacagagtccctggctcctctactgtttaacaacatggctttcttattttgtttgaattgttaattcacagaatagcacaaactacaattaaaactaagcacaaagccattctaagtcattggggaaacggggtgaacttcaggtggatgaggagacagaatagagtgataggaagcgtctggcagatactccttttgccactgctgtgtgattagacaggcccagtgagccgcggggcacatgctggccgctcctccctcagaaaaaggcagtggcctaaatcctttttaaatgacttggctcgatgctgtgggggactggctgggctgctgcaggccgtgtgtctgtcagcccaaccttcacatctgtcacgttctccacacgggggagagacgcagtccgcccaggtccccgctttctttggaggcagcagctcccgcagggctgaagtctggcgtaagatgatggatttgattcgccctcctccctgtcatagagctgcagggtggattgttacagcttcgctggaaacctctggaggtcatctcggctgttcctgagaaataaaaagcctgtcatttcaaacaaaacacaaacaaaaaagacaaaacaacaa

SEQ ID NO: 65288 - DNA, 1163 bp, Homo sapiens
cgcctctactcccagaaggccgcggggggtggaccgcctaagagggcgtgcgctcccgacatgccccgcggcgcgccattaaccgccagatttgaatcgcgggacccgttggcagaggtggcggcggcggcatgggtgccccgacgttgccccctgcctggcagccctttctcaaggaccaccgcatctctacattcaagaactggcccttcttggagggctgcgcctgcaccccggagcggatggccgaggctggcttcatccactgccccactgagaacgagccagacttggcccagtgtttcttctgcttcaaggagctggaaggctgggagccagatgacgaccccatagaggaacataaaaagcattcgtccggttgcgctttcctttctgtcaagaagcagtttgaagaattaacccttggtgaatttttgaaactggacagagaaagagccaagaacaaaattgcaaaggaaaccaacaataagaagaaagaatttgaggaaactgcgaagaaagtgcgccgtgccatcgagcagctggctgccatggattgaggcctctggccggagctgcctggtcccagagtggctgcaccacttccagggtttattccctggtgccaccagccttcctgtgggccccttagcaatgtcttaggaaaggagatcaacattttcaaattagatgtttcaactgtgctcttgttttgtcttgaaagtggcaccagaggtgcttctgcctgtgcagcgggtgctgctggtaacagtggctgcttctctctctctctctcttttttgggggctcatttttgctgttttgattcccgggcttaccaggtgagaagtgagggaggaagaaggcagtgtcccttttgctagagctgacagctttgttcgcgtgggcagagccttccacagtgaatgtgtctggacctcatgttgttgaggctgtcacagtcctgagtgtggacttggcaggtgcctgttgaatctgagctgcaggttccttatctgtcacacctgtgcctcctcagaggacagtttttttgttgtgtgttttttgttttttttttttggtagatgcatgacttgtgtgtgatgagagaatggagactctgtctccattctctcatcacacacaagtcatgcatctaccaa

SEQ ID NO: 65289 - DNA, 1773 bp, Homo sapiens
cgcctctactcccagaaggccgcggggggtggaccgcctaagagggcgtgcgctcccgacatgccccgcggcgcgccattaaccgccagatttgaatcgcgggacccgttggcagaggtggcggcggcggcatgggtgccccgacgttgccccctgcctggcagccctttctcaaggaccaccgcatctctacattcaagaactggcccttcttggagggctgcgcctgcaccccggagcggatggccgaggctggcttcatccactgccccactgagaacgagccagacttggcccagtgtttcttctgcttcaaggagctggaaggctgggagccagatgacgaccccattgggccgggcacggtggcttacgcctgtaataccagcactttgggaggccgaggcgggcggatcacgagagaggaacataaaaagcattcgtccggttgcgctttcctttctgtcaagaagcagtttgaagaattaacccttggtgaatttttgaaactggacagagaaagagccaagaacaaaattgcaaaggaaaccaacaataagaagaaagaatttgaggaaactgcgaagaaagtgcgccgtgccatcgagcagctggctgccatggattgaggcctctggccggagctgcctggtcccagagtggctgcaccacttccagggtttattccctggtgccaccagccttcctgtgggccccttagcaatgtcttaggaaaggagatcaacattttcaaattagatgtttcaactgtgctcttgttttgtcttgaaagtggcaccagaggtgcttctgcctgtgcagcgggtgctgctggtaacagtggctgcttctctctctctctctcttttttgggggctcatttttgctgttttgattcccgggcttaccaggtgagaagtgagggaggaagaaggcagtgtcccttttgctagagctgacagctttgttcgcgtgggcagagccttccacagtgaatgtgtctggacctcatgttgttgaggctgtcacagtcctgagtgtggacttggcaggtgcctgttgaatctgagctgcaggttccttatctgtcacacctgtgcctcctcagaggacagtttttttgttgtgtgttttttgttttttttttttggtagatgcatgacttgtgtgtgatgagagaatggagacagagtccctggctcctctactgtttaacaacatggctttcttattttgtttgaattgttaattcacagaatagcacaaactacaattaaaactaagcacaaagccattctaagtcattggggaaacggggtgaacttcaggtggatgaggagacagaatagagtgataggaagcgtctggcagatactccttttgccactgctgtgtgattagacaggcccagtgagccgcggggcacatgctggccgctcctccctcagaaaaaggcagtggcctaaatcctttttaaatgacttggctcgatgctgtgggggactggctgggctgctgcaggccgtgtgtctgtcagcccaaccttcacatctgtcacgttctccacacgggggagagacgcagtccgcccaggtccccgctttctttggaggcagcagctcccgcagggctgaagtctggcgtaagatgatggatttgattcgccctcctccctgtcatagagctgcagggtggattgttacagcttcgctggaaacctctggaggtcatctcggctgttcctgagaaataaaaagcctgtcatttcaaaca

SEQ ID NO: 65290 - DNA, 1246 bp, Homo sapiens
  misc_feature (32)..(32): n is a, c, g, or t
aacttaggctaggtacgaggcctgggtggtgnaaagaaagaatttgaggaaactgcgaagaaagtgcgccgtgccatcgagcagctggctgccatggattgaggcctctggccggagctgcctggtcccagagtggctgcaccacttccagggtttattccctggtgccaccagccttcctgtgggccccttagcaatgtcttaggaaaggagatcaacattttcaaattagatgtttcaactgtgctcttgttttgtcttgaaagtggcaccagaggtgcttctgcctgtgcagcgggtgctgctggtaacagtggctgcttctctctctctctctcttttttgggggctcatttttgctgttttgattcccgggcttaccaggtgagaagtgagggaggaagaaggcagtgtcccttttgctagagctgacagctttgttcgcgtgggcagagccttccacagtgaatgtgtctggacctcatgttgttgaggctgtcacagtcctgagtgtggacttggcaggtgcctgttgaatctgagctgcaggttccttatctgtcacacctgtgcctcctcagaggacagtttttttgttgtgtgttttttgttttttttttttggtagatgcatgacttgtgtgtgatgagagaatggagacagagtccctggctcctctactgtttaacaacatggctttcttattttgtttgaattgttaattcacagaatagcacaaactacaattaaaactaagcacaaagccattctaagtcattggggaaacggggtgaacttcaggtggatgaggagacagaatagagtgataggaagcgtctggcagatactccttttgccactgctgtgtgattagacaggcccagtgagccgcggggcacatgctggccgctcctccctcagaaaaaggcagtggcctaaatcctttttaaatgacttggctcgatgctgtgggggactggctgggctgctgcaggccgtgtgtctgtcagcccaaccttcacatctgtcacgttctccacacgggggagagacgcagtccgcccaggtccccgctttctttggaggcagcagctcccgcagggctgaagtctggcgtaagatgatggatttgattcgccctcctccctgtcatagagctgcagggtggattgttacagcttcgctggaaacctctggaggtcatctcggctgttcctgagaaataaaaagcctgtcatttcaaaca

SEQ ID NO: 65291 - DNA, 1209 bp, Homo sapiens
  misc_feature (32)..(32): n is a, c, g, or t
aacttaggctaggtacgaggcctgggtggtgnagtgccatcgagcagctggctgccatggattgaggcctctggccggagctgcctggtcccagagtggctgcaccacttccagggtttattccctggtgccaccagccttcctgtgggccccttagcaatgtcttaggaaaggagatcaacattttcaaattagatgtttcaactgtgctcttgttttgtcttgaaagtggcaccagaggtgcttctgcctgtgcagcgggtgctgctggtaacagtggctgcttctctctctctctctcttttttgggggctcatttttgctgttttgattcccgggcttaccaggtgagaagtgagggaggaagaaggcagtgtcccttttgctagagctgacagctttgttcgcgtgggcagagccttccacagtgaatgtgtctggacctcatgttgttgaggctgtcacagtcctgagtgtggacttggcaggtgcctgttgaatctgagctgcaggttccttatctgtcacacctgtgcctcctcagaggacagtttttttgttgtgtgttttttgttttttttttttggtagatgcatgacttgtgtgtgatgagagaatggagacagagtccctggctcctctactgtttaacaacatggctttcttattttgtttgaattgttaattcacagaatagcacaaactacaattaaaactaagcacaaagccattctaagtcattggggaaacggggtgaacttcaggtggatgaggagacagaatagagtgataggaagcgtctggcagatactccttttgccactgctgtgtgattagacaggcccagtgagccgcggggcacatgctggccgctcctccctcagaaaaaggcagtggcctaaatcctttttaaatgacttggctcgatgctgtgggggactggctgggctgctgcaggccgtgtgtctgtcagcccaaccttcacatctgtcacgttctccacacgggggagagacgcagtccgcccaggtccccgctttctttggaggcagcagctcccgcagggctgaagtctggcgtaagatgatggatttgattcgccctcctccctgtcatagagctgcagggtggattgttacagcttcgctggaaacctctggaggtcatctcggctgttcctgagaaataaaaagcctgtcatttcaaaca

SEQ ID NO: 65292 - DNA, 1045 bp, Homo sapiens
cgcctctactcccagaaggccgcggggggtggaccgcctaagagggcgtgcgctcccgacatgccccgcggcgcgccattaaccgccagatttgaatcgcgggacccgttggcagaggtggcggcggcggcatgggtgccccgacgttgccccctgcctggcagccctttctcaaggaccaccgcatctctacattcaagaactggcccttcttggagggctgcgcctgcaccccggagcggatggccgaggctggcttcatccactgccccactgagaacgagccagacttggcccagtgtttcttctgcttcaaggagctggaaggctgggagccagatgacgaccccatgcaaaggaaaccaacaataagaagaaagaatttgaggaaactgcgaagaaagtgcgccgtgccatcgagcagctggctgccatggattgaggcctctggccggagctgcctggtcccagagtggctgcaccacttccagggtttattccctggtgccaccagccttcctgtgggccccttagcaatgtcttaggaaaggagatcaacattttcaaattagatgtttcaactgtgctcttgttttgtcttgaaagtggcaccagaggtgcttctgcctgtgcagcgggtgctgctggtaacagtggctgcttctctctctctctctcttttttgggggctcatttttgctgttttgattcccgggcttaccaggtgagaagtgagggaggaagaaggcagtgtcccttttgctagagctgacagctttgttcgcgtgggcagagccttccacagtgaatgtgtctggacctcatgttgttgaggctgtcacagtcctgagtgtggacttggcaggtgcctgttgaatctgagctgcaggttccttatctgtcacacctgtgcctcctcagaggacagtttttttgttgtgtgttttttgttttttttttttggtagatgcatgacttgtgtgtgatgagagaatggagactctgtctccattctctcatcacacacaagtcatgcatctaccaa

SEQ ID NO: 65293 - DNA, 1586 bp, Homo sapiens
cgcctctactcccagaaggccgcggggggtggaccgcctaagagggcgtgcgctcccgacatgccccgcggcgcgccattaaccgccagatttgaatcgcgggacccgttggcagaggtggcggcggcggcatgggtgccccgacgttgccccctgcctggcagccctttctcaaggaccaccgcatctctacattcaagaactggcccttcttggagggctgcgcctgcaccccggagcggatggccgaggctggcttcatccactgccccactgagaacgagccagacttggcccagtgtttcttctgcttcaaggagctggaaggctgggagccagatgacgaccccatgcaaaggaaaccaacaataagaagaaagaatttgaggaaactgcgaagaaagtgcgccgtgccatcgagcagctggctgccatggattgaggcctctggccggagctgcctggtcccagagtggctgcaccacttccagggtttattccctggtgccaccagccttcctgtgggccccttagcaatgtcttaggaaaggagatcaacattttcaaattagatgtttcaactgtgctcttgttttgtcttgaaagtggcaccagaggtgcttctgcctgtgcagcgggtgctgctggtaacagtggctgcttctctctctctctctcttttttgggggctcatttttgctgttttgattcccgggcttaccaggtgagaagtgagggaggaagaaggcagtgtcccttttgctagagctgacagctttgttcgcgtgggcagagccttccacagtgaatgtgtctggacctcatgttgttgaggctgtcacagtcctgagtgtggacttggcaggtgcctgttgaatctgagctgcaggttccttatctgtcacacctgtgcctcctcagaggacagtttttttgttgtgtgttttttgttttttttttttggtagatgcatgacttgtgtgtgatgagagaatggagacagagtccctggctcctctactgtttaacaacatggctttcttattttgtttgaattgttaattcacagaatagcacaaactacaattaaaactaagcacaaagccattctaagtcattggggaaacggggtgaacttcaggtggatgaggagacagaatagagtgataggaagcgtctggcagatactccttttgccactgctgtgtgattagacaggcccagtgagccgcggggcacatgctggccgctcctccctcagaaaaaggcagtggcctaaatcctttttaaatgacttggctcgatgctgtgggggactggctgggctgctgcaggccgtgtgtctgtcagcccaaccttcacatctgtcacgttctccacacgggggagagacgcagtccgcccaggtccccgctttctttggaggcagcagctcccgcagggctgaagtctggcgtaagatgatggatttgattcgccctcctccctgtcatagagctgcagggtggattgttacagcttcgctggaaacctctggaggtcatctcggctgttcctgagaaataaaaagcctgtcatttcaaaca

SEQ ID NO: 65294 - DNA, 2353 bp, Homo sapiens
cgcctctactcccagaaggccgcggggggtggaccgcctaagagggcgtgcgctcccgacatgccccgcggcgcgccattaaccgccagatttgaatcgcgggacccgttggcagaggtggcggcggcggcatgggtgccccgacgttgccccctgcctggcagccctttctcaaggaccaccgcatctctacattcaagaactggcccttcttggagggctgcgcctgcaccccggagcggatggccgaggctggcttcatccactgccccactgagaacgagccagacttggcccagtgtttcttctgcttcaaggagctggaaggctgggagccagatgacgaccccatagaggaacataaaaagcattcgtccggttgcgctttcctttctgtcaagaagcagtttgaagaattaacccttggtgaatttttgaaactggacagagaaagagccaagaacaaaattgcaaaggaaaccaacaataagaagaaagaatttgaggaaactgcgaagaaagtgcgccgtgccatcgagcagctggctgccatggattgaggcctctggccggagctgcctggtcccagagtggctgcaccacttccagggtttattccctggtgccaccagccttcctgtgggccccttagcaatgtcttaggaaaggagatcaacattttcaaattagatgtttcaactgtgctcttgttttgtcttgaaagtggcaccagaggtgcttctgcctgtgcagcgggtgctgctggtaacagtggctgcttctctctctctctctcttttttgggggctcatttttgctgttttgattcccgggcttaccaggtgagaagtgagggaggaagaaggcagtgtcccttttgctagagctgacagctttgttcgcgtgggcagagccttccacagtgaatgtgtctggacctcatgttgttgaggctgtcacagtcctgagtgtggacttggcaggtgcctgttgaatctgagctgcaggttccttatctgtcacacctgtgcctcctcagaggacagtttttttgttgtgtgttttttgttttttttttttggtagatgcatgacttgtgtgtgatgagagaatggagacagagtccctggctcctctactgtttaacaacatggctttcttattttgtttgaattgttaattcacagaatagcacaaactacaattaaaactaagcacaaagccattctaagtcattggggaaacggggtgaacttcaggtggatgaggagacagaatagagtgataggaagcgtctggcagatactccttttgccactgctgtgtgattagacaggcccagtgagccgcggggcacatgctggccgctcctccctcagaaaaaggcagtggcctaaatcctttttaaatgacttggctcgatgctgtgggggactggctgggctgctgcaggccgtgtgtctgtcagcccaaccttcacatctgtcacgttctccacacgggggagagacgcagtccgcccaggtccccgctttctttggaggcagcagctcccgcagggctgaagtctggcgtaagatgatggatttgattcgccctcctccctgtcatagagctgcagggtggattgttacagcttcgctggaaacctctggaggtcatctcggctgttcctgagaaataaaaagcctgtcatttcaaacactgctgtggaccctactgggtttttaaaatattgtcagtttttcatcgtcgtccctagcctgccaacagccatctgcccagacagccgcagtgaggatgagcgtcctggcagagacgcagttgtctctgggcgcttgccagagccacgaaccccagacctgtttgtatcatccgggctccttccgggcagaaacaactgaaaatgcacttcagacccacttatttctgccacatctgagtcggcctgagatagacttttccctctaaactgggagaatatcacagtggtttttgttagcagaaaatgcactccagcctctgtactcatctaagctgcttatttttgatatttgtgtcagtctgtaaatggatacttcactttaataactgttgcttagtaattggctttgtagagaagctggaaaaaaatggttttgtcttcaactcctttgcatgccaggcggtgatgtggatctcggcttctgtgagcctgtgctgtgggcagggctgagctggagccgcccctctcagcccgcctgccacggcctttccttaaaggccatccttaaaaccagaccctcatggctgccagcacctgaaagcttcctcgacatctgttaataaagccgtaggcccttgtctaagcgca

SEQ ID NO: 65295 - DNA, 1219 bp, Homo sapiens
cgcctctactcccagaaggccgcggggggtggaccgcctaagagggcgtgcgctcccgacatgccccgcggcgcgccattaaccgccagatttgaatcgcgggacccgttggcagaggtggcggcggcggcatgggtgccccgacgttgccccctgcctggcagccctttctcaaggaccaccgcatctctacattcaagaactggcccttcttggagggctgcgcctgcaccccggagcggatggccgaggctggcttcatccactgccccactgagaacgagccagacttggcccagtgtttcttctgcttcaaggagctggaaggctgggagccagatgacgaccccatagaggaacataaaaagcattcgtccggttgcgctttcctttctgtcaagaagcagtttgaagaattaacccttggtgaatttttgaaactggacagagaaagagccaagaacaaaattgcaaaggaaaccaacaataagaagaaagaatttgaggaaactgcgaagaaagtgcgccgtgccatcgagcagctggctgccatggattgaggcctctggccggagctgcctggtcccagagtggctgcaccacttccagggtttattccctggtgccaccagccttcctgtgggccccttagcaatgtcttaggaaaggagatcaacattttcaaattagatgtttcaactgtgctcttgttttgtcttgaaagtggcaccagaggtgcttctgcctgtgcagcgggtgctgctggtaacagtggctgcttctctctctctctctcttttttgggggctcatttttgctgttttgattcccgggcttaccaggtgagaagtgagggaggaagaaggcagtgtcccttttgctagagctgacagctttgttcgcgtgggcagagccttccacagtgaatgtgtctggacctcatgttgttgaggctgtcacagtcctgagtgtggacttggcaggtgcctgttgaatctgagctgcaggttccttatctgtcacacctgtgcctcctcagaggacagtttttttgttgtgtgttttttgttttttttttttggtagatgcatgacttgtgtgtgatgagagaatggagacagagtccctggctcctctactgtttaacaacatggctttcttattttgtttgaattgttaattcacagaatagcacaaactacaattaaaactaagcaca

SEQ ID NO: 65296 - DNA, 1905 bp, Homo sapiens
cgcctctactcccagaaggccgcggggggtggaccgcctaagagggcgtgcgctcccgacatgccccgcggcgcgccattaaccgccagatttgaatcgcgggacccgttggcagaggtggcggcggcggcatgggtgccccgacgttgccccctgcctggcagccctttctcaaggaccaccgcatctctacattcaagaactggcccttcttggagggctgcgcctgcaccccggagcggatggccgaggctggcttcatccactgccccactgagaacgagccagacttggcccagtgtttcttctgcttcaaggagctggaaggctgggagccagatgacgaccccatagaggaacataaaaagcattcgtccggttgcgctttcctttctgtcaagaagcagtttgaagaattaacccttggtgaatttttgaaactggacagagaaagagccaagaacaaaattgcaaaggaaaccaacaataagaagaaagaatttgaggaaactgcgaagaaagtgcgccgtgccatcgagcagctggctgccatggattgaggcctctggccggagctgcctggtcccagagtggctgcaccacttccagggtttattccctggtgccaccagccttcctgtgggccccttagcaatgtcttaggaaaggagatcaacattttcaaattagatgtttcaactgtgctcttgttttgtcttgaaagtggcaccagaggtgcttctgcctgtgcagcgggtgctgctggtaacagtggctgcttctctctctctctctcttttttgggggctcatttttgctgttttgattcccgggcttaccaggtgagaagtgagggaggaagaaggcagtgtcccttttgctagagctgacagctttgttcgcgtgggcagagccttccacagtgaatgtgtctggacctcatgttgttgaggctgtcacagtcctgagtgtggacttggcaggtgctggctgggctgctgcaggccgtgtgtctgtcagcccaaccttcacatctgtcacgttctccacacgggggagagacgcagtccgcccaggtccccgctttctttggaggcagcagctcccgcagggctgaagtctggcgtaagatgatggatttgattcgccctcctccctgtcatagagctgcagggtggattgttacagcttcgctggaaacctctggaggtcatctcggctgttcctgagaaataaaaagcctgtcatttcaaacactgctgtggaccctactgggtttttaaaatattgtcagtttttcatcgtcgtccctagcctgccaacagccatctgcccagacagccgcagtgaggatgagcgtcctggcagagacgcagttgtctctgggcgcttgccagagccacgaaccccagacctgtttgtatcatccgggctccttccgggcagaaacaactgaaaatgcacttcagacccacttatttctgccacatctgagtcggcctgagatagacttttccctctaaactgggagaatatcacagtggtttttgttagcagaaaatgcactccagcctctgtactcatctaagctgcttatttttgatatttgtgtcagtctgtaaatggatacttcactttaataactgttgcttagtaattggctttgtagagaagctggaaaaaaatggttttgtcttcaactcctttgcatgccaggcggtgatgtggatctcggcttctgtgagcctgtgctgtgggcagggctgagctggagccgcccctctcagcccgcctgccacggcctttccttaaaggccatccttaaaaccagaccctcatggctgccagcacctgaaagcttcctcgacatctgttaataaagccgtaggcccttgtctaagcgca

SEQ ID NO: 65297 - DNA, 1678 bp, Homo sapiens
cgcctctactcccagaaggccgcggggggtggaccgcctaagagggcgtgcgctcccgacatgccccgcggcgcgccattaaccgccagatttgaatcgcgggacccgttggcagaggtggcggcggcggcatgggtgccccgacgttgccccctgcctggcagccctttctcaaggaccaccgcatctctacattcaagaactggcccttcttggagggctgcgcctgcaccccggagcggatggccgaggctggcttcatccactgccccatgtttcttctgcttcaaggagctggaaggctgggagccagatgacgaccccatagaggaacataaaaagcattcgtccggttgcgctttcctttctgtcaagaagcagtttgaagaattaacccttggtgaatttttgaaactggacagagaaagagccaagaacaaaattgcaaaggaaaccaacaataagaagaaagaatttgaggaaactgcgaagaaagtgcgccgtgccatcgagcagctggctgccatggattgaggcctctggccggagctgcctggtcccagagtggctgcaccacttccagggtttattccctggtgccaccagccttcctgtgggccccttagcaatgtcttaggaaaggagatcaacattttcaaattagatgtttcaactgtgctcttgttttgtcttgaaagtggcaccagaggtgcttctgcctgtgcagcgggtgctgctggtaacagtggctgcttctctctctctctctcttttttgggggctcatttttgctgttttgattcccgggcttaccaggtgagaagtgagggaggaagaaggcagtgtcccttttgctagagctgacagctttgttcgcgtgggcagagccttccacagtgaatgtgtctggacctcatgttgttgaggctgtcacagtcctgagtgtggacttggcaggtgcctgttgaatctgagctgcaggttccttatctgtcacacctgtgcctcctcagaggacagtttttttgttgtgtgttttttgttttttttttttggtagatgcatgacttgtgtgtgatgagagaatggagacagagtccctggctcctctactgtttaacaacatggctttcttattttgtttgaattgttaattcacagaatagcacaaactacaattaaaactaagcacaaagccattctaagtcattggggaaacggggtgaacttcaggtggatgaggagacagaatagagtgataggaagcgtctggcagatactccttttgccactgctgtgtgattagacaggcccagtgagccgcggggcacatgctggccgctcctccctcagaaaaaggcagtggcctaaatcctttttaaatgacttggctcgatgctgtgggggactggctgggctgctgcaggccgtgtgtctgtcagcccaaccttcacatctgtcacgttctccacacgggggagagacgcagtccgcccaggtccccgctttctttggaggcagcagctcccgcagggctgaagtctggcgtaagatgatggatttgattcgccctcctccctgtcatagagctgcagggtggattgttacagcttcgctggaaacctctggaggtcatctcggctgttcctgagaaataaaaagcctgtcatttcaaaca

SEQ ID NO: 65298 - DNA, 2276 bp, Homo sapiens
ctccagccattggtgtctgtgtcattactaatagagtcttgtaaacactcgttaatcacggaagccgccggcctggggctccgcacgccagcctgtggcgggtcttccccgcctctgcagcctagtgggaaggaggtgggaggaaagaaggaagaaagggagggagggaggaggcaggccagagggagggaccgcctcggaggcagaagagccgcgaggagccagcggagcaccgcgggctggggcgcagccacccgccgctcctcgagtcccctcgcccctttcccttcgtgccccccggcagcctccagcgtcggtccccaggcagcatggtgaggtctgctcccggaccctcgccaccatgtacgtgagctacctcctggacaaggacgtgagcatgtaccctagctccgtgcgccactctggcggcctcaacctggcgccgcagaacttcgtcagccccccgcagtacccggactacggcggttaccacgtggcggccgcagctgcagcggcagcgaacttggacagcgcgcagtccccggggccatcctggccggcagcgtatggcgccccactccgggaggactggaatggctacgcgcccggaggcgccgcggccgccgccaacgccgtggctcacggcctcaacggtggctccccggccgcagccatgggctacagcagccccgcagactaccatccgcaccaccacccgcatcaccacccgcaccacccggccgccgcgccttcctgcgcttctgggctgctgcaaacgctcaaccccggccctcctgggcccgccgccaccgctgccgccgagcagctgtctcccggcggccagcggcggaacctgtgcgagtggatgcggaagccggcgcagcagtccctcggcagccaagtgaaaaccaggacgaaagacaaatatcgagtggtgtacacggaccaccagcggctggagctggagaaggagtttcactacagtcgctacatcaccatccggaggaaagccgagctagccgccacgctggggctctctgagaggcaggttaaaatctggtttcagaaccgcagagcaaaggagaggaaaatcaacaagaagaagttgcagcagcaacagcagcagcagccaccacagccgcctccgccgccaccacagcctccccagcctcagccaggtcctctgagaagtgtcccagagcccttgagtccggtgtcttccctgcaagcctcagtgtctggctctgtccctggggttctggggccaactgggggggtgctaaaccccaccgtcacccagtgacccaccggggtctgcagcggcagagcaattccaggctgagccatgaggagcgtggactctgctagactcctcaggagagacccctcccctcccacccacagccatagacctacagacctggctctcagaggaaaaatgggagccaggagtaagacaagtgggatttggggcctcaagaaatatactctcccagatttttactttttcccatctggctttttctgccactgaggagacagaaagcctccgctgggcttcattccggactggcagaagcattgcctggactgaccacaccaaccaggccttcatcctcctccccagctcttctcttcctagatctgcaggctacacctctggctagagccgaggggagagagggactcaagggaaaggcaagcttgaggccaagatggctgctgcctgctcatggccctcggaggtccagctgggcctcctgcctccgggcaggcaaggtttacactgcggaagccaaaggcagctaagatagaaagctggactgaccaaagactgcagaacccccaggtggcctgcgtcttttttctcttcccttcccagaccaggaaaggcttggctggtgtatgcacagggtgtggtatgagggggtggttattggactccaggcctgaccagggggcccgaacagggacttgtttagagagcctgtcaccagagcttctctgggctgaatgtatgtcagtgctataaatgccagagccaacctggacttcctgtcattttcacaatcttggggctgatgaagaagggggtggggggagtttgtgttgttgttgctgctgtttgggttgttggtctgtgtaacatccaagccagagtttttaaagccttctggatccatggggggagaagtgatatggtgaagggaagtggggagtatttgaacacagttgaattttttctaaaaagaaaaagagataaatgagctttccag

SEQ ID NO: 65299 - DNA, 251 bp, Homo sapiens
aaagttgctttgaaaagaaactcagggagcaaggaaggaggaagactcttccccatgaggctgaattgggcctaagaatggatccagggttgggctgttatggggttgttggtctgtgtaacatccaagccagagtttttaaagccttctggatccatggggggagaagtgatatggtgaagggaagtggggagtatttgaacacagttgaattttttctaaaaagaaaaagagataaatgagctttccag

SEQ ID NO: 65300 - DNA, 2247 bp, Homo sapiens
ctccagccattggtgtctgtgtcattactaatagagtcttgtaaacactcgttaatcacggaagccgccggcctggggctccgcacgccagcctgtggcgggtcttccccgcctctgcagcctagtgggaaggaggtgggaggaaagaaggaagaaagggagggagggaggaggcaggccagagggagggaccgcctcggaggcagaagagccgcgaggagccagcggagcaccgcgggctggggcgcagccacccgccgctcctcgagtcccctcgcccctttcccttcgtgccccccggcagcctccagcgtcggtccccaggcagcatggtgaggtctgctcccggaccctcgccaccatgtacgtgagctacctcctggacaaggacgtgagcatgtaccctagctccgtgcgccactctggcggcctcaacctggcgccgcagaacttcgtcagccccccgcagtacccggactacggcggttaccacgtggcggccgcagctgcagcggcagcgaacttggacagcgcgcagtccccggggccatcctggccggcagcgtatggcgccccactccgggaggactggaatggctacgcgcccggaggcgccgcggccgccgccaacgccgtggctcacggcctcaacggtggctccccggccgcagccatgggctacagcagccccgcagactaccatccgcaccaccacccgcatcaccacccgcaccacccggccgccgcgccttcctgcgcttctgggctgctgcaaacgctcaaccccggccctcctgggcccgccgccaccgctgccgccgagcagctgtctcccggcggccagcggcggaacctgtgcgagtggatgcggaagccggcgcagcagtccctcggcagccaagtgaaaaccaggacgaaagacaaatatcgagtggtgtacacggaccaccagcggctggagctggagaaggagtttcactacagtcgctacatcaccatccggaggaaagccgagctagccgccacgctggggctctctgagaggcaggttaaaatctggtttcagaaccgcagagcaaaggagaggaaaatcaacaagaagaagttgcagcagcaacagcagcagcagccaccacagccgcctccgccgccaccacagcctccccagcctcagccaggtcctctgagaagtgtcccagagcccttgagtccggtgtcttccctgcaagcctcagtgtctggctctgtccctggggttctggggccaactgggggggtgctaaaccccaccgtcacccagtgacccaccggggtctgcagcggcagagcaattccaggctgagccatgaggagcgtggactctgctagactcctcaggagagacccctcccctcccacccacagccatagacctacagacctggctctcagaggaaaaatgggagccaggagtaagacaagtgggatttggggcctcaagaaatatactctcccagatttttactttttcccatctggctttttctgccactgaggagacagaaagcctccgctgggcttcattccggactggcagaagcattgcctggactgaccacaccaaccaggccttcatcctcctccccagctcttctcttcctagatctgcaggctacacctctggctagagccgaggggagagagggactcaagggaaaggcaagcttgaggccaagatggctgctgcctgctcatggccctcggaggtccagctgggcctcctgcctccgggcaggcaaggtttacactgcggaagccaaaggcagctaagatagaaagctggactgaccaaagactgcagaaccccctgaccagggggcccgaacagggacttgtttagagagcctgtcaccagagcttctctgggctgaatgtatgtcagtgctataaatgccagagccaacctggacttcctgtcattttcacaatcttggggctgatgaagaagggggtggggggagtttgtgttgttgttgctgctgtttgggttgttggtctgtgtaacatccaagccagagtttttaaagccttctggatccatggggggagaagtgatatggtgaagggaagtggggagtatttgaacacagttgaattttttctaaaaagaaaaagagataaatgagctttccagatttcagattctgtatttatcttcagattttgtctgcaactattttttattttttaaagaaatgaaatatcttc

SEQ ID NO: 65301 - DNA, 506 bp, Homo sapiens
gcggccgccgccaacgccgtggctcacggcctcaacggtggctccccggccgcagccatgggctacagcagccccgcagactaccatccgcaccaccacccgcatcaccacccgcaccacccggccgccgcgccttcctgcgcttctgggctgctgcaaacgctcaaccccggccctcctgggcccgccgccaccgctgccgccgagcagctgtctcccggcggccagcggcggaacctgtgcgagtggatgcggaagccggcgcagcagtccctcggcagccaaggtaagcagaggctgcgccccttcggagggtgcttgggaaggcgcgggtcgagccagtggctgctgcgcgtcgcgcgtccagtgcgcacaggggcgtcccgggctgtctgggagctcggcgccaggaggggcacggcccggagacaaattcgggggcctctggcccgtcggggcttctctgacctactgagcctgggagtgaatattctgagtctcaacac

SEQ ID NO: 65302 - DNA, 2350 bp, Homo sapiens
ctccagccattggtgtctgtgtcattactaatagagtcttgtaaacactcgttaatcacggaagccgccggcctggggctccgcacgccagcctgtggcgggtcttccccgcctctgcagcctagtgggaaggaggtgggaggaaagaaggaagaaagggagggagggaggaggcaggccagagggagggaccgcctcggaggcagaagagccgcgaggagccagcggagcaccgcgggctggggcgcagccacccgccgctcctcgagtcccctcgcccctttcccttcgtgccccccggcagcctccagcgtcggtccccaggcagcatggtgaggtctgctcccggaccctcgccaccatgtacgtgagctacctcctggacaaggacgtgagcatgtaccctagctccgtgcgccactctggcggcctcaacctggcgccgcagaacttcgtcagccccccgcagtacccggactacggcggttaccacgtggcggccgcagctgcagcggcagcgaacttggacagcgcgcagtccccggggccatcctggccggcagcgtatggcgccccactccgggaggactggaatggctacgcgcccggaggcgccgcggccgccgccaacgccgtggctcacggcctcaacggtggctccccggccgcagccatgggctacagcagccccgcagactaccatccgcaccaccacccgcatcaccacccgcaccacccggccgccgcgccttcctgcgcttctgggctgctgcaaacgctcaaccccggccctcctgggcccgccgccaccgctgccgccgagcagctgtctcccggcggccagcggcggaacctgtgcgagtggatgcggaagccggcgcagcagtccctcggcagccaagtgaaaaccaggacgaaagacaaatatcgagtggtgtacacggaccaccagcggctggagctggagaaggagtttcactacagtcgctacatcaccatccggaggaaagccgagctagccgccacgctggggctctctgagaggcaggttaaaatctggtttcagaaccgcagagcaaaggagaggaaaatcaacaagaagaagttgcagcagcaacagcagcagcagccaccacagccgcctccgccgccaccacagcctccccagcctcagccaggtcctctgagaagtgtcccagagcccttgagtccggtgtcttccctgcaagcctcagtgtctggctctgtccctggggttctggggccaactgggggggtgctaaaccccaccgtcacccagtgacccaccggggtctgcagcggcagagcaattccaggctgagccatgaggagcgtggactctgctagactcctcaggagagacccctcccctcccacccacagccatagacctacagacctggctctcagaggaaaaatgggagccaggagtaagacaagtgggatttggggcctcaagaaatatactctcccagatttttactttttcccatctggctttttctgccactgaggagacagaaagcctccgctgggcttcattccggactggcagaagcattgcctggactgaccacaccaaccaggccttcatcctcctccccagctcttctcttcctagatctgcaggctacacctctggctagagccgaggggagagagggactcaagggaaaggcaagcttgaggccaagatggctgctgcctgctcatggccctcggaggtccagctgggcctcctgcctccgggcaggcaaggtttacactgcggaagccaaaggcagctaagatagaaagctggactgaccaaagactgcagaacccccaggtggcctgcgtcttttttctcttcccttcccagaccaggaaaggcttggctggtgtatgcacagggtgtggtatgagggggtggttattggactccaggcctgaccagggggcccgaacagggacttgtttagagagcctgtcaccagagcttctctgggctgaatgtatgtcagtgctataaatgccagagccaacctggacttcctgtcattttcacaatcttggggctgatgaagaagggggtggggggagtttgtgttgttgttgctgctgtttgggttgttggtctgtgtaacatccaagccagagtttttaaagccttctggatccatggggggagaagtgatatggtgaagggaagtggggagtatttgaacacagttgaattttttctaaaaagaaaaagagataaatgagctttccagatttcagattctgtatttatcttcagattttgtctgcaactattttttattttttaaagaaatgaaatatcttc

SEQ ID NO: 65303 - DNA, 2115 bp, Homo sapiens
ctccagccattggtgtctgtgtcattactaatagagtcttgtaaacactcgttaatcacggaagccgccggcctggggctccgcacgccagcctgtggcgggtcttccccgcctctgcagcctagtgggaaggaggtgggaggaaagaaggaagaaagggagggagggaggaggcaggccagagggagggaccgcctcggaggcagaagagccgcgaggagccagcggagcaccgcgggctggggcgcagccacccgccgctcctcgagtcccctcgcccctttcccttcgtgccccccggcagcctccagcgtcggtccccaggcagcatggtgaggtctgctcccggaccctcgccaccatgtacgtgagctacctcctggacaaggacgtgagcatgtaccctagctccgtgcgccactctggcggcctcaacctggcgccgcagaacttcgtcagccccccgcagtacccggactacggcggttaccacgtggcggccgcagctgcagcggcagcgaacttggacagcgcgcagtccccggggccatcctggccggcagcgtatggcgccccactccgggaggactggaatggctacgcgcccggaggcgccgcggccgccgccaacgccgtggctcacggcctcaacggtggctccccggccgcagccatgggctacagcagccccgcagactaccatccgcaccaccacccgcatcaccacccgcaccacccggccgccgcgccttcctgcgcttctgggctgctgcaaacgctcaaccccggccctcctgggcccgccgccaccgctgccgccgagcagctgtctcccggcggccagcggcggaacctgtgcgagtggatgcggaagccggcgcagcagtccctcggcagccaagtgaaaaccaggacgaaagacaaatatcgagtggtgtacacggaccaccagcggctggagctggagaaggagtttcactacagtcgctacatcaccatccggaggaaagccgagctagccgccacgctggggctctctgagaggcaggttaaaatctggtttcagaaccgcagagcaaaggagaggaaaatcaacaagaagaagttgcagcagcaacagcagcagcagccaccacagccgcctccgccgccaccacagcctccccagcctcagccaggtcctctgagaagtgtcccagagcccttgagtccggtgtcttccctgcaagcctcagtgtctggctctgtccctggggttctggggccaactgggggggtgctaaaccccaccgtcacccagtgacccaccggggtctgcagcggcagagcaattccaggctgagccatgaggagcgtggactctgctagactcctcaggagagacccctcccctcccacccacagccatagacctacagacctggctctcagaggaaaaatgggagccaggagtaagacaagtgggatttggggcctcaagaaatatactctcccagatttttactttttcccatctggctttttctgccactgaggagacagaaagcctccgctgggcttcattccggactggcagaagcattgcctggactgaccacaccaaccaggccttcatcctcctccccagctcttctcttcctagatctgcaggctacacctctggctagagccgaggggagagagggactcaagggaaaggcaagcttgaggccaagatggctgctgcctgctcatggccctcggaggtccagctgggcctcctgcctccgggcaggcaaggtttacactgcggaagccaaaggcagctaagatagaaagctggactgaccaaagactgcagaacccccaggtggcctgcgtcttttttctcttcccttcccagaccaggaaaggcttggctggtgtatgcacagggtgtggtatgagggggtggttattggactccaggcctgaccagggggcccgaacagggacttgtttagagagcctgtcaccagagcttctctgggctgaatgtatgtcagtgctataaatgccagagccaaaaaaaaaaaacaacgtctcgcgcaagttatccctaggaggaaaaaaaaaagattttgggactggggacca

SEQ ID NO: 65304 - DNA, 943 bp, Homo sapiens
gcatgtctatcagaggtgggacttgcagcctgtgccccacgagtttgtctctcagtggactctataggtttgctacttttgcatgacacagcaagcccagtgtcccctttgcaagctgcagagagggaaacagagtcccaggcctgctgggaatgagaataatcctaatacccatcatttattgagtccctgctgtaactggccctgtccagggaactttcgttacgttgtctcattatttaacccttaggaggtaagcttattatccccacttcacaaggggaccgaggctcagacggtagaaataaccctctcttggccaccagatcacgggtggcaggggcaggatttgaacccaggaccctcagttcctgaagccatgttctctcgaccctgccagcttcccctcttcgagagaaaactcagacagggagggcgcagggccagaacggctccttaaggcaggcagggctgcggggaggctgggccagccagcctgagggggtaggcagggtcctgcagggcctggggcttcccttcctcatcccccttccccactggctcggggagcagcctggactgcagctctcagaggccagggagaccctgaataaatcactgccagccatacggacttgaggaccttgagagagaagcattgggggtgcaagtgtccaccaaaccagataggcatccctggccactgcctcccagtcttgctgagcccacccgctctctctgggtccatcccatcctgtctccagtgctcttggtactcctgtttggctgtggcctggtccctctgggccctgggatcttcttctggcccttgaggcaggtctggagaggcagtctctgtcttcatggaggggtggtcagaggcgggcgggaccaccagcctgtagcgttattattatatgtgacaataaaggtgctctcccca

SEQ ID NO: 65305 - DNA, 1056 bp, Homo sapiens
gtatgacaacagcctcaagatcatcagcaatgcctcctgcaccaccaactgcttagcaccctggccaaagttgtcatggatgaccttggccagggctcagacggtagaaataaccctctcttggccaccagatcacgggtggcaggggcaggatttgaacccaggaccctcagttcctgaagccatgttctctcgaccctgccagcttcccctcttcgagagaaaactcagacagggagggcgcagggccagaacggctccttaaggcaggcagggctgcggggaggctgggccagccagcctgagggggtaggcagggtcctgcagggcctggggcttcccttcctcatcccccttccccactggctcggggagcagcctggactgcagctctcagaggccagggagaccctgaataaatcactgccagccatacggaaaaaaaaaaaaaaaaaaaaaaaaaaaaaacaaaaaacacaaagagaagacgaaagacaaaaaaacagaaaaagagaagagaaacaacgaagaacagagaaaggagagcacgaaagcgggacagagcagaaagaagaggaagcagatgaacaagagagcaaagcgtaccgagtagaacaaaagaagagaagagaacgaacgatagtccgagagagccgaagacgggacgccgccgcgaacagcacaaaagacgggcagctggagcacgagacacgacgcaccggtaggtaccaacaagtgagaagataggagaacgagagatgagcaaaacccagacagagcggaacggacagagcaagagaggacggcagcccgagcgaggcggacagcaggcagcagagcgcgaagccggaaggagccgagggcgaggcaaacagacaaagaaggaagaacgatcgcacaaagtggtgagagggagccagacaacgccggccgcgagacagcagaccacgctagtagcaacaaacaagacgagcgacagctgcaaagacagggacgcggaagcagggcgcgaaggagacgcgccacggcagcgcgagacgcgaacggcaagccgaa

SEQ ID NO: 65306 - DNA, 1183 bp, Homo sapiens
gtatgacaacagcctcaagatcatcagcaatgcctcctgcaccaccaactgcttagcaccctggccaaagttgtcatggatgaccttggccagggctcagacggtagaaataaccctctcttggccaccagatcacgggtggcaggggcaggatttgaacccaggaccctcagttcctgaagccatgttctctcgaccctgccagcttcccctcttcgagagaaaactcagacagggagggcgcagggccagaacggctccttaaggcaggcagggctgcggggaggctgggccagccagcctgagggggtaggcagggtcctgcagggcctggggcttcccttcctcatcccccttccccactggctcggggagcagcctggactgcagctctcagaggccagggagaccctgaataaatcactgccagccatacggacttgaggaccttgagagagaagcattgggggtgcaagtgtccaccaaaccagataggcatccctggccactgcctcccagtcttgctgagcccacccgctctctctgggtccatcccatccctgagccaggggaggcagcatttcatgggcatgtctatcagaggtgggacttgcagcctctgccccacgagtttgtctctcagtggactctataggtttgctacttttgcatgacacagcaagcccagtgtcccctttgcaagctgcagagagggaaacagagtcccaggcctgctgggaagagatgctcctgcctcccaccttccagagttgggggcctggcaggctccatggcaggcaccaggtccctagcagcccagaacagctctgactggagccctcaaggcctctggggccagggtccccgtgatcagctcagccctggtgttcctctcttgctgggctgggacctgggacacagccacggcagcaaactcagagaattgaaggtgctggcgccaccctggggcactctgtcttcacagcaggagtgactgtctccagtgctcttggtactcctgtttggctgtggcctggtccctctgggccctgggatcttcttctggcccttgaggcaggtctggagaggcagtctctgtcttcatggaggggtggtcagaggcgggcgggaccaccagcctgtagcgttattattatatgtgacaataaaggtgctctcccca

SEQ ID NO: 65307 - DNA, 1435 bp, Homo sapiens
gcatgtctatcagaggtgggacttgcagcctgtgccccacgagtttgtctctcagtggactctataggtttgctacttttgcatgacacagcaagcccagtgtcccctttgcaagctgcagagagggaaacagagtcccaggcctgctgggaatgagaataatcctaatacccatcatttattgagtccctgctgtaactggccctgtccagggaactttcgttacgttgtctcattatttaacccttaggaggtaagcttattatccccacttcacaaggggaccgaggctcagacggtagaaataaccctctcttggccaccagatcacgggtggcaggggcaggatttgaacccaggaccctcagttcctgaagccatgttctctcgaccctgccagcttcccctcttcgagagaaaactcagacagggagggcgcagggccagaacggctccttaaggcaggcagggctgcggggaggctgggccagccagcctgagggggtaggcagggtcctgcagggcctggggcttcccttcctcatcccccttccccactggctcggggagcagcctggactgcagctctcagaggccagggagaccctgaataaatcactgccagccatacggacttgaggaccttgagagagaagcattgggggtgcaagtgtccaccaaaccagataggcatccctggccactgcctcccagtcttgctgagcccacccgctctctctgggtccatcccatccctgagccaggggaggcagcatttcatgggcatgtctatcagaggtgggacttgcagcctctgccccacgagtttgtctctcagtggactctataggtttgctacttttgcatgacacagcaagcccagtgtcccctttgcaagctgcagagagggaaacagagtcccaggcctgctgggaagagatgctcctgcctcccaccttccagagttgggggcctggcaggctccatggcaggcaccaggtccctagcagcccagaacagctctgactggagccctcaaggcctctggggccagggtccccgtgatcagctcagccctggtgttcctctcttgctgggctgggacctgggacacagccacggcagcaaactcagagaattgaaggtgctggcgccaccctggggcactctgtcttcacagcaggagtgactgtctccagtgctcttggtactcctgtttggctgtggcctggtccctctgggccctgggatcttcttctggcccttgaggcaggtctggagaggcagtctctgtcttcatggaggggtggtcagaggcgggcgggaccaccagcctgtagcgttattattatatgtgacaataaaggtgctctccccaaacaaagaagaaaagcaataagcacaacacagctagaacaatcaggacacgcaggaa

SEQ ID NO: 65308 - DNA, 254 bp, Homo sapiens
ctgtgggtctgtttgtgtggtgacagctctgcaggaggctggtctgcatcttaccggccaggtgccagggaagctgtgagcagctccagccaggcccggggtgaccacagggcctctgtggcagggaggtccagctctgccctcaggacctccagggagggggctgggagtgacacacgataggcaagccccggattggggcttaacctgcaagggctcttggcttcacccagcaaagaattcaagggcaagct

SEQ ID NO: 65309 - DNA, 452 bp, Homo sapiens
attgtgaggacatggggggctttggggacagataatgtctccaggggcagggtctggaggggccaacaccctcatcagagccctcctctggcctgtcccctcccctacccccactcccggctggagacggggtctgggtgggctgggtgctgggaatgagaataatcctaatacccatcatttattgagtccctgctgtaactggccctgtccagggaactttcgttacgttgtctcattatttaacccttaggaggtaagcttattatccccacttcacaaggggaccgaggctcagacggtagaaataaccctctcttggccaccagatcacgggtggcaggggcaggatttgaacccaggaccctcagttcctgaagccatgttctctcgaccctgccagcttcccctcttcgagagaaaactcagacagggagggcgcagggccagaa

SEQ ID NO: 65310 - DNA, 1378 bp, Homo sapiens
gcatgtctatcagaggtgggacttgcagcctgtgccccacgagtttgtctctcagtggactctataggtttgctacttttgcatgacacagcaagcccagtgtcccctttgcaagctgcagagagggaaacagagtcccaggcctgctgggaatgagaataatcctaatacccatcatttattgagtccctgctgtaactggccctgtccagggaactttcgttacgttgtctcattatttaacccttaggaggtaagcttattatccccacttcacaaggggaccgaggctcagacggtagaaataaccctctcttggccaccagatcacgggtggcaggggcaggatttgaacccaggaccctcagttcctgaagccatgttctctcgaccctgccagcttcccctcttcgagagaaaactcagacagggagggcgcagggccagaacggctccttaaggcaggcagggctgcggggaggctgggccagccagcctgagggggtaggcagggtcctgcagggcctggggcttcccttcctcatcccccttccccactggctcggggagcagcctggactgcagctctcagaggccagggagaccctgaataaatcactgccagccatacggacttgaggaccttgagagagaagcattgggggtgcaagtgtccaccaaaccagataggcatccctggccactgcctcccagtcttgctgagcccacccgctctctctgggtccatcccatccctgagccaggggaggcagcatttcatgggcatgtctatcagaggtgggacttgcagcctctgccccacgagtttgtctctcagtggactctataggtttgctacttttgcatgacacagcaagcccagtgtcccctttgcaagctgcagagagggaaacagagtcccaggcctgctgggaagagatgctcctgcctcccaccttccagagttgggggcctggcaggctccatggcaggcaccaggtccctagcagcccagaacagctctgactggagccctcaaggcctctggggccagggtccccgtgatcagctcagccctggtgttcctctcttgctgggctgggacctgggacacagccacggcagcaaactcagagaattgaaggtgctggcgccaccctggggcactctgtcttcacagcaggagtgactgtctccagtgctcttggtactcctgtttggctgtggcctggtccctctgggccctgggatcttcttctggcccttgaggcaggtctggagaggcagtctctgtcttcatggaggggtggtcagaggcgggcgggaccaccagcctgtagcgttattattatatgtgacaataaaggtgctctcccca

SEQ ID NO: 65311 - DNA, 420 bp, Homo sapiens
gtggcccagcattttaactattcctgtagttctggaatttaggccatttctactttttgcttttaaaagtgctgcaccaaagagccttatatatatgccttggcaggtacattacctttgaataggatttgaattgctaggttacaaattatactctttttcaacattttggtagaaattttggttgcatctgccaaactgccttctaatactacttatttatattcacaccaagagcagacataactttttctgccatgggagataattttatttaagggggtatatttggaacgccatagctaaaccaccactaactatatccaaatggtgcccaaagtttatacaaatctgcttaaaacatccagcaatgagtggataaatgaataataaactatttttccataaacagaggtacac

SEQ ID NO: 65312 - DNA, 1065 bp, Homo sapiens
aaaacattgatttgtagatttatcatatgtgtgacctacttacctcctaattttgcccttcaaaattgccaagaggttatttctttcagcaaggaattgaaaagtactttaaacaagggaaacaccttatcttgaaaagtttgtagtgtgtaccttccctaggctggaaatgaagctaagagatgttaccattgtaaaggaatccctgatatcagtagagatgatgggatcctgcagtgccagtggccaaggggtagtaccaaggcaacagagctgtagtgatgaaatacatgggttacctaccaaggttctatttggcttatagaacgcaaaacaaatcttcaggtctggcaaatagaggcctgttttgagtcaccaaaatggagatttacagacaattctcagagctgaagcccttgaaaaagggggtgcagggtactctggaggaagcacccagcaataccaccataactatatcataaatcttctcgttttccccaaagggatcttaagccatgtaactatgcatgtgtgcttagggaaatggaaatgcccaggcctttagggattacttggaaactggccctaagccagcacaaatgctgagacctaaaaagcctttgtggtccactagttagaatagaggcttccatggtgttatgggtcgaattgtgtcccttccaccaaaaatcatatgttgaagtcctagcccctagtacctcaaaatgtgcccttatttggaaaatgaggttgttgcagatataattaagatgaggtcttattggcatagggtggccccctaattcgattgttgtacatataaaaaggggaaatctgaacacaaagacatgcacataggctaagtaccatgtgaagatgaaggcagagactggggtgatgcagcagaggccaagggacaccaaggattgccagcaaaccatcagaagctgggagcggcaaggaacagatcctcccccacagcccgcggaaggaaccaattctgccaaaatctaggacttctagcttcctgaactgtgagacaataaatttctgttacttaagtca

SEQ ID NO: 65313 - DNA, 528 bp, Homo sapiens
agttgtaatgaggttctattgttgcttacagaaaagatattccatggtagggctggatgcccacgcaggccaatggccagcacatagggaacaagttgttctgttctacttgcttcatgtagcttttcttactccagtggaaaaaaaaatccaactaggtgagagtgtataaccagagacaagctgcttattagcaatacaaggaaaagtaattgtgcaatagagtaatgacaatgaaaattagtgctcatccccaggattcaagaccatagccactcagagatcacagggagcttcacatgctgtctatcacagccaagcatttacaagccaatattaatataaacagtgcactaaaaaagaatgtaaaactagacctattatgttagatcctggaaaaaaggatcttgggacagagggcaagtgtggaccaatcaaaaattcgacttttggaagagttatatttttcttttcttttttattgggtttttaatgttgtgtgtaactaaataaaatacagaaggacta

SEQ ID NO: 65314 - DNA, 827 bp, Homo sapiens
tccccatgtcgtaattgaacagaaggcagcccgaataaacccctgatgttagagaggcctggggagagcagccgatggggctcagactacatatggcaggccgatcagagctcttgtggagcgagggcttgagagcatgcttgtgagatggcaggaggtggggtgtgcttgtgtggagtgtgcgtgtgcaggcagtgtgggtgcatggcagcgtaactgtggagtggatgggctctgcatgtaaggggtgatgcatgatgggcagatgctggacatttgaggagccgtctttcttggcctgagctatgcctgttgaggcatctggagactgagaaagaatcaaaggcagagaagaccagccgtgctcctgcattccgtcactccatgacttcatctcagtgtcacagacagctgccatcagagggctggcagtagggagttccaggagcggggacttctcgggaaaatcctataacttgctttactttactttgtcccaggttggagtccctaccctcccacctcccacctgatatgcagtgcttttgactatcttatgcatggtttattcctctggcttggatgacaacaatacccatagtcaattttcctatgtaactatagatcaaatgatgcaacaacaggccttgggaggcctcaggtgtgcgagtgcctctgggaggcgcagatgcccacacagccagcactgacttgtgttcgagcacagaacggatataatcagtctggcctctacaacaagttttgcattgtagaattgtatttagctttgccttggatgaaataaaaattatgtttaataatttggg

SEQ ID NO: 65315 - DNA, 1062 bp, Homo sapiens
tcttcagctaggtcgtagtgcccaggaacagatcagatcagaatcagtatgttgtttatgatacagatcaaattaactaatgattcttccagttttcttcttcctgattatttcctccagacacaaaatagggtcaaggagaaaagttcttttctaccattaaacttttgagctgcctgtgtttgggattcaaagtattttgggtgcttattgcttaactgggctgaagattatctcatgtgacaccatagatctcttgttttggaattgccattactttctagaacaggcattctgtacagctgccaacatgccctgaatcctcttgcttcatattacagtgatactgctttgtcagggtagaattcagcctcacagggctggagtaagtctctgctgacctcatgccacagtacaacatgttcaaatctgggagaaacctgagggttattcggcatattcctcctcctcctctctcacaagcatggagccctcactctcctcggaaaccgtatgttgtatatgtgtgtgtatctgtcttttaaaaaaaaaaaaaaaaaaatctcatcctgaatcctatagttagttagtcctgcagctttaagtgggggctggttgaatagacagacaaaggaaatagcctgagctgctgaaacttagcgtttttcagcagtagatctcagccaggggcatttgctattttaggactgacttgtgtaaggttgtaataatggagaagcataatatgtgtttcctagttgttcattttacccaaagctatttggacagaatgtagagggtgctctgtagctgtatggacatgctcagatcatcctggagtgtcccgtctcttgtgtgtaatgggctgcttcattgcagagtaagtgtcatcctcactttctcaagcgaaatagttactggaaaatcagtgtttctttcaatgaacaagagtttcatttgccttggactgcttgggaaaaacatgggttaaattcgaagatgccaggcatgcataacaaataggaatttgatttagagccacctggaatacttattaaatta

SEQ ID NO: 65316 - DNA, 453 bp, Homo sapiens
tcttcagctaggtcgtagtgcccaggaacagatcagatcagaatcagtatgttgtttatgatacagatcaaattaactaatgattcttccagttttcttcttcctgattatttcctccagacacaaaatagggtcaaggagaaaagttcttttctaccattaaacttttgagctgcctgtgtttgggattcaaagtattttgggtgcttattgcttaactgggcaacttaaccaagaccctgtctctcaaatgtataatcaaagaatgtgttcttgcagttagagacttgcgtcttttactcctgatgcattactcatctcggagtcagttatattcgatttttaaagcaaatatccggatctgactatgattcagaaattactaatgtacaggcaatagatgatgggcaggagaaagctatgaccaggtaaagctatgacatgctatacgaa

SEQ ID NO: 65317 - DNA, 170 bp, Homo sapiens
aaaaaaaaaaaaattactgcttagataagttatctcatttaaccttgatttctttgtgttaaggacagacaaaatcagtagcattgggctgataattttacagaagtattgtctagaaacctttcatttacatagaatttttatgaaatgaaggattaaatagtaggaaa

SEQ ID NO: 65318 - DNA, 270 bp, Homo sapiens
aaaaaagaaaagaaaaatatgcttcccatgggtcttccttccttgtagaaatcttattgttaatcattgtaggactgctggaaactcacaaaagtaacagctaggggatgataggagatgcgtgcagttgttgcagtcctgtatggtccctgttccatgctcctggctctagttgaaggccgtgagcagaagtcccctgtgggctgagcctcttgcgcatctctgtccaagggaggccggcctaggggcttaggttccacatggttttat

SEQ ID NO: 65319 - DNA, 458 bp, Homo sapiens
ctattatccataaatgacatatattgatcataaattaggaaagtccatagatcatttgactacatatatgagcgtatattactgggctctctattctgttccattggtctatatgtctatctttatgccagtaccatactattttgattactgtagctttgttttatatacatataaaacaaacatatacatattttttaaaagggccttattatgttgcccagcctggagtgcagtggttattcataggtgagattatagttcactacagcccaaaactcctaggctcaagtctcctgccttagcctcccaagtagcatgccactatgcccagcttgtatcaccttttaaaatcaggaagcatggggcctgtggctttattcttctttcttactactgttttggctctctggggtcctttgtggttccataggaattttaggattttttttctattt

SEQ ID NO: 65320 - DNA, 314 bp, Homo sapiens
gagaaagtgagggaccatcgtgtgaggagctgagcccttgggacagagacccaagttacatagctcttggcagggactcccttctcctaagctgagccagcttcaagaggcctaaagtcaggcagccaaactacctcttggaattgcccacactgtgggatgagaagccacgtcccccagtgccagaagcaaaagcaccagagcagggcacattcccatctatcagcagccagggcaggaggcaccacccagagtggacaccacacccacttcccaggtgggcggcccttgcgccttgcagcaccgcagtcggg

SEQ ID NO: 65321 - DNA, 380 bp, Homo sapiens
agatttttggggggcaagaacccagcctgcaccatctgaacatatgatccccttagtcacagacttgaggaagagaatgttagggagtcctacaagagcgatcaaatgcttcagcgtagaggtaaccccatcactgccactcataccctgttcagcagaacaaggagagaggcacttgtactctttccatgtgcccaaagcagtggaaaatcaagtcagtgtaagtactagcatcctatacatggatgcaaaatagttcttgccccccagatgctcaaggttgaatgatgtgcacagataaaaccaaacaaaggaaaatgatggctataacctggtgcaataagtactccattcttccagtgggtcagaaaaaaaaaccc

SEQ ID NO: 65322 - DNA, 545 bp, Homo sapiens
aacccagtaggcagaggttgcagtgagctgagattgtgtcactgcactccagcctgggcaacagagtgagactctgtctcaaaaaaaaagcaaagctaggcatggtggtgcacacctgtagtctcagctactcaggaggctgaggcaggaagagggcttgagtccaggaggtcaaggctgcagtgcattttgattatgcctcacactgaacatttgctgtgtatttgctatgtaccaagcactgtcttaagcacttaatgtagattaattcctacatataatatgcccagcagcctctgaggtaaatgatcctacagtcgaccccttatcctcaggtgatctcctccaaacccccagtggatgccggaaactgtggatagtactgaactatagactgtgttttctcgatctgataaccaagatggctcctaggtgactagtgggtgggttgcggatacagcatagacttgctgaacaaagggatgattcgcatcccaggtgggacgaagcggataacacttccgaggggatactctagaacagct

SEQ ID NO: 65323 - DNA, 537 bp, Homo sapiens
aacccagtaggcagaggttgcagtgagctgagattgtgtcactgcactccagcctgggcaacagagtgagactctgtctcaaaaaaaaagcaaagctaggcatggtggtgcacacctgtagtctcagctactcaggaggctgaggcaggaagagggcttgagtccaggaggtcaaggctgcagtgcattttgattatgcctcacactgaacatttgctgtgtatttgctatgtaccaagcactgtcttaagcacttaatgtagattaattcctacatataatatgcccagcagcctctgaggtaaatgatcctacagtcgaccccttatcctcaggtgatctcctccaaacccccagtggatgccggaaactgtggatagtactgaactatagactgtgttttctcgatctgataaccaagatggctcctaggtgactagtgggtgggttgcggatacagcatagacttgctgaacaaagggatgattcgcatcccaggtgggacgaagcgggatggcacgagatttcatcacagta

SEQ ID NO: 65324 - DNA, 453 bp, Homo sapiens
tcctcctcactcaaaacggggtcatctctcttcgttttatttggctatcatctcaccccctttaggcaccagagttataaggaggagccaacgcttttacaaacttaatccctcctttccttcaaaccagctcctttcccccaaatataaggaggaacagccagtcgcgagcaccatggcccctccagagacgaacagcgtccgctcctgctcggagcgggaagctctctggctgcggtgctggccagcgcagcctgggacgcacggccaagcgcgatgcagtcgccagcagctcaggccgtaggctgtgcctctgcccggtgccagctgttgtctggaaggccacaaacctctggagtctgtttcgtgaaaataaaaatctatggtgcatcgtgccctccaacaaaggacagcccaggctccgaagccataatctgctgtttatccctgaaa

SEQ ID NO: 65325 - DNA, 748 bp, Homo sapiens
ctttctgtgttacagtaagggaagaagtcaccacacatcccagctggaggagggaacatgactggctcacttcagcaccctcaccattgttccagatatccaaggccctccttggacctcaacaagacttaagccgctgcagagacggtgtaaatgtggagtggctggttggggacagagtgaaactcctggaatcagatggtgatctgctgataagctgggtctgtgccagccagcagagtccatgcgtgcaagagcctggagtctccccctgtgaaggcttggggctggttgggcagtaagcctcacagtaatccttagtcctgttagatgggagttctaaatttattttcaaagaattaatatgtcagtatgttcaattctttgccttctacttttaaacttaacttcctcataaagcaacctttttccattacctaccccaccctaactcattctgatcacctgctccaccctaactcattctgaccacctgctccactctaactcattaggattacctgctacctgctctgccctgactcccgccaaagctctcatcccatcattctctttcaattagccaatcggaattagtttagcctgtgtggtctaaccctagctaacaggagaatgacacagcggctgcagccaagttcgtcagggataagaaccccttcccctcccttgtccacctgggcgctcaccattgttccatctgtaagggcgcaccgttctatatagaagt

SEQ ID NO: 65326 - DNA, 375 bp, Homo sapiens
gcctttgatcagatgtcctctcttccttatcgcttgctctcatttgctgctgccctcctctcctctcttcagactatctaatggatctcaccaccctctcatcctctttgcagttcttcctgtttccaaaagagtctttcatttaagagatgtaacggggtgtggggtgaagaggtattagaaaattacgccagaggcttttatgtgtgtgatggaggcaaagctcacctcagagcagacggtccttcttctgcttctccgtctttttttttttggtaaatttttattgcttttgcagtcctcacgtaacttaatacattaatatattctcgatgtcaaaaagcaaataaagctaaagtccttcttgatcccctc

SEQ ID NO: 65327 - DNA, 277 bp, Homo sapiens
tcgtataaaattaaaacttgagaattctagctttcaatgtccttttggttgctaatgtaaagaggtgatatcaaatttctggcattatatagatatataatatatattgtgcatattattatatataatgtatatatgtattatatattatatatttatatatgtgtgtatttatacacttattggattattatatattacaaaatgttcctcagttaccatgtgtgctgtagcacagtgttaattcatgggtccttcctgaatcacaaattagaac

SEQ ID NO: 65328 - DNA, 729 bp, Homo sapiens
gaagtgagaggaggaggtgaggtgctgcgggaggccccgggcaccatggcccaggccctgggggaggacctggtgcagcctcccgagctgcaggatgactccagctccttggggtccgactcagagctcagcgggcctggcccatatcgccaggccgaccgctatggattcattgggggcagctcagcagagccagggccgggccacccacctgcagacctcatccgccaacgggagatgaagtgggtggagatgacctcgcactgggagaaaaccatgtcccggcggtacaagaaggtaaagatgcagtgccggaaaggcatcccgtctgccctgcgcgcccgatgctggcccctgttgtgtggggcccatgtgtgccagaagaacagccctggcacctatcaggagctggcagaggcccctggagacccacagtggatggagaccattggcagggacctgcaccgtcaattccctctgcacgagatgtttgtgtcgcctcagggccacgggcagcaggggctcctgcaggtgctcaaggcctacaccctgtatcgaccggagcagggctactgccaggcccaggggcccgtggctgctgtgctgctcatgcacctgcccccagaggaggccttctggtgcctggtgcagatctgtgaggtctacctccctgggtactacgggccccacatggtgagaggctgacatgggggctggaggaaggagggg

SEQ ID NO: 65329 - DNA, 2088 bp, Homo sapiens
  misc_feature (2088)..(2088): n is a, c, g, or t
agctggtacggtctggaatttgggctcccccctctgaccccgcagccaggccccaggctggccgggagtggcccctcacactggttctccccactttctctgcctgtggcatcgaaggccccgggcaccatggcccaggccctgggggaggacctggtgcagcctcccgagctgcaggatgactccagctccttggggtccgactcagagctcagcgggcctggcccatatcgccaggccgaccgctatggattcattgggggcagctcagcagagccagggccgggccacccacctgcagacctcatccgccaacgggagatgaagtgggtggagatgacctcgcactgggagaaaaccatgtcccggcggtacaagaaggtaaagatgcagtgccggaaaggcatcccgtctgccctgcgcgcccgatgctggcccctgttgtgtggggcccatgtgtgccagaagaacagccctggcacctatcaggagctggcagaggcccctggagacccacagtggatggagaccattggcagggacctgcaccgtcaattccctctgcacgagatgtttgtgtcgcctcagggccacgggcagcaggggctcctgcaggtgctcaaggcctacaccctgtatcgaccggagcagggctactgccaggcccaggggcccgtggctgctgtgctgctcatgcacctgcccccagaggaggccttctggtgcctggtgcagatctgtgaggtctacctccctgggtactacgggccccacatggaggctgtgcggctggacgccgaggtgttcatggccctgctgcggcggctgcttccgcacgtgcacaagcacctgcagcaggtgggcgtcggacccctgctgtacctgcccgagtggttcctgtgcctcttcgcccgctccctgcccttccccacagtgctgcgtgtctgggatgccttcctcagtgagggtgccagagtactgttccgtgtggggctgacactggtgcgcctggcgctgggcactgcagagcagcgaggggcctgccctggcctcctggagacactgggagcccttcgagccatcccccccgcgcagctgcaggaggaggccttcatgtcacaggtgcacagcgtggtgctgtcagagcgggacctgcagcgggagatcaaggcccagctggcccagctgcccgattccgcgccgggacccccgccccggccacaggtccgcctcgccggggcccaagccatctttgaggcccagcagctggcaggagtgcgacgaggcgccaagcctgaggtgcctcggattgtggtgcagcccccggaggagcccagaccaccgcggcggaaaccccagacccgcggcaagactttccatgggctcctgactcgggcccggggcccccccatcgaggggccccccaggccccaacgaggctccacctccttcctggacacccgcttctgagaggaccatggacttagtgtcccccagtctcaattgcctgatggctgatgccagcccggcaaataggcaccgcactttactcttgggactcggggacttggcttccttcctggcaaggaccaggcagtggggaaggaggaggtcctccgtggtacatactgggtcaggcactagcatggaggagggtcacagagtggggcacgtgaggacccatggaaccgtcctggtgcccaggccctcacaagtaccaaagccagcaccaaaggagtcagggaaggggttggctgagtcaagggaccccagagggcaccaggaataaaatcttcttgaacagaaaaaaaaaaaaacaaacacaaaaaaaaaaagaagaaaagaccggggacctatataggggggcgagaagcgtgataatgagacaggaacatagttcttagagcattttgttaacaggttgagaaggggggaccacaggggagggtatatgacaggatgcggaagaaagagagagcgaggacgttgtgagtggtgttagagggagggtatcccaacgggagacagagagagagataatattcttatatatacagggtgaataagacgtagaacgatgggtgaagn

SEQ ID NO: 65330 - DNA, 2047 bp, Homo sapiens
  misc_feature (2047)..(2047): n is a, c, g, or t
gaagtgagaggaggaggtgaggtgctgcgggaggtgagctgggctggtggggacaggggcagggcttggggctgggtctccggacagaggcctggcttttctgtcagggcagggcctagcccctgcccccataaaagaggagacatagggggcttggtgagataccctgaaacctcccccctctgaccccgcagccaggccccaggctggccgggagtggcccctcacactggttctccccactttctctgcctgtggcatcgaaggccccgggcaccatggcccaggccctgggggaggacctggtgcagcctcccgagctgcaggatgactccagctccttggggtccgactcagagctcagcgggcctggcccatatcgccaggccgaccgctatggattcattgggggcagctcagcagagccagggccgggccacccacctgcagacctcatccgccaacgggagatgaagtgggtggagatgacctcgcactgggagaaaaccatgtcccggcggtacaagaaggtaaagatgcagtgccggaaaggcatcccgtctgccctgcgcgcccgatgctggcccctgttgtgtggggcccatgtgtgccagaagaacagccctggcacctatcaggagctggcagaggcccctggagacccacagtggatggagaccattggcagggacctgcaccgtcaattccctctgcacgagatgtttgtgtcgcctcagggccacgggcagcaggggctcctgcaggtgctcaaggcctacaccctgtatcgaccggagcagggctactgccaggcccaggggcccgtggctgctgtgctgctcatgcacctgcccccagaggaggccttctggtgcctggtgcagatctgtgaggtctacctccctgggtactacgggccccacatggtgccagagtactgttccgtgtggggctgacactggtgcgcctggcgctgggcactgcagagcagcgaggggcctgccctggcctcctggagacactgggagcccttcgagccatcccccccgcgcagctgcaggaggaggccttcatgtcacaggtgcacagcgtggtgctgtcagagcgggacctgcagcgggagatcaaggcccagctggcccagctgcccgattccgcgccgggacccccgccccggccacaggtccgcctcgccggggcccaagccatctttgaggcccagcagctggcaggagtgcgacgaggcgccaagcctgaggtgcctcggattgtggtgcagcccccggaggagcccagaccaccgcggcggaaaccccagacccgcggcaagactttccatgggctcctgactcgggcccggggcccccccatcgaggggccccccaggccccaacgaggctccacctccttcctggacacccgcttctgagaggaccatggacttagtgtcccccagtctcaattgcctgatggctgatgccagcccggcaaataggcaccgcactttactcttgggactcggggacttggcttccttcctggcaaggaccaggcagtggggaaggaggaggtcctccgtggtacatactgggtcaggcactagcatggaggagggtcacagagtggggcacgtgaggacccatggaaccgtcctggtgcccaggccctcacaagtaccaaagccagcaccaaaggagtcagggaaggggttggctgagtcaagggaccccagagggcaccaggaataaaatcttcttgaacagaaaaaaaaaaaaacaaacacaaaaaaaaaaagaagaaaagaccggggacctatataggggggcgagaagcgtgataatgagacaggaacatagttcttagagcattttgttaacaggttgagaaggggggaccacaggggagggtatatgacaggatgcggaagaaagagagagcgaggacgttgtgagtggtgttagagggagggtatcccaacgggagacagagagagagataatattcttatatatacagggtgaataagacgtagaacgatgggtgaagn

SEQ ID NO: 65331 - DNA, 1943 bp, Homo sapiens
gaagtgagaggaggaggtgaggtgctgcgggaggtgagctgggctggtggggacaggggcagggcttggggctgggtctccggacagaggcctggcttttctgtcagggcagggcctagcccctgcccccataaaagaggagacatagggggcttggtgagataccctgaaacctcccccctctgaccccgcagccaggccccaggctggccgggagtggcccctcacactggttctccccactttctctgcctgtggcatcgaaggccccgggcaccatggcccaggccctgggggaggacctggtgcagcctcccgagctgcaggatgactccagctccttggggtccgactcagagctcagcgggcctggcccatatcgccaggccgaccgctatggattcattgggggcagctcagcagagccagggccgggccacccacctgcagacctcatccgccaacgggagatgaagtgggtggagatgacctcgcactgggagaaaaccatgtcccggcggtacaagaaggtaaagatgcagtgccggaaaggcatcccgtctgccctgcgcgcccgatgctggcccctgttgtgtggggcccatgtgtgccagaagaacagccctggcacctatcaggagctggcagaggcccctggagacccacagtggatggagaccattggcagggacctgcaccgtcaattccctctgcacgagatgtttgtgtcgcctcagggccacgggcagcaggggctcctgcaggtgctcaaggcctacaccctgtatcgaccggagcagggctactgccaggcccaggggcccgtggctgctgtgctgctcatgcacctgcccccagaggaggccttctggtgcctggtgcagatctgtgaggtctacctccctgggtactacgggccccacatggaggctgtgcggctggacgccgaggtgttcatggccctgctgcggcggctgcttccgcacgtgcacaagcacctgcagcaggtgggcgtcggacccctgctgtacctgcccgagtggttcctgtgcctcttcgcccgctccctgcccttccccacagtgctgcgtgtctgggatgccttcctcagtgagggtgccagagtactgttccgtgtggggctgacactggtgcgcctggcgctgggcactgcagagcagcgaggggcctgccctggcctcctggagacactgggagcccttcgagccatcccccccgcgcagctgcaggaggaggccttcatgtcacaggtgcacagcgtggtgctgtcagagcgggacctgcagcgggagatcaaggcccagctggcccagctgcccgattccgcgccgggacccccgccccggccacaggtccgcctcgccggggcccaagccatctttgaggcccagcagctggcaggagtgcgacgaggcgccaagcctgaggtgcctcggattgtggtgcagcccccggaggagcccagaccaccgcggcggaaaccccagacccgcggcaagactttccatgggctcctgactcgggcccggggcccccccatcgaggggccccccaggccccaacgaggctccacctccttcctggacacccgcttctgagaggaccatggacttagtgtcccccagtctcaattgcctgatggctgatgccagcccggcaaataggcaccgcactttactcttgggactcggggacttggcttccttcctggcaaggaccaggcagtggggaaggaggaggtcctccgtggtacatactgggtcaggcactagcatggaggagggtcacagagtggggcacgtgaggacccatggaaccgtcctggtgcccaggccctcacaagtaccaaagccagcaccaaaggagtcagggaaggggatcctcaagagtcagctatcaccatgactgcgttgcaggcacat

SEQ ID NO: 65332 - DNA, 2284 bp, Homo sapiens
  misc_feature (2284)..(2284): n is a, c, g, or t
gaagtgagaggaggaggtgaggtgctgcgggaggtgagctgggctggtggggacaggggcagggcttggggctgggtctccggacagaggcctggcttttctgtcagggcagggcctagcccctgcccccataaaagaggagacatagggggcttggtgagataccctgaaacctcccccctctgaccccgcagccaggccccaggctggccgggagtggcccctcacactggttctccccactttctctgcctgtggcatcgaaggccccgggcaccatggcccaggccctgggggaggacctggtgcagcctcccgagctgcaggatgactccagctccttggggtccgactcagagctcagcgggcctggcccatatcgccaggccgaccgctatggattcattgggggcagctcagcagagccagggccgggccacccacctgcagacctcatccgccaacgggagatgaagtgggtggagatgacctcgcactgggagaaaaccatgtcccggcggtacaagaaggtaaagatgcagtgccggaaaggcatcccgtctgccctgcgcgcccgatgctggcccctgttgtgtggggcccatgtgtgccagaagaacagccctggcacctatcaggagctggcagaggcccctggagacccacagtggatggagaccattggcagggacctgcaccgtcaattccctctgcacgagatgtttgtgtcgcctcagggccacgggtacgaggccggtgatgcccagggacccccagccccacaagccccaggcagcaggggctcctgcaggtgctcaaggcctacaccctgtatcgaccggagcagggctactgccaggcccaggggcccgtggctgctgtgctgctcatgcacctgcccccagaggaggccttctggtgcctggtgcagatctgtgaggtctacctccctgggtactacgggccccacatggaggctgtgcggctggacgccgaggtgttcatggccctgctgcggcggctgcttccgcacgtgcacaagcacctgcagcaggtgggcgtcggacccctgctgtacctgcccgagtggttcctgtgcctcttcgcccgctccctgcccttccccacagtgctgcgtgtctgggatgccttcctcagtgagggtgccagagtactgttccgtgtggggctgacactggtgcgcctggcgctgggcactgcagagcagcgaggggcctgccctggcctcctggagacactgggagcccttcgagccatcccccccgcgcagctgcaggaggaggccttcatgtcacaggtgcacagcgtggtgctgtcagagcgggacctgcagcgggagatcaaggcccagctggcccagctgcccgattccgcgccgggacccccgccccggccacaggtccgcctcgccggggcccaagccatctttgaggcccagcagctggcaggagtgcgacgaggcgccaagcctgaggtgcctcggattgtggtgcagcccccggaggagcccagaccaccgcggcggaaaccccagacccgcggcaagactttccatgggctcctgactcgggcccggggcccccccatcgaggggccccccaggccccaacgaggctccacctccttcctggacacccgcttctgagaggaccatggacttagtgtcccccagtctcaattgcctgatggctgatgccagcccggcaaataggcaccgcactttactcttgggactcggggacttggcttccttcctggcaaggaccaggcagtggggaaggaggaggtcctccgtggtacatactgggtcaggcactagcatggaggagggtcacagagtggggcacgtgaggacccatggaaccgtcctggtgcccaggccctcacaagtaccaaagccagcaccaaaggagtcagggaaggggttggctgagtcaagggaccccagagggcaccaggaataaaatcttcttgaacagaaaaaaaaaaaaacaaacacaaaaaaaaaaagaagaaaagaccggggacctatataggggggcgagaagcgtgataatgagacaggaacatagttcttagagcattttgttaacaggttgagaaggggggaccacaggggagggtatatgacaggatgcggaagaaagagagagcgaggacgttgtgagtggtgttagagggagggtatcccaacgggagacagagagagagataatattcttatatatacagggtgaataagacgtagaacgatgggtgaagn

SEQ ID NO: 65333 - DNA, 816 bp, Homo sapiens
  misc_feature (816)..(816): n is a, c, g, or t
ggggagggcagagctgcaggagagtgggaggcatatggctgagggcaggtttgggtgcagaactgtggaggggcagggccggcctcccagtgaataagcccccggcctgcaggtgccagagtactgttccgtgtggggctgacactggtgcgcctggcgctgggcactgcagagcagcgaggggcctgccctggcctcctggagacactgggagcccttcgagccatcccccccgcgcagctgcaggaggaggccttcatgtcacaggtgcacagcgtggtgctgtcagagcgggacctgcagcgggagatcaaggaccaggcagtggggaaggaggaggtcctccgtggtacatactgggtcaggcactagcatggaggagggtcacagagtggggcacgtgaggacccatggaaccgtcctggtgcccaggccctcacaagtaccaaagccagcaccaaaggagtcagggaaggggttggctgagtcaagggaccccagagggcaccaggaataaaatcttcttgaacagaaaaaaaaaaaaacaaacacaaaaaaaaaaagaagaaaagaccggggacctatataggggggcgagaagcgtgataatgagacaggaacatagttcttagagcattttgttaacaggttgagaaggggggaccacaggggagggtatatgacaggatgcggaagaaagagagagcgaggacgttgtgagtggtgttagagggagggtatcccaacgggagacagagagagagataatattcttatatatacagggtgaataagacgtagaacgatgggtgaagn

SEQ ID NO: 65334 - DNA, 2237 bp, Homo sapiens
  misc_feature (2237)..(2237): n is a, c, g, or t
gaagtgagaggaggaggtgaggtgctgcgggaggtgagctgggctggtggggacaggggcagggcttggggctgggtctccggacagaggcctggcttttctgtcagggcagggcctagcccctgcccccataaaagaggagacatagggggcttggtgagataccctgaaacctcccccctctgaccccgcagccaggccccaggctggccgggagtggcccctcacactggttctccccactttctctgcctgtggcatcgaaggccccgggcaccatggcccaggccctgggggaggacctggtgcagcctcccgagctgcaggatgactccagctccttggggtccgactcagagctcagcgggcctggcccatatcgccaggccgaccgctatggattcattgggggcagctcagcagagccagggccgggccacccacctgcagacctcatccgccaacgggagatgaagtgggtggagatgacctcgcactgggagaaaaccatgtcccggcggtacaagaaggtaaagatgcagtgccggaaaggcatcccgtctgccctgcgcgcccgatgctggcccctgttgtgtggggcccatgtgtgccagaagaacagccctggcacctatcaggagctggcagaggcccctggagacccacagtggatggagaccattggcagggacctgcaccgtcaattccctctgcacgagatgtttgtgtcgcctcagggccacgggcagcaggggctcctgcaggtgctcaaggcctacaccctgtatcgaccggagcagggctactgccaggcccaggggcccgtggctgctgtgctgctcatgcacctgcccccagaggaggccttctggtgcctggtgcagatctgtgaggtctacctccctgggtactacgggccccacatggaggctgtgcggctggacgccgaggtgttcatggccctgctgcggcggctgcttccgcacgtgcacaagcacctgcagcaggtgggcgtcggacccctgctgtacctgcccgagtggttcctgtgcctcttcgcccgctccctgcccttccccacagtgctgcgtgtctgggatgccttcctcagtgagggtgccagagtactgttccgtgtggggctgacactggtgcgcctggcgctgggcactgcagagcagcgaggggcctgccctggcctcctggagacactgggagcccttcgagccatcccccccgcgcagctgcaggaggaggccttcatgtcacaggtgcacagcgtggtgctgtcagagcgggacctgcagcgggagatcaaggcccagctggcccagctgcccgattccgcgccgggacccccgccccggccacaggtccgcctcgccggggcccaagccatctttgaggcccagcagctggcaggagtgcgacgaggcgccaagcctgaggtgcctcggattgtggtgcagcccccggaggagcccagaccaccgcggcggaaaccccagacccgcggcaagactttccatgggctcctgactcgggcccggggcccccccatcgaggggccccccaggccccaacgaggctccacctccttcctggacacccgcttctgagaggaccatggacttagtgtcccccagtctcaattgcctgatggctgatgccagcccggcaaataggcaccgcactttactcttgggactcggggacttggcttccttcctggcaaggaccaggcagtggggaaggaggaggtcctccgtggtacatactgggtcaggcactagcatggaggagggtcacagagtggggcacgtgaggacccatggaaccgtcctggtgcccaggccctcacaagtaccaaagccagcaccaaaggagtcagggaaggggttggctgagtcaagggaccccagagggcaccaggaataaaatcttcttgaacagaaaaaaaaaaaaacaaacacaaaaaaaaaaagaagaaaagaccggggacctatataggggggcgagaagcgtgataatgagacaggaacatagttcttagagcattttgttaacaggttgagaaggggggaccacaggggagggtatatgacaggatgcggaagaaagagagagcgaggacgttgtgagtggtgttagagggagggtatcccaacgggagacagagagagagataatattcttatatatacagggtgaataagacgtagaacgatgggtgaagn

SEQ ID NO: 65335 - DNA, 2069 bp, Homo sapiens
  misc_feature (2069)..(2069): n is a, c, g, or t
ggaggaggaggaagtgagaggaggagccaggccccaggctggccgggagtggcccctcacactggttctccccactttctctgcctgtggcatcgaaggccccgggcaccatggcccaggccctgggggaggacctggtgcagcctcccgagctgcaggatgactccagctccttggggtccgactcagagctcagcgggcctggcccatatcgccaggccgaccgctatggattcattgggggcagctcagcagagccagggccgggccacccacctgcagacctcatccgccaacgggagatgaagtgggtggagatgacctcgcactgggagaaaaccatgtcccggcggtacaagaaggtaaagatgcagtgccggaaaggcatcccgtctgccctgcgcgcccgatgctggcccctgttgtgtggggcccatgtgtgccagaagaacagccctggcacctatcaggagctggcagaggcccctggagacccacagtggatggagaccattggcagggacctgcaccgtcaattccctctgcacgagatgtttgtgtcgcctcagggccacgggcagcaggggctcctgcaggtgctcaaggcctacaccctgtatcgaccggagcagggctactgccaggcccaggggcccgtggctgctgtgctgctcatgcacctgcccccagaggaggccttctggtgcctggtgcagatctgtgaggtctacctccctgggtactacgggccccacatggaggctgtgcggctggacgccgaggtgttcatggccctgctgcggcggctgcttccgcacgtgcacaagcacctgcagcaggtgggcgtcggacccctgctgtacctgcccgagtggttcctgtgcctcttcgcccgctccctgcccttccccacagtgctgcgtgtctgggatgccttcctcagtgagggtgccagagtactgttccgtgtggggctgacactggtgcgcctggcgctgggcactgcagagcagcgaggggcctgccctggcctcctggagacactgggagcccttcgagccatcccccccgcgcagctgcaggaggaggccttcatgtcacaggtgcacagcgtggtgctgtcagagcgggacctgcagcgggagatcaaggcccagctggcccagctgcccgattccgcgccgggacccccgccccggccacaggtccgcctcgccggggcccaagccatctttgaggcccagcagctggcaggagtgcgacgaggcgccaagcctgaggtgcctcggattgtggtgcagcccccggaggagcccagaccaccgcggcggaaaccccagacccgcggcaagactttccatgggctcctgactcgggcccggggcccccccatcgaggggccccccaggccccaacgaggctccacctccttcctggacacccgcttctgagaggaccatggacttagtgtcccccagtctcaattgcctgatggctgatgccagcccggcaaataggcaccgcactttactcttgggactcggggacttggcttccttcctggcaaggaccaggcagtggggaaggaggaggtcctccgtggtacatactgggtcaggcactagcatggaggagggtcacagagtggggcacgtgaggacccatggaaccgtcctggtgcccaggccctcacaagtaccaaagccagcaccaaaggagtcagggaaggggttggctgagtcaagggaccccagagggcaccaggaataaaatcttcttgaacagaaaaaaaaaaaaacaaacacaaaaaaaaaaagaagaaaagaccggggacctatataggggggcgagaagcgtgataatgagacaggaacatagttcttagagcattttgttaacaggttgagaaggggggaccacaggggagggtatatgacaggatgcggaagaaagagagagcgaggacgttgtgagtggtgttagagggagggtatcccaacgggagacagagagagagataatattcttatatatacagggtgaataagacgtagaacgatgggtgaagn

SEQ ID NO: 65336 - DNA, 2004 bp, Homo sapiens
  misc_feature (2004)..(2004): n is a, c, g, or t
gaagtgagaggaggaggtgaggtgctgcgggaggccccgggcaccatggcccaggccctgggggaggacctggtgcagcctcccgagctgcaggatgactccagctccttggggtccgactcagagctcagcgggcctggcccatatcgccaggccgaccgctatggattcattgggggcagctcagcagagccagggccgggccacccacctgcagacctcatccgccaacgggagatgaagtgggtggagatgacctcgcactgggagaaaaccatgtcccggcggtacaagaaggtaaagatgcagtgccggaaaggcatcccgtctgccctgcgcgcccgatgctggcccctgttgtgtggggcccatgtgtgccagaagaacagccctggcacctatcaggagctggcagaggcccctggagacccacagtggatggagaccattggcagggacctgcaccgtcaattccctctgcacgagatgtttgtgtcgcctcagggccacgggcagcaggggctcctgcaggtgctcaaggcctacaccctgtatcgaccggagcagggctactgccaggcccaggggcccgtggctgctgtgctgctcatgcacctgcccccagaggaggccttctggtgcctggtgcagatctgtgaggtctacctccctgggtactacgggccccacatggaggctgtgcggctggacgccgaggtgttcatggccctgctgcggcggctgcttccgcacgtgcacaagcacctgcagcaggtgggcgtcggacccctgctgtacctgcccgagtggttcctgtgcctcttcgcccgctccctgcccttccccacagtgctgcgtgtctgggatgccttcctcagtgagggtgccagagtactgttccgtgtggggctgacactggtgcgcctggcgctgggcactgcagagcagcgaggggcctgccctggcctcctggagacactgggagcccttcgagccatcccccccgcgcagctgcaggaggaggccttcatgtcacaggtgcacagcgtggtgctgtcagagcgggacctgcagcgggagatcaaggcccagctggcccagctgcccgattccgcgccgggacccccgccccggccacaggtccgcctcgccggggcccaagccatctttgaggcccagcagctggcaggagtgcgacgaggcgccaagcctgaggtgcctcggattgtggtgcagcccccggaggagcccagaccaccgcggcggaaaccccagacccgcggcaagactttccatgggctcctgactcgggcccggggcccccccatcgaggggccccccaggccccaacgaggctccacctccttcctggacacccgcttctgagaggaccatggacttagtgtcccccagtctcaattgcctgatggctgatgccagcccggcaaataggcaccgcactttactcttgggactcggggacttggcttccttcctggcaaggaccaggcagtggggaaggaggaggtcctccgtggtacatactgggtcaggcactagcatggaggagggtcacagagtggggcacgtgaggacccatggaaccgtcctggtgcccaggccctcacaagtaccaaagccagcaccaaaggagtcagggaaggggttggctgagtcaagggaccccagagggcaccaggaataaaatcttcttgaacagaaaaaaaaaaaaacaaacacaaaaaaaaaaagaagaaaagaccggggacctatataggggggcgagaagcgtgataatgagacaggaacatagttcttagagcattttgttaacaggttgagaaggggggaccacaggggagggtatatgacaggatgcggaagaaagagagagcgaggacgttgtgagtggtgttagagggagggtatcccaacgggagacagagagagagataatattcttatatatacagggtgaataagacgtagaacgatgggtgaagn

SEQ ID NO: 65337 - DNA, 1807 bp, Homo sapiens
  misc_feature (1807)..(1807): n is a, c, g, or t
ggaggaggaggaagtgagaggaggaggccccgggcaccatggcccaggccctgggggaggacctggtgcagcctcccgagctgcaggatgactccagctccttggggtccgactcagagctcagcgggcctggcccatatcgccaggccgaccgctatggattcattgggggcagctcagcagagccagggccgggccacccacctgcagacctcatccgccaacgggagatgaagtgggtggagatgacctcgcactgggagaaaaccatgtcccggcggtacaagaaggtaaagatgcagtgccggaaaggcatcccgtctgccctgcgcgcccgatgctggcccctgttgtgtggggcccatgtgtgccagaagaacagccctggcacctatcaggagctggcagaggcccctggagacccacagtggatggagaccattggcagggacctgcaccgtcaattccctctgcacgagatgtttgtgtcgcctcagggccacgggcagcaggggctcctgcaggtgctcaaggcctacaccctgtatcgaccggagcagggctactgccaggcccaggggcccgtggctgctgtgctgctcatgcacctgcccccagaggaggccttctggtgcctggtgcagatctgtgaggtctacctccctgggtactacgggccccacatggtgccagagtactgttccgtgtggggctgacactggtgcgcctggcgctgggcactgcagagcagcgaggggcctgccctggcctcctggagacactgggagcccttcgagccatcccccccgcgcagctgcaggaggaggccttcatgtcacaggtgcacagcgtggtgctgtcagagcgggacctgcagcgggagatcaaggcccagctggcccagctgcccgattccgcgccgggacccccgccccggccacaggtccgcctcgccggggcccaagccatctttgaggcccagcagctggcaggagtgcgacgaggcgccaagcctgaggtgcctcggattgtggtgcagcccccggaggagcccagaccaccgcggcggaaaccccagacccgcggcaagactttccatgggctcctgactcgggcccggggcccccccatcgaggggccccccaggccccaacgaggctccacctccttcctggacacccgcttctgagaggaccatggacttagtgtcccccagtctcaattgcctgatggctgatgccagcccggcaaataggcaccgcactttactcttgggactcggggacttggcttccttcctggcaaggaccaggcagtggggaaggaggaggtcctccgtggtacatactgggtcaggcactagcatggaggagggtcacagagtggggcacgtgaggacccatggaaccgtcctggtgcccaggccctcacaagtaccaaagccagcaccaaaggagtcagggaaggggttggctgagtcaagggaccccagagggcaccaggaataaaatcttcttgaacagaaaaaaaaaaaaacaaacacaaaaaaaaaaagaagaaaagaccggggacctatataggggggcgagaagcgtgataatgagacaggaacatagttcttagagcattttgttaacaggttgagaaggggggaccacaggggagggtatatgacaggatgcggaagaaagagagagcgaggacgttgtgagtggtgttagagggagggtatcccaacgggagacagagagagagataatattcttatatatacagggtgaataagacgtagaacgatgggtgaagn

SEQ ID NO: 65338 - DNA, 2872 bp, Homo sapiens
ctctggttatctcgggtttatgagaacggctggcattcacgtgtctaatttttaaatgatagatgaattaattattatttgatacttgccgtgttggtaggccaaaaggtgggcttctgaaacttagagggtgacagggatggagacccctggtatggggcttagatgaagcaagaggccaggcccggaacagaactcagctcagcagtcagtcacaaggctgcagagtgacaggcgtttggggaaaggtaggaaccgctctccgccacctgccggtcagtagccctacccacaatcaggccgcggctgcctcggcctggtcccaaaaattgtgaacgccgccctctcctcccgcccagtcctccgccgcgcccgcggggtcgggggctgcgctgccggcgccgcgagccgggcgagcttcccagcacgggaggagggagggggcggcgccgggcggggcggagcttccgcgcctcctggagccttattcccggccgcgagccgggcagcgctcattcggccgaaggagctacgcgggccacgctgctggctggcctgacctaggcgcgcggggtcgggcggccgcgcgggcgggctgagtgagcaagacaagacactcaagaagagcgagctgcgcctgggtcccggccaggcttgcacgcagaggcgggcggcagacggtgcccggcggaatctcctgagctccgccgcccagctctggtgccagcgcccagtggccgccgcttcgaaagtgactggtgcctcgccgcctcctctcggtgcgggaccatgaagctgctgccgtcggtggtgctgaagctctttctggctgcagttctctcggcactggtgactggcgagagcctggagcggcttcggagagggctagctgctggaaccagcaacccggaccctcccactgtatccacggaccagctgctacccctaggaggcggccgggaccggaaagtccgtgacttgcaagaggcagatctggaccttttgagagtcactttatcctccaagccacaagcactggccacaccaaacaaggaggagcacgggaaaagaaagaagaaaggcaaggggctagggaagaagagggacccatgtcttcggaaatacaaggacttctgcatccatggagaatgcaaatatgtgaaggagctccgggctccctcctgcatctgccacccgggttaccatggagagaggtgtcatgggctgagcctcccagtggaaaatcgcttatatacctatgaccacacaaccatcctggccgtggtggctgtggtgctgtcatctgtctgtctgctggtcatcgtggggcttctcatgtttaggtaccataggagaggaggttatgatgtggaaaatgaagagaaagtgaagttgggcatgactaattcccactgagagagacttgtgctcaaggaatcggctggggactgctacctctgagaagacacaaggtgatttcagactgcagaggggaaagacttccatctagtcacaaagactccttcgtccccagttgccgtctaggattgggcctcccataattgctttgccaaaataccagagccttcaagtgccaaacagagtatgtccgatggtatctgggtaagaagaaagcaaaagcaagggaccttcatgcccttctgattcccctccaccaaaccccacttcccctcataagtttgtttaaacacttatcttctggattagaatgccggttaaattccatatgctccaggatctttgactgaaaaaaaaaaagaagaagaagaaggagagcaagaaggaaagatttgtgaactggaagaaagcaacaaagattgagaagccatgtactcaagtaccaccaagggatctgccattgggaccctccagtgctggatttgatgagttaactgtgaaataccacaagcctgagaactgaattttgggacttctacccagatggaaaaataacaactatttttgttgttgttgtttgtaaatgcctcttaaattatatatttattttattctatgtatgttaatttatttagtttttaacaatctaacaataatatttcaagtgcctagactgttactttggcaatttcctggccctccactcctcatccccacaatctggcttagtgccacccacctttgccacaaagctaggatggttctgtgacccatctgtagtaatttattgtctgtctacatttctgcagatcttccgtggtcagagtgccactgcgggagctctgtatggtcaggatgtaggggttaacttggtcagagccactctatgagttggacttcagtcttgcctaggcgattttgtctaccatttgtgttttgaaagcccaaggtgctgatgtcaaagtgtaacagatatcagtgtctccccgtgtcctctccctgccaagtctcagaagaggttgggcttccatgcctgtagctttcctggtccctcacccccatggccccaggcccacagcgtgggaactcactttcccttgtgtcaagacatttctctaactcctgccattcttctggtgctactccatgcaggggtcagtgcagcagaggacagtctggagaaggtattagcaaagcaaaaggctgagaaggaacagggaacattggagctgactgttcttggtaactgattacctgccaattgctaccgagaaggttggaggtggggaaggctttgtataatcccacccacctcaccaaaacgatgaaggtatgctgtcatggtcctttctggaagtttctggtgccatttctgaactgttacaacttgtatttccaaacctggttcatatttatactttgcaatccaaataaagataacccttattccata

SEQ ID NO: 65339 - DNA, 1911 bp, Homo sapiens
attacaggcatgagccaccgtgcctagctctatgcctgttttcaagcagtgtaactcatctgtcatgagacctggaacaagttactgtctttctgaggattgtaaccttgtagtgattgtaatgtttgtccatctacctcataaggatgttgtgaggatcacgtaaatgaggtgaaagctatttgtaaattgcatcctgctattagagacaggagttcctcggggcagttgggcctttgaccagagtttgggctgccctactgcctgggcttttccaagtagtagaggaaaccaccatggcagagttctttggaaggacctgctctggacctgcactttgtcatagcaggcagggcttattcacaaaacttatcttcctcaggtaccataggagaggaggttatgatgtggaaaatgaagagaaagtgaagttgggcatgactaattcccactgagagagacttgtgctcaaggaatcggctggggactgctacctctgagaagacacaaggtgatttcagactgcagaggggaaagacttccatctagtcacaaagactccttcgtccccagttgccgtctaggattgggcctcccataattgctttgccaaaataccagagccttcaagtgccaaacagagtatgtccgatggtatctgggtaagaagaaagcaaaagcaagggaccttcatgcccttctgattcccctccaccaaaccccacttcccctcataagtttgtttaaacacttatcttctggattagaatgccggttaaattccatatgctccaggatctttgactgaaaaaaaaaaagaagaagaagaaggagagcaagaaggaaagatttgtgaactggaagaaagcaacaaagattgagaagccatgtactcaagtaccaccaagggatctgccattgggaccctccagtgctggatttgatgagttaactgtgaaataccacaagcctgagaactgaattttgggacttctacccagatggaaaaataacaactatttttgttgttgttgtttgtaaatgcctcttaaattatatatttattttattctatgtatgttaatttatttagtttttaacaatctaacaataatatttcaagtgcctagactgttactttggcaatttcctggccctccactcctcatccccacaatctggcttagtgccacccacctttgccacaaagctaggatggttctgtgacccatctgtagtaatttattgtctgtctacatttctgcagatcttccgtggtcagagtgccactgcgggagctctgtatggtcaggatgtaggggttaacttggtcagagccactctatgagttggacttcagtcttgcctaggcgattttgtctaccatttgtgttttgaaagcccaaggtgctgatgtcaaagtgtaacagatatcagtgtctccccgtgtcctctccctgccaagtctcagaagaggttgggcttccatgcctgtagctttcctggtccctcacccccatggccccaggcccacagcgtgggaactcactttcccttgtgtcaagacatttctctaactcctgccattcttctggtgctactccatgcaggggtcagtgcagcagaggacagtctggagaaggtattagcaaagcaaaaggctgagaaggaacagggaacattggagctgactgttcttggtaactgattacctgccaattgctaccgagaaggttggaggtggggaaggctttgtataatcccacccacctcaccaaaacgatgaaggtatgctgtcatggtcctttctggaagtttctggtgccatttctgaactgttacaacttgtatttccaaacctggttcatatttatactttgcaatccaaataaagataacccttattccata

SEQ ID NO: 65340 - DNA, 378 bp, Homo sapiens
ataatgataataatgtatttctttggtcaactcagcagattaggatactataagatgtgtaatttctataagatttgtaattatagaaagaatccccagttctttgctggaattttgggaaatgctcaaagagagcagtttagttttatgtcatatagcatcgaattctaaaaggtaagctagacgtctttgcattcaaaaagataattatgaagattttcatatgcacgtgggttgtttgcagctcattagaaattttgcaaaacaataatgatatatacatttaaaataggtttatgtgtactttacatagtgacactgtagaaaaaaacttgttcttcagctgctcgtatatgaatttatcgtccatagtctcct

SEQ ID NO: 65341 - DNA, 399 bp, Homo sapiens
ggcatggtggcatgcacctgtggtcccagctactcaggaggctgaggtgggaggatctcttgagtccaggagattgaggctgtagtgagccgtgttcacaccactgcacttcagtccaagtgacaaagtgagaccctgtctcaaaaacaagaatgtaatgtcgtgtgctaactaggagaccaatactgaaagaaagggtcttggtcctacgtacaagagatgtctgtttaaatgttcttggttaaaataagatgtttaaagtgttaagatggccgttagtgctatttgccatatatttctagctccacacttggccagcatttgaccccatttagcttgagtgcggccatgtgattaattttggccagtaaggtgtgaggccatgtgattacatctggc

SEQ ID NO: 65342 - DNA, 492 bp, Homo sapiens
gacactatttctcaccattttgtggaaatggcctggggaacaaagactgaaatgggccttgagcccacctgctaccttgcagagaaccatctcgagccccgtagatctttttaggacctccacaggctatttcccaccccccagccaaaaatagctcagaatctgcccatccagggctgtattaatgatttatgtaaaggcagatggtttatttctactttgtaaaagggaaaagttgaggttctggaaggataaatgatttgctcatgagacaaaatcaaggttagaagttacatggaattgtaggaccagagccatatcattagatcagctttctgaagaatattctcaaaaaaagaaagtctccttggccagataactaagaggaatgtttcattgtatatcttttttcttggagatttatattaacatattaagtgctctgagaagtcctgtgtattatctcttgctgcataataaattatccccaaa

SEQ ID NO: 65343 - DNA, 485 bp, Homo sapiens
aatgtggaagaagtgacgtactgggacagccgacggttggtcgtcagagcccttgaatctcctcattcggagctcctgaaaactttctacaagtcagtgccttgtaagaaatcctacaaccctgatgccaccatgctgtgagaaagcccaggctacctgagggaagagggcctggaaaataaggcaccaaatggagcgtgaaggacaaggagcaccgaggttccagatatgtgagtgaagacgccatcttggaagtggatcctgttgccctagtggaccccaagtgaatcaaacagaaattacccactgagcccttcctgaattcctgtcccacaaaaccatgcgcaaaataaaatggctgttttaagccaccaaatgttgagacagctcgttacccatcaatagataagagaaattgccatttttgtaccactttcataattttgctatatgaatgtattattaaaagtttcttcctttaaatt

SEQ ID NO: 65344 - DNA, 491 bp, Homo sapiens
tgagtcagagtctcactcttgtcgcccaggctggagtgcagtggtgcaatctcggctcactgcaacctccacctcccaggttcaagagattcccctgccttagcttctccagtagctgggattacaggcgtgcatcaccatgcccggataaatttgtatttttagtagagacagggttcctccatgttggccaggttggtcttgaactcctgacctcaagtgatccatccgcctcggcctcccaaagtgctgggattacaggcgtgagccactgcaccctgcctatactacattatttaacaaaaaaggatcaattggtgagaaaatgaaagctctacaagggaaagcatattacctgttttattcattgagtattcttagcacacagaagagctttcgagtgaattaatgctattatatatcctacattttaaaacctatttattttaaaataagtttgggtcgacgcggccgcgaatttagtagtagta

SEQ ID NO: 65345 - DNA, 469 bp, Homo sapiens
tgcaacaccccctcgacaccactctcaccaggcccagatccagtgaaacatagtctaactgcctgacaattcagtcacaaattcacaggactaaatagcaagcgtgctcaagttttgctctgttatttgcatctaaaaggatgggtgggttaggttaagtgatcttaaaattgtgtagtcccagctacttgagaggctgaggtgggaggattgcttgagcctgggaggtcaaggctgcagtaagccacgatccggccagtgctccccagcctgaatgacaatgagaccctgtctcaaaaaaaaataaaaagatctcttgcggccctcagacgcagtagaaaaatcctcttgttacgttggtaccagcggccctttggattagggtggggcgctccaagacttactcattcagagggtctgtttttcttgaataacttaacttgtatccgtgcattaagataagttatgc

SEQ ID NO: 65346 - DNA, 876 bp, Homo sapiens
tcgacccacgcgtccgggcccctggacacctctgtcaccatgtggttcctggttctgtgcctcgccctgtccctgggggggactggtgctgcgcccccgattcagtcccggattgtgggaggctgggagtgtgagcagcattcccagccctggcaggcggctctgtaccatttcagcactttccagtgtgggggcatcctggtgcaccgccagtgggtgctcacagctgctcattgcatcagcgacaattaccagctctggctgggtcgccacaacttgtttgacgacgaaaacacagcccagtttgttcatgtcagtgagagcttcccacaccctggcttcaacatgagcctcctggagaaccacacccgccaagcagacgaggactacagccacgacctcatgctgctccgcctgacagagcctgctgataccatcacagacgctgtgaaggtcgtggagttgcccacccaggaacccgaagtggggagcacctgtttggcttccggctggggcagcatcgaaccagagaatttctcatttccagatgatctccagtgtgtggacctcaaaatcctgcctaatgatgagtgcaaaaaagcccacgtccagaaggtgacagacttcatgctgtgtgtcggacacctggaaggtggcaaagacacctgtgtgggtgattcagggggcccgctgatgtgtgatggtgtgctccaaggtgtcacatcatggggctacgtcccttgtggcacccccaataagccttctgtcgccgtcagagtgctgtcttatgtgaagtggatcgaggacaccatagcggagaactcctgaacgcccagccctgtcccctacccccagtaaaatcaaatgtgcatccaa

SEQ ID NO: 65347 - DNA, 1057 bp, Homo sapiens
agttctcactctgacgtcccgcgtcctttttcatttgtctgcttctcgctcccttccgtgttctgttccctcttcctccctcttccctgggcctgtttctcgctgtccctgtcttttatccttctcatctgcctcttttttgctcaccctgtttctcactgccctcccctccgcctttctcacccctctgtccttttgagctcttttttgctctgtctcttcatttgccttttgcactctcaaactctttcatcttcccattcgctgtctgtatttctccataactatatctttcttcctctgtctccgcccacccacatttttctctttccctttctctctttggggaccctcccccatgctcccctgccccatccccttttccccttcccgtcttctcatccctccattcccatctttccccagcaattaccagctctggctgggtcgccacaacttgtttgacgacgaaaacacagcccagtttgttcatgtcagtgagagcttcccacaccctggcttcaacatgagcctcctggagaaccacacccgccaagcagacgaggactacagccacgacctcatgctgctccgcctgacagagcctgctgataccatcacagacgctgtgaaggtcgtggagttgcccacccaggaacccgaagtggggagcacctgtttggcttccggctggggcagcatcgaaccagagaatttctcatttccagatgatctccagtgtgtggacctcaaaatcctgcctaatgatgagtgcaaaaaagcccacgtccagaaggtgacagacttcatgctgtgtgtcggacacctggaaggtggcaaagacacctgtgtgggtgattcagggggcccgctgatgtgtgatggtgtgctccaaggtgtcacatcatggggctacgtcccttgtggcacccccaataagccttctgtcgccgtcagagtgctgtcttatgtgaagtggatcgaggacaccatagcggagaactcctgaacgcccagccctgtcccctacccccagtaaaatcaaatgtgcatccaa

SEQ ID NO: 65348 - DNA, 380 bp, Homo sapiens
cctgccccatccccttttccccttcccgtcttctcatccctccattcccatctttccccagcaattaccagctctggctgggtcgccacaacttgtttgacgacgaaaacacagcccagtttgttcatgtcagtgagagcttcccacaccctggcttcaacatgagcctcctggagaaccacacccgccaagcagacgaggactacagccacgacctcatgctgctccgcctgacagagcctgctgataccatcacagacgctgtgaaggtcgtggagttgcccacccaggaacccgaagtggggagcacctgtttggcttccggctggggcagcatcgaaccagagaattgtatgtgggggcagactgtgtagcccaag

SEQ ID NO: 65349 - DNA, 903 bp, Homo sapiens
tcgacccacgcgtccgggcccctggacacctctgtcaccatgtggttcctggttctgtgcctcgccctgtccctgggggggactggtgctgcgcccccgattcagtcccggattgtgggaggctgggagtgtgagcagcattcccagccctggcaggcggctctgtaccatttcagcactttccagtgtgggggcatcctggtgcaccgccagtgggtgctcacagctgctcattgcatcagcgacaattaccagctctggctgggtcgccacaacttgtttgacgacgaaaacacagcccagtttgttcatgtcagtgagagcttcccacaccctggcttcaacatgagcctcctggagaaccacacccgccaagcagacgaggactacagccacgacctcatgctgctccgcctgacagagcctgctgataccatcacagacgctgtgaaggtcgtggagttgcccacccaggaacccgaagtggggagcacctgtttggcttccggctggggcagcatcgaaccagagaatttctcatttccagatgatctccagtgtgtggacctcaaaatcctgcctaatgatgagtgcaaaaaagcccacgtccagaaggtgacagacttcatgctgtgtgtcggacacctggaaggtggcaaagacacctgtgtgggtgattcagggggcccgctgatgtgtgatggtgtgctccaaggtgtcacatcatggggctacgtcccttgtggcacccccaataagccttctgtcgccgtcagagtgctgtcttatgtgaagtggatcgaggacaccatagcggagaactcctgaacgcccagccctgtcccctacccccagtaaaatcaaatgtgcatccaaaaaagaatttaaataaacttcaggggg

SEQ ID NO: 65350 - DNA, 991 bp, Homo sapiens
agttctcactctgacgtcccgcgtcctttttcatttgtctgcttctcgctcccttccgtgttctgttccctcttcctccctcttccctgggcctgtttctcgctgtccctgtcttttatccttctcatctgcctcttttttgctcaccctgtttctcactgccctcccctccgcctttctcacccctctgtccttttgagctcttttttgctctgtctcttcatttgccttttgcactctcaaactctttcatcttcccattcgctgtctgtatttctccataactatatctttcttcctctgtctccgcccacccacatttttctctttccctttctctctttggggaccctcccccatgctcccctgccccatccccttttccccttcccgtcttctcatccctccattcccatctttccccagcaattaccagctctggctgggtcgccacaacttgtttgacgacgaaaacacagcccagtttgttcatgtcagtgagagcttcccacaccctggcttcaacatgagcctcctggagaaccacacccgccaagcagacgaggactacagccacgacctcatgctgctccgcctgacagagcctgctgataccatcacagacgctgtgaaggtcgtggagttgcccacccaggaacccgaagtggggagcacctgtttggcttccggctggggcagcatcgaaccagagaatttttcattttttgaaacaagggcgtggatccctcaaccaagaagaatgtttatgtcttcaagtgacctgtactgcttggggactattggagaaaataaggtggagtcctacttgtttaaaaaatatgtatctaagaatgttctagggcactctgggaacctataaaggcaggtatttcgggccctcctcttcaggaatcttcctgaagacatggcccagtcgaaggcccaggatggcttttgctgcggccccagtaaaatcaaatgtgcatccaaa

SEQ ID NO: 65351 - DNA, 365 bp, Homo sapiens
ttagaagtccagcccagtcttcaatagacagatcttcatgttaaaagcttcaccggcattgagagtcaaaatcagcctcttctaagttgtagtctttagtcttacctctaccctccgaagccacccagaaacatttctgctcctcctccacgtgaagtccttccaacaggtgataactgatgatgtttcccatgcctttaccggacgaagcatccccattctgcctaaagcatggttctaaaacctttcatccacttggagatctttctctggatgcatttccatttgtcaattaatgtttaattctcttactgtaattttcttaattttcaatacaagtatttccttctctactgaaaaaaaaa

SEQ ID NO: 65352 - DNA, 4594 bp, Homo sapiens
ggttcgcttcggcgtccgccgtctccgcagctgcctcctcttcctccttcgccaccgccgccaccgccgccgccgcccgcagcaccgcagcccctcccgccatggccgccgccggcgcccggctcagccccggccccggctcggggctccgggggcggccgaggctctgcttccacccggggccgccgccactgctgccgctgctgctgctgttcctgctcctgctgccgccgccgccgctgctggccggcgccaccgccgctgcctcgcgggagcccgacagcccgtgccggctgaagaccgtcacggtgtccacactgcccgccctgcgggagagcgacatcggctggagcggcgcccgcgccggggccggggctgggaccggggccggagccgccgccgccgccgcgtccccgggctctcctggctctgccggcaccgccgccgagtcgcgcctcctgctctttgtgcgtaacgagctgccggggcgcatcgcggtgcaggacgacctggacaacaccgagctgcccttcttcaccctggagatgtctggcacagcggcggacatctcgctggtgcactggagacagcagtggctggagaatggcaccttgtacttccacgtctccatgagcagctccgggcagctggcccaagccaccgcccccactctccaggagccctcggagattgttgaggagcagatgcacatcctccacatttctgtgatgggtggcctcatcgcgctgctgctgctgctgctggtgttcaccgtggcgctgtacgcccagcgacgttggcagaagcgtcgccgcatcccccagaagagcgcaagcacagaagccactcatgagatccactacatcccatctgtgctgctgggtccccaggcgcgggagagcttccgttcatcccggctgcaaacccacaattccgtcattggcgtgcccatccgggagactcccatcctggatgactatgactgtgaggaggatgaggagccacctaggcgggccaaccatgtctcccgcgaggacgagtttggcagccaggtgacccacactctggacagtctgggacatccaggggaagagaaggtggactttgagaagaaaggaggaatcagctttgggagagccaaggggacgtcgggctcagaggcagacgatgaaactcagctgacattctacacggagcagtaccgcagtcgccgccgcagcaaaggtttgctgaaaagcccagtgaacaagacagccctgacactgattgctgtgagttcctgcatcctggccatggtgtgtggcagccagatgtcttgtccactcactgtgaaggtgactctgcatgtgcccgagcacttcatagcagatggaagcagcttcgtggtgagtgaagggagctacctggacatctccgactggttaaacccggccaagctttccctgtattaccagatcaatgccacctccccatgggtgagggacctctgtggacaaaggacgacagatgcctgtgagcagctctgcgacccagaaaccggagagtgcagctgtcatgaaggctatgcccctgaccctgttcacagacacctgtgtgtgcgcagtgactggggacagagtgaaggaccttggccctacacgacacttgagaggggctatgatctggtgacaggggagcaagcccctgaaaagattctcaggtctactttcagcttgggccaaggcctctggcttcctgtcagcaaaagctttgtggttccgcctgtggagctgtccatcaaccccctggccagctgcaagaccgatgtgctcgtcacggaagaccctgcagatgtcagggaagaagcgatgctgtccacatactttgaaaccatcaatgacctgctgtcttccttcgggccagttcgtgactgctctcggaacaatgggggctgcactcgcaacttcaagtgtgtgtctgaccggcaggtggattcctcgggatgtgtgtgccctgaggagctgaaacccatgaaggatggctctggctgctacgaccactccaaaggcattgactgctctgatggctttaatggcggctgtgagcagctgtgcctgcagcagacgctgcccctgccctacgatgccacttcgagcaccatcttcatgttctgcggttgcgtggaggagtacaaactggctcctgatggaaaatcctgcttaatgctctcagatgtctgcgagggccccaagtgcctcaaacctgactccaaattcaatgataccctctttggagagatgctacatggttacaacaaccggacccagcatgtgaaccaaggccaagtcttccagatgacctttagggagaacaacttcatcaaggactttccccagctggccgatgggctgttggtgatcccgctgccggtggaggagcagtgccggggggtcctctccgagccccttccggacctccaactgctcactggagatatcaggtatgatgaggccatgggttaccccatggtgcagcagtggcgggtccggagcaacctctaccgtgtgaagctcagcaccatcaccctcgcagcaggcttcactaatgttctcaagatcctgaccaaggagagcagtcgggaggagctgctgtccttcatccagcactatggctcccactacatcgcagaggccctctatggctcagagctcacctgcatcatccactttcccagcaagaaggtccagcagcagctgtggctccagtatcagaaagagaccacagagctgggcagcaagaaggagctcaagtccatgcccttcatcacctacctctcaggtttgctgacagcccagatgctgtcagatgaccagctcatttcaggtgtggagattcgctgtgaggagaaggggcgctgtccatctacctgtcacctttgccgccggccaggcaaggagcagctgagccccacaccagtgctgctggaaatcaaccgtgtggtgccactttataccctcatccaagacaatggcacaaaggaggccttcaagagtgcactgatgagttcctactggtgctcagggaaaggggatgtgatcgatgactggtgcaggtgtgacctcagcgcctttgatgccaatgggctccccaactgcagcccccttctgcagccggtgctgcggctgtccccaacagtggagccctccagtactgtggtctccttggagtgggtggatgttcagccagctattgggaccaaggtctccgactatattctgcagcataagaaagtggatgaatacacagacactgacctgtacacaggagaattcctgagttttgctgatgacttactctctggcctgggcacatcttgtgtagcagctggtcgaagccatggagaggtccctgaagtcagtatctactcagtcatcttcaagtgtctggagcccgacggtctctacaagttcactctgtatgctgtggatacacgagggaggcactcagagctaagcacggtgaccctgaggacggcctgtccactggtagatgacaacaaggcagaagaaatagctgacaagatctacaatctgtacaatgggtacacaagtggaaaggagcagcagatggcctacaacacactgatggaggtctcagcctcgatgctgttccgagtccagcaccactacaactctcactatgaaaagtttggcgacttcgtctggagaagtgaggatgagctggggcccaggaaggcccacctgattctacggcgactggagagggtgagtagccactgctccagcctcctgcggagtgcctacatccagagccgcgtggaaacagtgccctatcttttctgccgcagcgaggaggtccggcctgcaggcatggtgtggtatagcatcctcaaggacaccaaaatcacgtgtgaggagaagatggtgtcaatggcccgaaacacgtacggggagtccaagggccggtgagggagggtattgccctccgtgagcacagagactctccatgggagggggagcagtattctcctggatcctggggcctgggtgggctgggggacagctgaggatgggcctagcagatgaagcttgccagcaaggccaaagcaaacggtttctcctgtggatagtggacagagacctttgtaaccaatggaattattcatttttctctatcttttattttttcaaagatattatttgactctatcaaaagtctctcctttttaaaccttttcttatggatggctgtcaatcccgaggcagaagttttcaggtggagaccaagcggcctttgctcttcttccttcttcctgccacactctgctttcttcctgccatggacccctggaggagacctatggagggacagttttgacctgacccctagaggagacagttttgacctcttcagcaccaggaaggaagctctgaggatggttgcagtgaggaagcatgggtctttaaggacttctctctcttttttgctggacattattgagtttgtgggaccctgcctcttcctgctacctgtgggtctgcccagagtccctgcaggcctgtccatgcattaaaaattcctattgtctctcttt

SEQ ID NO: 65353 - DNA, 3476 bp, Homo sapiens
  misc_feature (1)..(1): n is a, c, g, or t
  misc_feature (1723)..(1723): n is a, c, g, or t
ngggcttgtcgtgcagctggccccaagcgcgcggggcaaggcggccctgcaggggtgagctttcctctgagaacccggggccttagcgacacgtaatccagttttccgtctccttggtgcagatgaagaaaccgacgcccatgggcgaaagggacctgctcaagttcactcaagaccacagagctgggcagcaagaaggagctcaagtccatgcccttcatcacctacctctcaggtttgctgacagcccagatgctgtcagatgaccagctcatttcaggtgtggagattcgctgtgaggagaaggggcgctgtccatctacctgtcacctttgccgccggccaggcaaggagcagctgagccccacaccagtgctgctggaaatcaaccgtgtggtgccactttataccctcatccaagacaatggcacaaaggaggccttcaagagtgcactgatgagttcctactggtgctcagggaaaggggatgtgatcgatgactggtgcaggtgtgacctcagcgcctttgatgccaatgggctccccaactgcagcccccttctgcagccggtgctgcggctgtccccaacagtggagccctccagtactgtggtctccttggagtgggtggatgttcagccagctattgggaccaaggtctccgactatattctgcagcataagaaagtggatgaatacacagacactgacctgtacacagtttattgctggattacatttattgatttgcggatattgaaccagccttgcatcccagggatgaagccaacttgattgtggtggataagctttttgatgtgctgctggatttggtttgccaatattttattgaagatttttgcatcgatgttcatcagggatattggtctaaaattctctttttttgttgtgtctctgccaggctttggtatcaggatgatgttggcctcataaaatgaattagggaggattccctctttttctattgatttgaatagtttcagaaggaatggtaccagctcatctttgtacctctggtagaattcggctgtgaatccatctggtcctggacttattttggttagtaggctattaattatggcctcaatttcagaacctgttattggtctattcagggattcaacttcttcctggtttagtcttgggaggaggctgtatgtgtccaggaatttatccatttcttctagattttctagtttatttgcatagaggtgtttatagtattctctaatggtagtttgtatttctgtgggatcggtggtgatatcccctttatcattttttattgcgtctatttgattcttctctcttttattctttatgagtcttgctagtagtctatcaattttgttgattttttcaaaaaaccagctcctggattcattgattttttgaagggtttttttttttttgtctctatctccttcagttctgctctcatcttagttatttcttgccttctgctagcttttgtgtgtttgctcttgcttctctagttcttttaattatgatgttagggtgtcagtttcagatctttcttgctttctcctgtgggcatttagtgctataaatctccctctacacactgctttaaatgtgtcccagagattctggtatgttgtgtcctgttctcattggtttcaaagaacatctttatttccgctttcatttcgttatgtacccagtagtcattcaggagcangttgttcagtttccatgtagttgagcggttttgagtgagtttcttaatcctgagttctagtttgattgcactgtgttctgagagacagtttgttataatttctttcttttacatttgctgaggagtgctttacttcccactgtgtgatcaattttggaataactgcgatgtggtgctgagaagaatgtatattctgttgattggggtggatagttctgtagatgtctattaggtccgcttggtgcagagctgagttcaattcctggatatccttgttaactttctgtctcattgatctatctaatgttgacagtggggtgttaaagtctcccattattattgtgtgggagtctaagtctctttgtaagtctctaaggacttgctttatgaatctgggtgctcctatattgggtgcatatatatttaggatagttagctcgaagaaggtatcttctatttctagtctgctgcaaaggctctgttttgtttccattggaaacagatgttgaattttctgtgtctattaaaatgattgtatagtttatctctctaaatttgttaatatgataagtcacattgatagattttcatattataaaacaacctactatgtgagatttatcccaggaatgtgtaggttgttttatctgtttgttttaattaggatcattctggtctcacaaaatgaattataaaatattttctccttttcagttttctgaagtgtatctgtcttctcagagaatcactgtggttaaaattgatagtatttttttcttaatcattttttagaattcaccagtgaaggcatctgggcttagaccttttcttgcaagaaggtttttaactactaatttagttatttaatagatatagatttacttagattatctgtttcttcttgagtgatctttggcagcttgtgtgttttaaggaacttgttcattccatgtaaattatcaaatttattggaaaaagttgtttatgacattccgttactattcttttgaaatctgttgagattatagtgatattagtctcatcttgatattggtaatgtgtgtctcctctgttttttttctagatcagtttggctagatagctatgacatttatttgtattttcaaagaatcaactttcggttttatctgtttttgcttattgtttcctatttcattgatttatcctctaatttttattataattttctttgtttggcttactttgagtttggttttctccgcattttaatttttgaaatggtagctgaggctattgatttgagacctttcttgtaatgtagtcattccctcttaactactgctttagtagtatctcaaagattgtgttatgttgcgttttcattttcattcagttcaaagtatttccaatttcacttttgttttcttctttgacttatgagttatttagaggcatgccacttcgttttcaaatatttgggagttttttcagaaatttttgttgttgatttttgattccgctatagtcagaaaatatgtttttatgactttaaacattttaaatttattgagactagtttttggtctagatggtctattgctgtattcagtgttcactttaaaataatgtgtatccacttatttatgggtattttataaatgcctgttagataaaatcggttaattatgttattcaagtcttctggagcctttctgattttctgtctatcaatatttgagagaggggtattaaaacctctgattatggactt

SEQ ID NO: 65354 - DNA, 2381 bp, Homo sapiens
  misc_feature (1)..(1): n is a, c, g, or t
ngggcttgtcgtgcagctggccccaagcgcgcggggcaaggcggccctgcaggggtgagctttcctctgagaacccggggccttagcgacacgtaatccagttttccgtctccttggtgcagatgaagaaaccgacgcccatgggcgaaagggacctgctcaagttcactcagtaagtcaggagataagccagaatgcgtatctgactccagtctcaatgtctaccccttcacaaaacggtagcctccagggtagtcctcagcaaagcgttggcaccttactgaatctgtttttccatctgagaaatgggccaacggaaaaatcaaacttccattctggggaagtcgagaaccgggactccctaggaagggcagtgctttggcctcatgttctgtgctctgacagagagctgcactagagacaagtttatccatgaacacattgctctgtaaaggaatgttttgcctactcagctgggaggccgacagcagaggcagacttggggagtacactctgcagcccctgtccctgcagactgaagagaccacagagctgggcagcaagaaggagctcaagtccatgcccttcatcacctacctctcaggtttgctgacagcccagatgctgtcagatgaccagctcatttcaggtgtggagattcgctgtgaggagaaggggcgctgtccatctacctgtcacctttgccgccggccaggcaaggagcagctgagccccacaccagtgctgctggaaatcaaccgtgtggtgccactttataccctcatccaagacaatggcacaaaggaggccttcaagagtgcactgatgagttcctactggtgctcagggaaaggggatgtgatcgatgactggtgcaggtgtgacctcagcgcctttgatgccaatgggctccccaactgcagcccccttctgcagccggtgctgcggctgtccccaacagtggagccctccagtactgtggtctccttggagtgggtggatgttcagccagctattgggaccaaggtctccgactatattctgcagcataagaaagtggatgaatacacagacactgacctgtacacaggagaattcctgagttttgctgatgacttactctctggcctgggcacatcttgtgtagcagctggtcgaagccatggagaggtccctgaagtcagtatctactcagtcatcttcaagtgtctggagcccgacggtctctacaagttcactctgtatgctgtggatacacgagggaggcactcagagctaagcacggtgaccctgaggacggcctgtccactggtagatgacaacaaggcagaagaaatagctgacaagatctacaatctgtacaatgggtacacaagtggaaaggagcagcagatggcctacaacacactgatggaggtctcagcctcgatgctgttccgagtccagcaccactacaactctcactatgaaaagtttggcgacttcgtctggagaagtgaggatgagctggggcccaggaaggcccacctgattctacggcgactggagagggtgagtagccactgctccagcctcctgcggagtgcctacatccagagccgcgtggaaacagtgccctatcttttctgccgcagcgaggaggtccggcctgcaggcatggtgtggtatagcatcctcaaggacaccaaaatcacgtgtgaggagaagatggtgtcaatggcccgaaacacgtacggggagtccaagggccggtgagggagggtattgccctccgtgagcacagagactctccatgggagggggagcagtattctcctggatcctggggcctgggtgggctgggggacagctgaggatgggcctagcagatgaagcttgccagcaaggccaaagcaaacggtttctcctgtggatagtggacagagacctttgtaaccaatggaattattcatttttctctatcttttattttttcaaagatattatttgactctatcaaaagtctctcctttttaaaccttttcttatggatggctgtcaatcccgaggcagaagttttcaggtggagaccaagcggcctttgctcttcttccttcttcctgccacactctgctttcttcctgccatggacccctggaggagacctatggagggacagttttgacctgacccctagaggagacagttttgacctcttcagcaccaggaaggaagctctgaggatggttgcagtgaggaagcatgggtctttaaggacttctctctcttttttgctggacattattgagtttgtgggaccctgcctcttcctgctacctgtgggtctgcccagagtccctgcaggcctgtccatgcattaaaaattcctattgtctctcttt

SEQ ID NO: 65355 - DNA, 896 bp, Homo sapiens
ctctgtcttctctgtctcttatttgtgctttcttttctctcttctttttctgttttgtttcattcgtttcttttgtattcttttcctttgtttttatgttgcttcttcttctttttgtccctttttttgtttgtttttttcttgtttcttttttttttcttttttttctttttgtttttttttttttttttctctttttctttcttctttcttctttttttttttctctcttttgttttttttctggttcctttttgcttcttttgtttcttctctcttgtttctcttttttttcttcttctcttttccctttttttctccttcttttccttgcctctcttttgttgtttcttgcttggacatgctgaggatgggcctagcagatgaagcttgccagcaaggccaaagcaaacggtttctcctgtggatagtggacagagacctttgtaaccaatggaattattcatttttctctatcttttattttttcaaagatattatttgactctatcaaaagtctctcctttttaaaccttttcttatggatggctgtcaatcccgaggcagaagttttcaggtggagaccaagcggcctttgctcttcttccttcttcctgccacactctgctttcttcctgccatggacccctggaggagacctatggagggacagttttgacctgacccctagaggagacagttttgacctcttcagcaccaggaaggaagctctgaggatggttgcagtgaggaagcatgggtctttaaggacttctctctcttttttgctggacattattgagtttgtgggaccctgcctcttcctgctacctgtgggtctgcccagagtccctgcaggcctgtccatgcattaaaaattcctattgtctctcttt

SEQ ID NO: 65356 - DNA, 1763 bp, Homo sapiens
  misc_feature (1)..(1): n is a, c, g, or t
ngggcttgtcgtgcagctggccccaagcgcgcggggcaaggcggccctgcaggggtgagctttcctctgagaacccggggccttagcgacacgtaatccagttttccgtctccttggtgcagatgaagaaaccgacgcccatgggcgaaagggacctgctcaagttcactcaagaccacagagctgggcagcaagaaggagctcaagtccatgcccttcatcacctacctctcaggtttgctgacagcccagatgctgtcagatgaccagctcatttcaggtgtggagattcgctgtgaggagaaggggcgctgtccatctacctgtcacctttgccgccggccaggcaaggagcagctgagccccacaccagtgctgctggaaatcaaccgtgtggtgccactttataccctcatccaagacaatggcacaaaggaggccttcaagagtgcactgatgagttcctactggtgctcagggaaaggggatgtgatcgatgactggtgcaggtgtgacctcagcgcctttgatgccaatgggctccccaactgcagcccccttctgcagccggtgctgcggctgtccccaacagtggagccctccagtactgtggtctccttggagtgggtggatgttcagccagctattgggaccaaggtctccgactatattctgcagcataagaaagtggatgaatacacagacactgacctgtacacaggagaattcctgagttttgctgatgacttactctctggcctgggcacatcttgtgtagcagctggtcgaagccatggagaggtccctgaagtcagtatctactcagtcatcttcaagtgtctggagcccgacggtctctacaagttcactctgtatgctgtggatacacgagggaggcactcagagctaagcacggtgaccctgaggacggcctgtccactggtagatgacaacaaggcagaagaaatagctgacaagatctacaatctgtacaatgggtacacaagtggaaaggagcagcagatggcctacaacacactgatggaggtctcagcctcgatgctgttccgagtccagcaccactacaactctcactatgaaaagtttggcgacttcgtctggagaagtgaggatgagctggggcccaggaaggcccacctgattctacggcgactggagagggtgagtagccactgctccagcctcctgcggagtgcctacatccagagccgcgtggaaacagtgccctatcttttctgccgcagcgaggaggtccggcctgcaggcatggtgtggtatagcatcctcaaggacaccaaaatcacgtgtgaggagaagatggtgtcaatggcccgaaacacatattatttgactctatcaaaagtctctcctttttaaaccttttcttatggatggctgtcaatcccgaggcagaagttttcaggtggagaccaagcggcctttgctcttcttccttcttcctgccacactctgctttcttcctgccatggacccctggaggagacctatggagggacagttttgacctgacccctagaggagacagttttgacctcttcagcaccaggaaggaagctctgaggatggttgcagtgaggaagcatgggtctttaaggacttctctctcttttttgctggacattattgagtttgtgggaccctgcctcttcctgctacctgtgggtctgcccagagtccctgcaggcctgtccatgcattaaaaattcctattgtctctcttt

SEQ ID NO: 65357 - DNA, 2012 bp, Homo sapiens
  misc_feature (1)..(1): n is a, c, g, or t
ngggcttgtcgtgcagctggccccaagcgcgcggggcaaggcggccctgcaggggtgagctttcctctgagaacccggggccttagcgacacgtaatccagttttccgtctccttggtgcagatgaagaaaccgacgcccatgggcgaaagggacctgctcaagttcactcaagaccacagagctgggcagcaagaaggagctcaagtccatgcccttcatcacctacctctcaggtttgctgacagcccagatgctgtcagatgaccagctcatttcaggtgtggagattcgctgtgaggagaaggggcgctgtccatctacctgtcacctttgccgccggccaggcaaggagcagctgagccccacaccagtgctgctggaaatcaaccgtgtggtgccactttataccctcatccaagacaatggcacaaaggaggccttcaagagtgcactgatgagttcctactggtgctcagggaaaggggatgtgatcgatgactggtgcaggtgtgacctcagcgcctttgatgccaatgggctccccaactgcagcccccttctgcagccggtgctgcggctgtccccaacagtggagccctccagtactgtggtctccttggagtgggtggatgttcagccagctattgggaccaaggtctccgactatattctgcagcataagaaagtggatgaatacacagacactgacctgtacacaggagaattcctgagttttgctgatgacttactctctggcctgggcacatcttgtgtagcagctggtcgaagccatggagaggtccctgaagtcagtatctactcagtcatcttcaagtgtctggagcccgacggtctctacaagttcactctgtatgctgtggatacacgagggaggcactcagagctaagcacggtgaccctgaggacggcctgtccactggtagatgacaacaaggcagaagaaatagctgacaagatctacaatctgtacaatgggtacacaagtggaaaggagcagcagatggcctacaacacactgatggaggtctcagcctcgatgctgttccgagtccagcaccactacaactctcactatgaaaagtttggcgacttcgtctggagaagtgaggatgagctggggcccaggaaggcccacctgattctacggcgactggagagggtgagtagccactgctccagcctcctgcggagtgcctacatccagagccgcgtggaaacagtgccctatcttttctgccgcagcgaggaggtccggcctgcaggcatggtgtggtatagcatcctcaaggacaccaaaatcacgtgtgaggagaagatggtgtcaatggcccgaaacacgtacggggagtccaagggccggtgagggagggtattgccctccgtgagcacagagactctccatgggagggggagcagtattctcctggatcctggggcctgggtgggctgggggacagctgaggatgggcctagcagatgaagcttgccagcaaggccaaagcaaacggtttctcctgtggatagtggacagagacctttgtaaccaatggaattattcatttttctctatcttttattttttcaaagatattatttgactctatcaaaagtctctcctttttaaaccttttcttatggatggctgtcaatcccgaggcagaagttttcaggtggagaccaagcggcctttgctcttcttccttcttcctgccacactctgctttcttcctgccatggacccctggaggagacctatggagggacagttttgacctgacccctagaggagacagttttgacctcttcagcaccaggaaggaagctctgaggatggttgcagtgaggaagcatgggtctttaaggacttctctctcttttttgctggacattattgagtttgtgggaccctgcctcttcctgctacctgtgggtctgcccagagtccctgcaggcctgtccatgcattaaaaattcctattgtctctcttt

SEQ ID NO: 65358 - DNA, 4004 bp, Homo sapiens
ggttcgcttcggcgtccgccgtctccgcagctgcctcctcttcctccttcgccaccgccgccaccgccgccgccgcccgcagcaccgcagcccctcccgccatggccgccgccggcgcccggctcagccccggccccggctcggggctccgggggcggccgaggctctgcttccacccggggccgccgccactgctgccgctgctgctgctgttcctgctcctgctgccgccgccgccgctgctggccggcgccaccgccgctgcctcgcgggagcccgacagcccgtgccggctgaagaccgtcacggtgtccacactgcccgccctgcgggagagcgacatcggctggagcggcgcccgcgccggggccggggctgggaccggggccggagccgccgccgccgccgcgtccccgggctctcctggctctgccggcaccgccgccgagtcgcgcctcctgctctttgtgcgtaacgagctgccggggcgcatcgcggtgcaggacgacctggacaacaccgagctgcccttcttcaccctggagatgtctggcacagcggcggacatctcgctggtgcactggagacagcagtggctggagaatggcaccttgtacttccacgtctccatgagcagctccgggcagctggcccaagccaccgcccccactctccaggagccctcggagattgttgaggagcagatgcacatcctccacatttctgtgatgggtggcctcatcgcgctgctgctgctgctgctggtgttcaccgtggcgctgtacgcccagcgacgttggcagaagcgtcgccgcatcccccagaagagcgcaagcacagaagccactcatgagatccactacatcccatctgtgctgctgggtccccaggcgcgggagagcttccgttcatcccggctgcaaacccacaattccgtcattggcgtgcccatccgggagactcccatcctggatgactatgactgtgaggaggatgaggagccacctaggcgggccaaccatgtctcccgcgaggacgagtttggcagccaggtgacccacactctggacagtctgggacatccaggggaagagaaggtggactttgagaagaaaggaggaatcagctttgggagagccaaggggacgtcgggctcagaggcagacgatgaaactcagctgacattctacacggagcagtaccgcagtcgccgccgcagcaaaggtttgctgaaaagcccagtgaacaagacagccctgacactgattgctgtgagttcctgcatcctggccatggtgtgtggcagccagatgtcttgtccactcactgtgaaggtgactctgcatgtgcccgagcacttcatagcagatggaagcagcttcgtggtgagtgaagggagctacctggacatctccgactggttaaacccggccaagctttccctgtattaccagatcaatgccacctccccatgggtgagggacctctgtggacaaaggacgacagatgcctgtgagcagctctgcgacccagaaaccggagagtgcagctgtcatgaaggctatgcccctgaccctgttcacagacacctgtgtgtgcgcagtgactggggacagagtgaaggaccttggccctacacgacacttgagaggggctatgatctggtgacaggggagcaagcccctgaaaagattctcaggtctactttcagcttgggccaaggcctctggcttcctgtcagcaaaagctttgtggttccgcctgtggagctgtccatcaaccccctggccagctgcaagaccgatgtgctcgtcacggaagaccctgcagatgtcagggaagaagcgatgctgtccacatactttgaaaccatcaatgacctgctgtcttccttcgggccagttcgtgactgctctcggaacaatgggggctgcactcgcaacttcaagtgtgtgtctgaccggcaggtggattcctcgggatgtgtgtgccctgaggagctgaaacccatgaaggatggctctggctgctacgaccactccaaaggcattgactgctctgatggctttaatggcggctgtgagcagctgtgcctgcagcagacgctgcccctgccctacgatgccacttcgagcaccatcttcatgttctgcggttgcgtggaggagtacaaactggctcctgatggaaaatcctgcttaatgctctcagatgtctgcgagggccccaagtgcctcaaacctgactccaaattcaatgataccctctttggagagatgctacatggttacaacaaccggacccagcatgtgaaccaaggccaagtcttccagatgacctttagggagaacaacttcatcaaggactttccccagctggccgatgggctgttggtgatcccgctgccggtggaggagcagtgccggggggtcctctccgagccccttccggacctccaactgctcactggagatatcaggtatgatgaggccatgggttaccccatggtgcagcagtggcgggtccggagcaacctctaccgtgtgaagctcagcaccatcaccctcgcagcaggcttcactaatgttctcaagatcctgaccaaggagagcagtcgggaggagctgctgtccttcatccagcactatggctcccactacatcgcagaggccctctatggctcagagctcacctgcatcatccactttcccagcaagaaggtccagcagcagctgtggctccagtatcagaaagagaccacagagctgggcagcaagaaggagctcaagtccatgcccttcatcacctacctctcaggtttgctgacagcccagatgctgtcagatgaccagctcatttcaggtgtggagattcgctgtgaggagaaggggcgctgtccatctacctgtcacctttgccgccggccaggcaaggagcagctgagccccacaccagtgctgctggaaatcaaccgtgtggtgccactttataccctcatccaagacaatggcacaaaggaggccttcaagagtgcactgatgagttcctactggtgctcagggaaaggggatgtgatcgatgactggtgcaggtgtgacctcagcgcctttgatgccaatgggctccccaactgcagcccccttctgcagccggtgctgcggctgtccccaacagtggagccctccagtactgtggtctccttggagtgggtggatgttcagccagctattgggaccaaggtctccgactatattctgcagcataagaaagtggatgaatacacagacactgacctgtacacaggagaattcctgagttttgctgatgacttactctctggcctgggcacatcttgtgtagcagctggtcgaagccatggagaggtccctgaagtcagtatctactcagtcatcttcaagtgtctggagcccgacggtctctacaagttcactctgtatgctgtggatacacgagggaggcactcagagctaagcacggtgaccctgaggacggcctgtccactggtagatgacaacaaggcagaagaaatagctgacaagatctacaatctgtacaatgggtacacaagtggaaaggagcagcagatggcctacaacacactgatggaggtctcagcctcgatgctgttccgagtccagcaccactacaactctcactatgaaaagtttggcgacttcgtctggagaagtgaggatgagctggggcccagcctcctggaatcctttatgagcctccaggacataaatcttctggaaaggccgccgggccgcccacagaggccaggcaatccactcagtaatgtctcctggaggatatctgagattgctccaacatcccacactgatatgtcagcaggaatcaaggaaactgcctcctaatctatcctggtgctgctaataagctcactgtgcaaccctgggctctgccgctttctggccctcagtctcctcacctataacatgataaggacgaactagaacagt

SEQ ID NO: 65359 - DNA, 11967 bp, Homo sapiens
agcgaaccatcggggcggccgggagccatgttggagcggcgggaggcggcagcagcgtcggggatgctgtggtgggggcggaaaaagccagggccgcacgccggaggggctccggccgcggagtagatggtgcccagagggcggcgggggtgcggagagacaggcggaggggcgggggcccggggcggcggcaggggcccgggagggggcccgagcggcggggccagcccaaggcccggaccggggcggggggcggtggaggccgtgcagggaggcgggagatgatggcgaggcggccgccgtggcggggcctcggggaacggtcgacccccatactcctgctccttctcctctctttgttccccctcagccaggaggagctggggggcggtgggcaccagggctgggacccaggcttagctgccactacggggccaagggcgcatatcggtggcggagccttagctctttgtccggagtcttccggggtccgggaggatggggggcctggcctgggggtcagggagcctatcttcgtggggctccgagggagaaggcaaagcgcccggaatagtcgagggccccctgagcagccgaatgaggagctggggattgaacacggcgtccagccattgggcagccgcgaacgagagacaggacagggaccagggtctgtgttatactggcgcccagaggtctcctcttgcgggcggacaggacctttgcaaagaggtagtctgtcaccaggggctctgtcctcaggggtcccgggctcggggaacagctcgcccctcccttcagactttttgattcggcaccacggtcccaagccggtgtcctcccagcggaacgctgggacaggctcccgcaaaagagtgggcaccgcgcgctgctgtggggaattatgggcaacagggagcaagggtcagggcgagagagccacgacatccggagcagaaaggacagccccccggcggaactgtcttccaggggcctcgggatctggccccgagctggattcagcaccacgcacggcgaggacagctcctgcatcaggttcagcaccccgcgagtctcggacagctcccgagccggcgcccaagcgcatgcgctcccggggtctcttccgctgccgcttcctcccgcagcgccccgggccgcgtcccccgggactcccggcccgtcctgaagccaggaaagtaacctcggcgaaccgggcacgctttcgtcgcgccgcaaaccgccacccgcagtttccgcagtacaactaccagacgctggtgccggagaatgaggcagcaggcaccgcggtgctacgcgtggttgctcaggacccggacgccggcgaggccgggcgcctagtctactcgctggcggcactcatgaacagccgctcgctggagctgttcagcatcgacccgcagagcggccttatccgtacggcggcagctctggaccgcgagagcatggagcgtcactacctgcgtgtgaccgcgcaggaccacgggtcgccgcgcctctcggccaccacgatggtggccgtgacagtagccgaccgcaacgaccactcgccggtttttgagcaagcgcagtaccgggagacccttcgcgagaatgtggaggagggctaccctatcctgcagctgcgtgccactgacggcgacgcgccccccaacgccaacctgcgctaccgcttcgtggggccgccagctgcgcgcgctgcagctgccgccgccttcgagattgatccacgctccggcctcatcagcaccagcggccgagtggaccgcgagcacatggaaagctatgagctggtggtggaagccagcgaccagggccaggaacccgggccgcgctcggccactgtgcgcgtacacataactgtgctagacgagaacgacaatgctcctcagttcagcgagaagcgctacgtggcgcaggtgcgcgaggatgtgcgcccccacacagtcgtgctgcgcgtcacggccactgaccgggacaaggacgccaacggattggtgcactacaacatcatcagtggcaatagccgtggacactttgccatcgacagcctcactggcgagatccaggtggtggcacctctggacttcgaggcagagagagagtatgccttgcgcatcagggcgcaggatgctggccggccaccgctgtccaacaacacgggcctggccagcatccaggtggtggacatcaatgaccacattcctatttttgtcagcacgcccttccaagtttctgtcttggaaaatgctcccttgggtcactcagtcatccacattcaggcagtcgatgcagaccatggggagaatgccagattggagtactccctaactggtgtggcacctgatactccttttgtgataaacagcgccactggctgggtctctgtgagtggtcccctggaccgtgagtctgtggagcattacttctttggtgtggaggctcgagaccatggctcacccccactctctgcctcagccagtgtcaccgtgactgtgctggacgttaatgacaatcggcctgagttcacaatgaaggagtaccacctacgactgaatgaggatgcagctgtgggcaccagtgtggtcagcgtgaccgcagtagaccgtgatgccaacagtgccatcagctaccagatcacaggcggcaacacccggaatcgctttgccatcagcacccaggggggtgtgggtctggtgactctggctctgccactggactacaagcaggaacgctacttcaagctggtactaactgcatctgaccgtgcccttcatgatcactgctatgtgcacatcaacatcacagatgccaacactcatcggccggtctttcaaagtgcccactactcagtgagtgtgaatgaagatcggccaatgggtagcaccatagtggtcatcagtgcctctgatgatgacgtgggtgagaatgctcgtatcacctatctcctggaggacaacctgccccagttccgcattgatgcagactcaggagccattacattacaggccccattagactatgaggaccaggtgacctacaccctggctatcacagctcgggacaatggcatcccacagaaggcagacactacttatgtggaggtgatggtcaatgacgtgaatgacaatgctccacaatttgtggcctcccactatacagggctggtctctgaggatgccccacctttcaccagtgtcctgcagatctcagccactgaccgggatgctcatgccaatggccgggtccagtacactttccagaatggtgaagatggggatggagattttaccattgagcccacctctggaattgtccgtacagtaaggcggctagaccgggaggcagtatcagtgtatgagttgactgcctacgcagtggacagaggtgtgcccccactccggactccagtcagtatccaggtgatggtgcaggatgtgaacgacaatgcacctgtcttcccagctgaggagtttgaggtgcgggtgaaagagaatagcattgtgggctcagtggtggcccagatcactgcagtggaccctgacgaaggccccaatgcccatataatgtaccagatcgtggaggggaacatccctgagctgttccaaatggacatcttctctggagaactgacggcactcattgacctagactatgaggctcgccaagaatatgtgattgtggtgcaggccacatctgctcctttggtcagccgggccactgtgcacgtccgcctggttgaccagaatgacaacagccctgtgctcaacaacttccagatcctcttcaacaactatgtatccaaccgttcagacaccttcccgtcgggcattattgggcgcatcccagcttatgaccccgatgtctccgaccacctcttctactcctttgagcgtggcaatgagctgcagctgctggtagtcaaccagaccagtggggagctgcgactcagccgaaagctagacaataaccgcccactggtggcctccatgttggtgactgtcacagatggcctgcacagcgtgacggcgcagtgtgtgctgcgcgtggtcatcatcacggaggagttgctggccaacagcctgaccgtgcgccttgagaacatgtggcaggagcgcttcctgtcaccgctgctgggccgcttcctcgagggcgtggctgcggtgctcgctacgcccgctgaggacgtcttcatcttcaacatccagaacgacacagacgtagggggcaccgtgctcaatgtgagtttctcggcgctagctccacgtggggccggggcgggcgctgcagggccctggttcagctccgaggagctgcaggagcagttgtacgtgcgccgggcggcgctggcggctcgctccctgctcgacgtactgcccttcgacgacaacgtgtgcctgcgagagccctgtgagaactacatgaaatgcgtgtccgtgctccgctttgactcgtccgcgcccttcctggcctcggcctccacgctgttccgacccatccagcccatcgctggcctgcgctgccgctgcccgcccggattcacgggagacttttgcgagaccgagctcgacctctgctactccaacccatgtcgcaacggcggagcctgcgcgcggcgcgagggaggctacacgtgcgtctgccgcccgcgcttcaccggagaggactgcgagctggacaccgaggccggccgctgcgtgccgggcgtctgccgcaacgggggcacctgcaccgacgcgcccaacggcggctttcgctgccagtgcccggcaggcggcgccttcgagggcccgcgctgcgaggtggctgcgcgctccttcccgcccagttcgttcgtcatgtttcgcggcctgcggcagcgattccaccttacgctgtccctctcgttcgcgacagtgcagcagagcgggctgctcttctacaacgggcgcctgaacgagaagcacgacttcctggccctggaactcgtggctggccaagtgcggctcacatattccacgggtgaatccaacaccgtggtcagccccacagttccagggggcttgagtgacgggcaatggcatacagtgcatctgagatactacaacaagccccggacagatgccctagggggtgcacagggcccctccaaggacaaggtggctgtgctaagcgtggatgattgtgatgtggccgtggctctgcagtttggtgctgagattggcaactactcatgcgcggctgctggtgtgcaaacaagctccaagaagtccctggacctgacgggccctcttcttctgggaggtgtccccaacctccccgagaacttccccgtatcccataaggacttcatcggctgtatgcgggacctgcacattgatggccgccgagtggacatggcggcttttgtcgcaaataatggcaccatggcaggctgccaagccaagctacacttttgtgactcaggcccctgcaagaacagtggcttctgctcggagcgctggggcagcttcagctgcgactgccctgtgggcttcggcggcaaagactgtcagcttactatggcccatccccaccatttccgtggcaacggcacactgagctggaactttggaagtgacatggctgtgtctgtgccatggtacctggggctggcatttcggacacgggcaacgcagggggtcctgatgcaagtgcaggctgggccacacagcacgctcctttgccagctagatcgggggttactgtctgtgacagtgaccaggggctcgggccgtgcttcccatctccttctggaccaggtgactgtcagtgatggccggtggcacgatctgcggctggagttgcaggaggaaccaggtggccggcggggccaccatgtccttatggtctcactggactttagcctcttccaggacaccatggcggtggggagtgagctgcagggcctgaaggtaaagcagctccacgtgggaggcctgccccccggcagtgcagaggaggctcctcagggtctggttggctgcatccagggggtgtggctcggctccacaccctctggctccccggccctgctaccccccagccaccgagtgaatgcggagcctggctgtgttgtgaccaacgcctgtgcctctgggccctgcccacctcacgcagactgccgggacctctggcagaccttttcttgcacctgccagccaggttactacggcccaggctgtgtggatgcctgcctcctgaacccctgtcagaaccagggatcatgccggcacctgccaggagccccccatggctatacctgtgactgtgtgggtggctatttcgggcaccactgtgagcacaggatggaccagcagtgcccacggggctggtgggggagcccaacctgtggcccctgcaactgtgatgttcacaaaggttttgatcccaactgcaacaagacaaatgggcagtgtcactgcaaggagttccactaccgaccgcggggcagtgactcttgcctcccatgtgactgctaccctgtgggctccacctcgcgctcatgtgcaccccacagcgggcagtgcccctgtcgcccaggagcccttggccgccagtgcaacagctgtgacagtcccttcgcagaggtgacagccagcggctgccgggtgctctatgatgcctgccctaagtccctgagatctggtgtgtggtggccccagacaaagtttggcgtcctggccacagtgccctgtccccggggggccctgggtgctgctgtgcggctgtgtgatgaggcccagggttggctggagcccgacctcttcaactgtacctcccctgcctttcgagagctcagtctgctgctggatggcctagagctgaacaagacggcactggataccatggaggccaagaagctggctcagcggctacgggaggtgactggccacactgaccactattttagccaagatgttcgagtcactgcccgcctgctggcccacctgctggccttcgagagccatcagcagggcttcgggctgacagccacacaggatgcccacttcaatgagaatctgctgtgggccggctctgcactgcttgccccagagacaggggacttgtgggcggcgctggggcagcgggcccctgggggctccccaggcagcgcgggactggtgaggcacctggaggagtatgcagccacactcgcaaggaatatggaactcacatacctgaatcccatggggctggtgacgcctaatatcatgctcagcattgaccgcatggagcaccccagttctccccggggggcccgtcgctaccctcgctaccatagcaacctctttcgaggccaggatgcctgggatcctcacacccatgtgctgctgccttcccagtccccacggccatccccatctgaagttctgcccacaagcagcagcatagaaaactccaccacctcaagtgtggtccccccaccagccccgccagagccagagcctgggatctccattatcattctcctcgtttaccgcaccttagggggactgctccctgcccagttccaggcagaacgccgaggtgccaggcttcctcagaaccccgtcatgaactccccggtggtcagcgtggctgtgttccacggacgcaacttcctaaggggaatcctggagtcccccatcagcctagagtttcgcctgctacagacagcgaatcggagcaaggcgatctgtgtgcagtgggacccacctggcctggcggagcagcatggtgtgtggacagcacgggactgcgagctggtgcacaggaatgggtcccacgcacggtgtcgctgcagccggacagggacctttggggtcctcatggatgcctctccccgtgagaggctggagggcgacctggagctgctggctgtgttcacccacgtggtcgtggctgtgtctgtggctgcgctggtgctgactgcagccatcctgctgagcctgcgcagcctcaagtccaatgtgcgtgggatccatgccaatgtggcagccgccctgggggtggcagagctcctcttcctgctggggattcacaggacccacaatcagctggtgtgcactgcagtcgccatcctcctgcactacttcttcctcagcaccttcgcgtggctcttcgtgcaggggctgcacctctaccgcatgcaggttgagccacgcaacgtggaccgcggcgccatgcgcttctaccatgccctgggctggggcgtccctgctgtgctgctgggccttgctgtgggcctggaccctgagggctatgggaaccctgacttctgctggatctcagtccacgagcccctcatctggagctttgctggccctgttgtcctggtcatagtgatgaacgggaccatgtttctcctcgctgcccgcacatcctgctccacagggcagagggaggccaagaagacctctgcactgacccttcgcagctccttcctgctgcttctgctggtcagtgcctcctggctctttgggctcctggcagtcaaccacagcatcctagccttccactacctccatgctggactctgcggcctccagggcctggcggtgctgctgctcttctgtgtcctaaatgcagatgctcgggctgcctggatgccagcctgtctgggcaggaaggcagcgcctgaggaggcaaggccagcacctgggctgggacctggggcctacaacaacacggctctctttgaggagagtggcctcatccgcatcactctgggcgcctccaccgtctcctctgtgagcagtgcccgctccggccggacccaggaccaggacagccagcggggccgcagctacctcagggacaatgtcctggttcgacatggctcagccgctgaccacactgaccacagcctccaggctcatgctggccccactgacctggacgtggccatgttccatcgagatgctggcgcagactccgactctgacagtgacctgtccttggaggaggagaggagtctctccattccatcttcagaaagcgaggacaatggccggacgcgggggcgcttccaacggccactctgccgagcagcccagagtgagaggctcctcacccaccccaaagatgtggatggcaatgacctcctgtcctactggccagccctgggggagtgcgaggcagccccctgtgctctgcagacttggggctctgaaaggcgcctggggctggacaccagcaaggatgcagctaacaacaaccagccagacccggccctgaccagtggggatgagacttctctgggccgggcccagcgccagaggaaaggcatcctgaagaaccggttgcaatacccactggtgccacagacccgaggtgcccctgagctgtcctggtgccgtgcagccaccttgggccaccgtgcagtgccagctgcctcttacggtcgcatctatgctggcgggggcacgggcagcctttcacagccagccagccgctactcttctagagaacagctggacctgctcctccggcggcaactgagccgtgagcgactagaggaagcccctgcccctgttctacgtcccctgagccggccagggtcccaggaatgcatggatgctgcaccaggccgactggagcccaaagatcggggcagcaccctgccacggaggcagccacctcgggactaccctggcgccatggctggccgcttcgggtcacgggatgcgctcgacttaggggcacctcgagagtggttgagcacgctgcctccgccccgccgcacccgggaccttgacccacagcccccacctctgcccctgtctccccagcggcaactctcaagggaccccctcttgccatcccggccgctggactctctgtctaggagctcgaactctcgggagcagctggaccaggtgcctagccggcacccctcacgagaagcccttgggccactcccgcagctgctcagagctagggaggactcggtcagtggccccagccatggcccctccacagaacagttggacattctttcctccatccttgcctctttcaactcctcggccctctcctctgtgcaatcttcaagcacacccttgggccctcacaccactgccacaccttctgccacagcctctgtgcttgggccctccacgccacgttctgccacgtctcacagcatctcggagctgtcgccagactcagaagttcccagaagtgagggtcactcctgaggggatgacggcgtggacgaggaacagctgagggcgacagaggatctaggctaacaggagagactccaggagtgggggcagatcccaaggcagcctcctgctccccagtggtgggtgccccagctctacctggtgtggcagggctgaggctccatgtgcatctgtgagcatgcgtgtgacaggtgcagagacgggggactggagggagacttttatacgttttgtacctttgtaaccagagagatgcttatgttatttttcagcttttctgtctcctggggggtttgaggctgggctgggagggggagggagatagagggagagatgcagtttgaccccatttgggtcctgagcaaaccctatgctcatctctctctccttcctggggtggactcagatgggtgggacacatgccttcctccccctattccacccccaagttgatctgagtatcgtcaggggcccaaagtacagaattgttctttgctttttattgaatgctccaaaggccaaacttctggggctgggggttggtcttggaaacaggggtcctctgacttcctcatgggggcttgctcataccgcccctcctggtggatgtgtgtgtttattatgtggagtccctgccacttactgccttatgacctaggactgatgctgtggggtgctggtggagcagctgatgtcgtgtttacagagcaaggcttccctgtctcccacggggaggggctcgggcctctagtcagacattcctgcagagggtcggtggaggggtcattcacctgcccctgcagcaagcaaaagttgtctgtggtgccatttgattccctgacactgccccctgcttgaattgattccgaagggtagggtgggaaggtgagcaaagggagcagaaacaagggaattcaagacccagaatgtaggtgccactgcctcctatgtttacaggatcctccgtggccctaggcacctgggctgcaggaagtgactccgttccactcctcctttattcccttaaaaagggaaaaatgactgttacgaccctgttcacaaaactcttacttttgctattttgtctgctgtccagaactgaagactttaaaattttgttactgtttacaagtccagattcaaaaaatgtttttactttgtttacaactcaaaactttgagttttacactttgtttacagtagataattttttttcctttgtttccaagtgaaaggtagggaaagtgggagagggacttggaggacccacctgtgaggaccctgacctggccatcttgaggggttttctaacccccaggtctcccaggccgaaggtcagccttgagtcccgtttaacagcagatccagaagaccttgagagtaggcgtcctctaaccacgggggagagtggctgtgcagggctggggggtggtctgtgcagacacctcctcacccaccaccccatgcatactcttgggaagcagcttcctgggagattagaaattctacttccctgactggagctaaatcccaccagccaggacccaaactctccttaccgagaaggaccccagctcttgaagggctgagtggcctgctgggggtgggagggtgtctttactatgtcctaggtttcgtagatgcccctctctggggttcccctcctccagcccagcggccctctttcctgtctgtgtaaattgttccgtgaagccgcgctctgttttgggaataaacttctatagaaaacaaaaaa

SEQ ID NO: 65360 - DNA, 2905 bp, Homo sapiens
tggctggtagagccgggtgttatcggcgagggtggatggatgaatgtggatggcaatgacctcctgtcctactggccagccctgggggagtgcgaggcagccccctgtgctctgcagacttggggctctgaaaggcgcctggggctggacaccagcaaggatgcagctaacaacaaccagccagacccggccctgaccagtggggatgagacttctctgggccgggcccagcgccagaggaaaggcatcctgaagaaccggttgcaatacccactggtgccacagacccgaggtgcccctgagctgtcctggtgccgtgcagccaccttgggccaccgtgcagtgccagctgcctcttacggtcgcatctatgctggcgggggcacgggcagcctttcacagccagccagccgctactcttctagagaacagctggacctgctcctccggcggcaactgagccgtgagcgactagaggaagcccctgcccctgttctacgtcccctgagccggccagggtcccaggaatgcatggatgctgcaccaggccgactggagcccaaagatcggggcagcaccctgccacggaggcagccacctcgggactaccctggcgccatggctggccgcttcgggtcacgggatgcgctcgacttaggggcacctcgagagtggttgagcacgctgcctccgccccgccgcacccgggaccttgacccacagcccccacctctgcccctgtctccccagcggcaactctcaagggaccccctcttgccatcccggccgctggactctctgtctaggagctcgaactctcgggagcagctggaccaggtgcctagccggcacccctcacgagaagcccttgggccactcccgcagctgctcagagctagggaggactcggtcagtggccccagccatggcccctccacagaacagttggacattctttcctccatccttgcctctttcaactcctcggccctctcctctgtgcaatcttcaagcacacccttgggccctcacaccactgccacaccttctgccacagcctctgtgcttgggccctccacgccacgttctgccacgtctcacagcatctcggagctgtcgccagactcagaagttcccagaagtgagggtcactcctgaggggatgacggcgtggacgaggaacagctgagggcgacagaggatctaggctaacaggagagactccaggagtgggggcagatcccaaggcagcctcctgctccccagtggtgggtgccccagctctacctggtgtggcagggctgaggctccatgtgcatctgtgagcatgcgtgtgacaggtgcagagacgggggactggagggagacttttatacgttttgtacctttgtaaccagagagatgcttatgttatttttcagcttttctgtctcctggggggtttgaggctgggctgggagggggagggagatagagggagagatgcagtttgaccccatttgggtcctgagcaaaccctatgctcatctctctctccttcctggggtggactcagatgggtgggacacatgccttcctccccctattccacccccaagttgatctgagtatcgtcaggggcccaaagtacagaattgttctttgctttttattgaatgctccaaaggccaaacttctggggctgggggttggtcttggaaacaggggtcctctgacttcctcatgggggcttgctcataccgcccctcctggtggatgtgtgtgtttattatgtggagtccctgccacttactgccttatgacctaggactgatgctgtggggtgctggtggagcagctgatgtcgtgtttacagagcaaggcttccctgtctcccacggggaggggctcgggcctctagtcagacattcctgcagagggtcggtggaggggtcattcacctgcccctgcagcaagcaaaagttgtctgtggtgccatttgattccctgacactgccccctgcttgaattgattccgaagggtagggtgggaaggtgagcaaagggagcagaaacaagggaattcaagacccagaatgtaggtgccactgcctcctatgtttacaggatcctccgtggccctaggcacctgggctgcaggaagtgactccgttccactcctcctttattcccttaaaaagggaaaaatgactgttacgaccctgttcacaaaactcttacttttgctattttgtctgctgtccagaactgaagactttaaaattttgttactgtttacaagtccagattcaaaaaatgtttttactttgtttacaactcaaaactttgagttttacactttgtttacagtagataattttttttcctttgtttccaagtgaaaggtagggaaagtgggagagggacttggaggacccacctgtgaggaccctgacctggccatcttgaggggttttctaacccccaggtctcccaggccgaaggtcagccttgagtcccgtttaacagcagatccagaagaccttgagagtaggcgtcctctaaccacgggggagagtggctgtgcagggctggggggtggtctgtgcagacacctcctcacccaccaccccatgcatactcttgggaagcagcttcctgggagattagaaattctacttccctgactggagctaaatcccaccagccaggacccaaactctccttaccgagaaggaccccagctcttgaagggctgagtggcctgctgggggtgggagggtgtctttactatgtcctaggtttcgtagatgcccctctctggggttcccctcctccagcccagcggccctctttcctgtctgtgtaaattgttccgtgaagccgcgctctgttttgggaataaacttctatagaaaacaaaaaa

SEQ ID NO: 65361 - DNA, 418 bp, Homo sapiens
tgatccccaggtccctggacctgacgggccctcttcttctgggaggtgtccccaacctccccgagaacttccccgtatcccataaggacttcatcggctgtatgcgggacctgcacattgatggccgccgagtggacatggcggcttttgtcgcaaataatggcaccatggcaggtaggcctgaagcttccaccagcctagcccatggccctgtccccatcatagggaggaagtggaggactccatacctgacttcaagccagtctcctttggtggcaagcaccatgctacagcccagattttagggcctgactcttaccaaccccactcatcgaaagaaaatgggaaatggggctgagatcttggtctctttcagcccctctggacactaaagtcctgtccagcacttgtgcccccc

SEQ ID NO: 65362 - DNA, 442 bp, Homo sapiens
tactctggccccagtcccaccaatgacccagacccctgatccccaggtccctggacctgacgggccctcttcttctgggaggtgtccccaacctccccgagaacttccccgtatcccataaggacttcatcggctgtatgcgggacctgcacattgatggccgccgagtggacatggcggcttttgtcgcaaataatggcaccatggcaggtaggcctgaagcttccaccagcctagcccatggccctgtccccatcatagggaggaagtggaggactccatacctgacttcaagccagtctcctttggtggcaagcaccatgctacagcccagattttagggcctgactcttaccaaccccactcatcgaaagaaaatgggaaatggggctgagatcttggtctctttcagcccctctggacactaaagtcctgtccagca

SEQ ID NO: 65363 - DNA, 2805 bp, Homo sapiens
aacaactactgactagtacgaaggccccgtgttaatcgcacgaggtggacaccagcaaggatgcagctaacaacaaccagccagacccggccctgaccagtggggatgagacttctctgggccgggcccagcgccagaggaaaggcatcctgaagaaccggttgcaatacccactggtgccacagacccgaggtgcccctgagctgtcctggtgccgtgcagccaccttgggccaccgtgcagtgccagctgcctcttacggtcgcatctatgctggcgggggcacgggcagcctttcacagccagccagccgctactcttctagagaacagctggacctgctcctccggcggcaactgagccgtgagcgactagaggaagcccctgcccctgttctacgtcccctgagccggccagggtcccaggaatgcatggatgctgcaccaggccgactggagcccaaagatcggggcagcaccctgccacggaggcagccacctcgggactaccctggcgccatggctggccgcttcgggtcacgggatgcgctcgacttaggggcacctcgagagtggttgagcacgctgcctccgccccgccgcacccgggaccttgacccacagcccccacctctgcccctgtctccccagcggcaactctcaagggaccccctcttgccatcccggccgctggactctctgtctaggagctcgaactctcgggagcagctggaccaggtgcctagccggcacccctcacgagaagcccttgggccactcccgcagctgctcagagctagggaggactcggtcagtggccccagccatggcccctccacagaacagttggacattctttcctccatccttgcctctttcaactcctcggccctctcctctgtgcaatcttcaagcacacccttgggccctcacaccactgccacaccttctgccacagcctctgtgcttgggccctccacgccacgttctgccacgtctcacagcatctcggagctgtcgccagactcagaagttcccagaagtgagggtcactcctgaggggatgacggcgtggacgaggaacagctgagggcgacagaggatctaggctaacaggagagactccaggagtgggggcagatcccaaggcagcctcctgctccccagtggtgggtgccccagctctacctggtgtggcagggctgaggctccatgtgcatctgtgagcatgcgtgtgacaggtgcagagacgggggactggagggagacttttatacgttttgtacctttgtaaccagagagatgcttatgttatttttcagcttttctgtctcctggggggtttgaggctgggctgggagggggagggagatagagggagagatgcagtttgaccccatttgggtcctgagcaaaccctatgctcatctctctctccttcctggggtggactcagatgggtgggacacatgccttcctccccctattccacccccaagttgatctgagtatcgtcaggggcccaaagtacagaattgttctttgctttttattgaatgctccaaaggccaaacttctggggctgggggttggtcttggaaacaggggtcctctgacttcctcatgggggcttgctcataccgcccctcctggtggatgtgtgtgtttattatgtggagtccctgccacttactgccttatgacctaggactgatgctgtggggtgctggtggagcagctgatgtcgtgtttacagagcaaggcttccctgtctcccacggggaggggctcgggcctctagtcagacattcctgcagagggtcggtggaggggtcattcacctgcccctgcagcaagcaaaagttgtctgtggtgccatttgattccctgacactgccccctgcttgaattgattccgaagggtagggtgggaaggtgagcaaagggagcagaaacaagggaattcaagacccagaatgtaggtgccactgcctcctatgtttacaggatcctccgtggccctaggcacctgggctgcaggaagtgactccgttccactcctcctttattcccttaaaaagggaaaaatgactgttacgaccctgttcacaaaactcttacttttgctattttgtctgctgtccagaactgaagactttaaaattttgttactgtttacaagtccagattcaaaaaatgtttttactttgtttacaactcaaaactttgagttttacactttgtttacagtagataattttttttcctttgtttccaagtgaaaggtagggaaagtgggagagggacttggaggacccacctgtgaggaccctgacctggccatcttgaggggttttctaacccccaggtctcccaggccgaaggtcagccttgagtcccgtttaacagcagatccagaagaccttgagagtaggcgtcctctaaccacgggggagagtggctgtgcagggctggggggtggtctgtgcagacacctcctcacccaccaccccatgcatactcttgggaagcagcttcctgggagattagaaattctacttccctgactggagctaaatcccaccagccaggacccaaactctccttaccgagaaggaccccagctcttgaagggctgagtggcctgctgggggtgggagggtgtctttactatgtcctaggtttcgtagatgcccctctctggggttcccctcctccagcccagcggccctctttcctgtctgtgtaaattgttccgtgaagccgcgctctgttttgggaataaacttctatagaaaacaaaaaa

SEQ ID NO: 65364 - DNA, 11133 bp, Homo sapiens
agcgaaccatcggggcggccgggagccatgttggagcggcgggaggcggcagcagcgtcggggatgctgtggtgggggcggaaaaagccagggccgcacgccggaggggctccggccgcggagtagatggtgcccagagggcggcgggggtgcggagagacaggcggaggggcgggggcccggggcggcggcaggggcccgggagggggcccgagcggcggggccagcccaaggcccggaccggggcggggggcggtggaggccgtgcagggaggcgggagatgatggcgaggcggccgccgtggcggggcctcggggaacggtcgacccccatactcctgctccttctcctctctttgttccccctcagccaggaggagctggggggcggtgggcaccagggctgggacccaggcttagctgccactacggggccaagggcgcatatcggtggcggagccttagctctttgtccggagtcttccggggtccgggaggatggggggcctggcctgggggtcagggagcctatcttcgtggggctccgagggagaaggcaaagcgcccggaatagtcgagggccccctgagcagccgaatgaggagctggggattgaacacggcgtccagccattgggcagccgcgaacgagagacaggacagggaccagggtctgtgttatactggcgcccagaggtctcctcttgcgggcggacaggacctttgcaaagaggtagtctgtcaccaggggctctgtcctcaggggtcccgggctcggggaacagctcgcccctcccttcagactttttgattcggcaccacggtcccaagccggtgtcctcccagcggaacgctgggacaggctcccgcaaaagagtgggcaccgcgcgctgctgtggggaattatgggcaacagggagcaagggtcagggcgagagagccacgacatccggagcagaaaggacagccccccggcggaactgtcttccaggggcctcgggatctggccccgagctggattcagcaccacgcacggcgaggacagctcctgcatcaggttcagcaccccgcgagtctcggacagctcccgagccggcgcccaagcgcatgcgctcccggggtctcttccgctgccgcttcctcccgcagcgccccgggccgcgtcccccgggactcccggcccgtcctgaagccaggaaagtaacctcggcgaaccgggcacgctttcgtcgcgccgcaaaccgccacccgcagtttccgcagtacaactaccagacgctggtgccggagaatgaggcagcaggcaccgcggtgctacgcgtggttgctcaggacccggacgccggcgaggccgggcgcctagtctactcgctggcggcactcatgaacagccgctcgctggagctgttcagcatcgacccgcagagcggccttatccgtacggcggcagctctggaccgcgagagcatggagcgtcactacctgcgtgtgaccgcgcaggaccacgggtcgccgcgcctctcggccaccacgatggtggccgtgacagtagccgaccgcaacgaccactcgccggtttttgagcaagcgcagtaccgggagacccttcgcgagaatgtggaggagggctaccctatcctgcagctgcgtgccactgacggcgacgcgccccccaacgccaacctgcgctaccgcttcgtggggccgccagctgcgcgcgctgcagctgccgccgccttcgagattgatccacgctccggcctcatcagcaccagcggccgagtggaccgcgagcacatggaaagctatgagctggtggtggaagccagcgaccagggccaggaacccgggccgcgctcggccactgtgcgcgtacacataactgtgctagacgagaacgacaatgctcctcagttcagcgagaagcgctacgtggcgcaggtgcgcgaggatgtgcgcccccacacagtcgtgctgcgcgtcacggccactgaccgggacaaggacgccaacggattggtgcactacaacatcatcagtggcaatagccgtggacactttgccatcgacagcctcactggcgagatccaggtggtggcacctctggacttcgaggcagagagagagtatgccttgcgcatcagggcgcaggatgctggccggccaccgctgtccaacaacacgggcctggccagcatccaggtggtggacatcaatgaccacattcctatttttgtcagcacgcccttccaagtttctgtcttggaaaatgctcccttgggtcactcagtcatccacattcaggcagtcgatgcagaccatggggagaatgccagattggagtactccctaactggtgtggcacctgatactccttttgtgataaacagcgccactggctgggtctctgtgagtggtcccctggaccgtgagtctgtggagcattacttctttggtgtggaggctcgagaccatggctcacccccactctctgcctcagccagtgtcaccgtgactgtgctggacgttaatgacaatcggcctgagttcacaatgaaggagtaccacctacgactgaatgaggatgcagctgtgggcaccagtgtggtcagcgtgaccgcagtagaccgtgatgccaacagtgccatcagctaccagatcacaggcggcaacacccggaatcgctttgccatcagcacccaggggggtgtgggtctggtgactctggctctgccactggactacaagcaggaacgctacttcaagctggtactaactgcatctgaccgtgcccttcatgatcactgctatgtgcacatcaacatcacagatgccaacactcatcggccggtctttcaaagtgcccactactcagtgagtgtgaatgaagatcggccaatgggtagcaccatagtggtcatcagtgcctctgatgatgacgtgggtgagaatgctcgtatcacctatctcctggaggacaacctgccccagttccgcattgatgcagactcaggagccattacattacaggccccattagactatgaggaccaggtgacctacaccctggctatcacagctcgggacaatggcatcccacagaaggcagacactacttatgtggaggtgatggtcaatgacgtgaatgacaatgctccacaatttgtggcctcccactatacagggctggtctctgaggatgccccacctttcaccagtgtcctgcagatctcagccactgaccgggatgctcatgccaatggccgggtccagtacactttccagaatggtgaagatggggatggagattttaccattgagcccacctctggaattgtccgtacagtaaggcggctagaccgggaggcagtatcagtgtatgagttgactgcctacgcagtggacagaggtgtgcccccactccggactccagtcagtatccaggtgatggtgcaggatgtgaacgacaatgcacctgtcttcccagctgaggagtttgaggtgcgggtgaaagagaatagcattgtgggctcagtggtggcccagatcactgcagtggaccctgacgaaggccccaatgcccatataatgtaccagatcgtggaggggaacatccctgagctgttccaaatggacatcttctctggagaactgacggcactcattgacctagactatgaggctcgccaagaatatgtgattgtggtgcaggccacatctgctcctttggtcagccgggccactgtgcacgtccgcctggttgaccagaatgacaacagccctgtgctcaacaacttccagatcctcttcaacaactatgtatccaaccgttcagacaccttcccgtcgggcattattgggcgcatcccagcttatgaccccgatgtctccgaccacctcttctactcctttgagcgtggcaatgagctgcagctgctggtagtcaaccagaccagtggggagctgcgactcagccgaaagctagacaataaccgcccactggtggcctccatgttggtgactgtcacagatggcctgcacagcgtgacggcgcagtgtgtgctgcgcgtggtcatcatcacggaggagttgctggccaacagcctgaccgtgcgccttgagaacatgtggcaggagcgcttcctgtcaccgctgctgggccgcttcctcgagggcgtggctgcggtgctcgctacgcccgctgaggacgtcttcatcttcaacatccagaacgacacagacgtagggggcaccgtgctcaatgtgagtttctcggcgctagctccacgtggggccggggcgggcgctgcagggccctggttcagctccgaggagctgcaggagcagttgtacgtgcgccgggcggcgctggcggctcgctccctgctcgacgtactgcccttcgacgacaacgtgtgcctgcgagagccctgtgagaactacatgaaatgcgtgtccgtgctccgctttgactcgtccgcgcccttcctggcctcggcctccacgctgttccgacccatccagcccatcgctggcctgcgctgccgctgcccgcccggattcacgggagacttttgcgagaccgagctcgacctctgctactccaacccatgtcgcaacggcggagcctgcgcgcggcgcgagggaggctacacgtgcgtctgccgcccgcgcttcaccggagaggactgcgagctggacaccgaggccggccgctgcgtgccgggcgtctgccgcaacgggggcacctgcaccgacgcgcccaacggcggctttcgctgccagtgcccggcaggcggcgccttcgagggcccgcgctgcgaggtggctgcgcgctccttcccgcccagttcgttcgtcatgtttcgcggcctgcggcagcgattccaccttacgctgtccctctcgttcgcgacagtgcagcagagcgggctgctcttctacaacgggcgcctgaacgagaagcacgacttcctggccctggaactcgtggctggccaagtgcggctcacatattccacgggtgaatccaacaccgtggtcagccccacagttccagggggcttgagtgacgggcaatggcatacagtgcatctgagatactacaacaagccccggacagatgccctagggggtgcacagggcccctccaaggacaaggtggctgtgctaagcgtggatgattgtgatgtggccgtggctctgcagtttggtgctgagattggcaactactcatgcgcggctgctggtgtgcaaacaagctccaagaagtccctggacctgacgggccctcttcttctgggaggtgtccccaacctccccgagaacttccccgtatcccataaggacttcatcggctgtatgcgggacctgcacattgatggccgccgagtggacatggcggcttttgtcgcaaataatggcaccatggcaggctgccaagccaagctacacttttgtgactcaggcccctgcaagaacagtggcttctgctcggagcgctggggcagcttcagctgcgactgccctgtgggcttcggcggcaaagactgtcagcttactatggcccatccccaccatttccgtggcaacggcacactgagctggaactttggaagtgacatggctgtgtctgtgccatggtacctggggctggcatttcggacacgggcaacgcagggggtcctgatgcaagtgcaggctgggccacacagcacgctcctttgccagctagatcgggggttactgtctgtgacagtgaccaggggctcgggccgtgcttcccatctccttctggaccaggtgactgtcagtgatggccggtggcacgatctgcggctggagttgcaggaggaaccaggtggccggcggggccaccatgtccttatggtctcactggactttagcctcttccaggacaccatggcggtggggagtgagctgcagggcctgaaggtaaagcagctccacgtgggaggcctgccccccggcagtgcagaggaggctcctcagggtctggttggctgcatccagggggtgtggctcggctccacaccctctggctccccggccctgctaccccccagccaccgagtgaatgcggagcctggctgtgttgtgaccaacgcctgtgcctctgggccctgcccacctcacgcagactgccgggacctctggcagaccttttcttgcacctgccagccaggttactacggcccaggctgtgtggatgcctgcctcctgaacccctgtcagaaccagggatcatgccggcacctgccaggagccccccatggctatacctgtgactgtgtgggtggctatttcgggcaccactgtgagcacaggatggaccagcagtgcccacggggctggtgggggagcccaacctgtggcccctgcaactgtgatgttcacaaaggttttgatcccaactgcaacaagacaaatgggcagtgtcactgcaaggagttccactaccgaccgcggggcagtgactcttgcctcccatgtgactgctaccctgtgggctccacctcgcgctcatgtgcaccccacagcgggcagtgcccctgtcgcccaggagcccttggccgccagtgcaacagctgtgacagtcccttcgcagaggtgacagccagcggctgccgggtgctctatgatgcctgccctaagtccctgagatctggtgtgtggtggccccagacaaagtttggcgtcctggccacagtgccctgtccccggggggccctgggtgctgctgtgcggctgtgtgatgaggcccagggttggctggagcccgacctcttcaactgtacctcccctgcctttcgagagctcagtctgctgctggatggcctagagctgaacaagacggcactggataccatggaggccaagaagctggctcagcggctacgggaggtgactggccacactgaccactattttagccaagatgttcgagtcactgcccgcctgctggcccacctgctggccttcgagagccatcagcagggcttcgggctgacagccacacaggatgcccacttcaatgagaatctgctgtgggccggctctgcactgcttgccccagagacaggggacttgtgggcggcgctggggcagcgggcccctgggggctccccaggcagcgcgggactggtgaggcacctggaggagtatgcagccacactcgcaaggaatatggaactcacatacctgaatcccatggggctggtgacgcctaatatcatgctcagcattgaccgcatggagcaccccagttctccccggggggcccgtcgctaccctcgctaccatagcaacctctttcgaggccaggatgcctgggatcctcacacccatgtgctgctgccttcccagtccccacggccatccccatctgaagttctgcccacaagcagcagcatagaaaactccaccacctcaagtgtggtccccccaccagccccgccagagccagagcctgggatctccattatcattctcctcgtttaccgcaccttagggggactgctccctgcccagttccaggcagaacgccgaggtgccaggcttcctcagaaccccgtcatgaactccccggtggtcagcgtggctgtgttccacggacgcaacttcctaaggggaatcctggagtcccccatcagcctagagtttcgcctgctacagacagcgaatcggagcaaggcgatctgtgtgcagtgggacccacctggcctggcggagcagcatggtgtgtggacagcacgggactgcgagctggtgcacaggaatgggtcccacgcacggtgtcgctgcagccggacagggacctttggggtcctcatggatgcctctccccgtgagaggctggagggcgacctggagctgctggctgtgttcacccacgtggtcgtggctgtgtctgtggctgcgctggtgctgactgcagccatcctgctgagcctgcgcagcctcaagtccaatgtgcgtgggatccatgccaatgtggcagccgccctgggggtggcagagctcctcttcctgctggggattcacaggacccacaatcagctggtgtgcactgcagtcgccatcctcctgcactacttcttcctcagcaccttcgcgtggctcttcgtgcaggggctgcacctctaccgcatgcaggttgagccacgcaacgtggaccgcggcgccatgcgcttctaccatgccctgggctggggcgtccctgctgtgctgctgggccttgctgtgggcctggaccctgagggctatgggaaccctgacttctgctggatctcagtccacgagcccctcatctggagctttgctggccctgttgtcctggtcatagtgatgaacgggaccatgtttctcctcgctgcccgcacatcctgctccacagggcagagggaggccaagaagacctctgcactgacccttcgcagctccttcctgctgcttctgctggtcagtgcctcctggctctttgggctcctggcagtcaaccacagcatcctagccttccactacctccatgctggactctgcggcctccagggcctggcggtgctgctgctcttctgtgtcctaaatgcagatgctcgggctgcctggatgccagcctgtctgggcaggaaggcagcgcctgaggaggcaaggccagcacctgggctgggacctggggcctacaacaacacggctctctttgaggagagtggcctcatccgcatcactctgggcgcctccaccgtctcctctgtgagcagtgcccgctccggccggacccaggaccaggacagccagcggggccgcagctacctcagggacaatgtcctggttcgacatggctcagccgctgaccacactgaccacagcctccaggctcatgctggccccactgacctggacgtggccatgttccatcgagatgctggcgcagactccgactctgacagtgacctgtccttggaggaggagaggagtctctccattccatcttcagaaagcgaggacaatggccggacgcgggggcgcttccaacggccactctgccgagcagcccagagtgagaggctcctcacccaccccaaagatgtggatggcaatgacctcctgtcctactggccagccctgggggagtgcgaggcagccccctgtgctctgcagacttggggctctgaaaggcgcctggggctggacaccagcaaggatgcagctaacaacaaccagccagacccggccctgaccagtggggatgagacttctctgggccgggcccagcgccagaggaaaggcatcctgaagaaccggttgcaatacccactggtgccacagacccgaggtgcccctgagctgtcctggtgccgtgcagccaccttgggccaccgtgcagtgccagctgcctcttacggtcgcatctatgctggcgggggcacgggcagcctttcacagccagccagccgctactcttctagagaacagctggacctgctcctccggcggcaactgagccgtgagcgactagaggaagcccctgcccctgttctacgtcccctgagccggccagggtcccaggaatgcatggatgctgcaccaggccgactggagcccaaagatcggggcagcaccctgccacggaggcagccacctcgggactaccctggcgccatggctggccgcttcgggtcacgggatgcgctcgacttaggggcacctcgagagtggttgagcacgctgcctccgccccgccgcacccgggaccttgacccacagcccccacctctgcccctgtctccccagcggcaactctcaagggaccccctcttgccatcccggccgctggactctctgtctaggagctcgaactctcgggagcagctggaccaggtgcctagccggcacccctcacgagaagcccttgggccactcccgcagctgctcagagctagggaggactcggtcagtggccccagccatggcccctccacagaacagttggacattctttcctccatccttgcctctttcaactcctcggccctctcctctgtgcaatcttcaagcacacccttgggccctcacaccactgccacaccttctgccacagcctctgtgcttgggccctccacgccacgttctgccacgtctcacagcatctcggagctgtcgccagactcagaagttcccagaagtgagggtcactcctgaggggatgacggcgtggacgaggaacagctgagggcgacagaggatctaggctaacaggagagactccaggagtgggggcagatcccaaggcagcctcctgctccccagtggtgggtgccccagctctacctggtgtggcagggctgaggctccatgtgcatctgtgagcatgcgtgtgacaggtgcagagacgggggactggagggagacttttatacgttttgtacctttgtaaccagagagatgcttatgttatttttcagcttttctgtctcctggggggtttgaggctgggctgggagggggagggagatagagggagagatgcagtttgaccccatttgggtcctgagcaaaccctatgctcatctctctctccttcctggggtggactcagatgggtgggacacatgccttcctccccctattccacccccaagttgatctgagtatcgtcaggggcccaaagtacagaattgttctttgctttttattgaatgctccaaaggccaaacttctggggctgggggttggtcttggaaacaggggtcctctgacttcctcatgggggcttgctcataccgcccctcctggtggatgtgtgtgtttattatgtggagtccctgccacttactgccttatgacctaggactgatgctgtggggtgctggtggagcagctgatgtcgtgtttacagagcaaggcttccctgtctcccacggggaggggctcgggcctctagtcagacattcctgcagaggcgcaggactgaggatagtatggggtactgtaggctggggtggagcatggaggagatggggatgtctgaggggcctgggctatggggtcccagcatcccacaggggcatatgaggactttgagctgtgagatgcaaccccccaatagtcttcc

SEQ ID NO: 65365 - DNA, 9038 bp, Homo sapiens
agcgaaccatcggggcggccgggagccatgttggagcggcgggaggcggcagcagcgtcggggatgctgtggtgggggcggaaaaagccagggccgcacgccggaggggctccggccgcggagtagatggtgcccagagggcggcgggggtgcggagagacaggcggaggggcgggggcccggggcggcggcaggggcccgggagggggcccgagcggcggggccagcccaaggcccggaccggggcggggggcggtggaggccgtgcagggaggcgggagatgatggcgaggcggccgccgtggcggggcctcggggaacggtcgacccccatactcctgctccttctcctctctttgttccccctcagccaggaggagctggggggcggtgggcaccagggctgggacccaggcttagctgccactacggggccaagggcgcatatcggtggcggagccttagctctttgtccggagtcttccggggtccgggaggatggggggcctggcctgggggtcagggagcctatcttcgtggggctccgagggagaaggcaaagcgcccggaatagtcgagggccccctgagcagccgaatgaggagctggggattgaacacggcgtccagccattgggcagccgcgaacgagagacaggacagggaccagggtctgtgttatactggcgcccagaggtctcctcttgcgggcggacaggacctttgcaaagaggtagtctgtcaccaggggctctgtcctcaggggtcccgggctcggggaacagctcgcccctcccttcagactttttgattcggcaccacggtcccaagccggtgtcctcccagcggaacgctgggacaggctcccgcaaaagagtgggcaccgcgcgctgctgtggggaattatgggcaacagggagcaagggtcagggcgagagagccacgacatccggagcagaaaggacagccccccggcggaactgtcttccaggggcctcgggatctggccccgagctggattcagcaccacgcacggcgaggacagctcctgcatcaggttcagcaccccgcgagtctcggacagctcccgagccggcgcccaagcgcatgcgctcccggggtctcttccgctgccgcttcctcccgcagcgccccgggccgcgtcccccgggactcccggcccgtcctgaagccaggaaagtaacctcggcgaaccgggcacgctttcgtcgcgccgcaaaccgccacccgcagtttccgcagtacaactaccagacgctggtgccggagaatgaggcagcaggcaccgcggtgctacgcgtggttgctcaggacccggacgccggcgaggccgggcgcctagtctactcgctggcggcactcatgaacagccgctcgctggagctgttcagcatcgacccgcagagcggccttatccgtacggcggcagctctggaccgcgagagcatggagcgtcactacctgcgtgtgaccgcgcaggaccacgggtcgccgcgcctctcggccaccacgatggtggccgtgacagtagccgaccgcaacgaccactcgccggtttttgagcaagcgcagtaccgggagacccttcgcgagaatgtggaggagggctaccctatcctgcagctgcgtgccactgacggcgacgcgccccccaacgccaacctgcgctaccgcttcgtggggccgccagctgcgcgcgctgcagctgccgccgccttcgagattgatccacgctccggcctcatcagcaccagcggccgagtggaccgcgagcacatggaaagctatgagctggtggtggaagccagcgaccagggccaggaacccgggccgcgctcggccactgtgcgcgtacacataactgtgctagacgagaacgacaatgctcctcagttcagcgagaagcgctacgtggcgcaggtgcgcgaggatgtgcgcccccacacagtcgtgctgcgcgtcacggccactgaccgggacaaggacgccaacggattggtgcactacaacatcatcagtggcaatagccgtggacactttgccatcgacagcctcactggcgagatccaggtggtggcacctctggacttcgaggcagagagagagtatgccttgcgcatcagggcgcaggatgctggccggccaccgctgtccaacaacacgggcctggccagcatccaggtggtggacatcaatgaccacattcctatttttgtcagcacgcccttccaagtttctgtcttggaaaatgctcccttgggtcactcagtcatccacattcaggcagtcgatgcagaccatggggagaatgccagattggagtactccctaactggtgtggcacctgatactccttttgtgataaacagcgccactggctgggtctctgtgagtggtcccctggaccgtgagtctgtggagcattacttctttggtgtggaggctcgagaccatggctcacccccactctctgcctcagccagtgtcaccgtgactgtgctggacgttaatgacaatcggcctgagttcacaatgaaggagtaccacctacgactgaatgaggatgcagctgtgggcaccagtgtggtcagcgtgaccgcagtagaccgtgatgccaacagtgccatcagctaccagatcacaggcggcaacacccggaatcgctttgccatcagcacccaggggggtgtgggtctggtgactctggctctgccactggactacaagcaggaacgctacttcaagctggtactaactgcatctgaccgtgcccttcatgatcactgctatgtgcacatcaacatcacagatgccaacactcatcggccggtctttcaaagtgcccactactcagtgagtgtgaatgaagatcggccaatgggtagcaccatagtggtcatcagtgcctctgatgatgacgtgggtgagaatgctcgtatcacctatctcctggaggacaacctgccccagttccgcattgatgcagactcaggagccattacattacaggccccattagactatgaggaccaggtgacctacaccctggctatcacagctcgggacaatggcatcccacagaaggcagacactacttatgtggaggtgatggtcaatgacgtgaatgacaatgctccacaatttgtggcctcccactatacagggctggtctctgaggatgccccacctttcaccagtgtcctgcagatctcagccactgaccgggatgctcatgccaatggccgggtccagtacactttccagaatggtgaagatggggatggagattttaccattgagcccacctctggaattgtccgtacagtaaggcggctagaccgggaggcagtatcagtgtatgagttgactgcctacgcagtggacagaggtgtgcccccactccggactccagtcagtatccaggtgatggtgcaggatgtgaacgacaatgcacctgtcttcccagctgaggagtttgaggtgcgggtgaaagagaatagcattgtgggctcagtggtggcccagatcactgcagtggaccctgacgaaggccccaatgcccatataatgtaccagatcgtggaggggaacatccctgagctgttccaaatggacatcttctctggagaactgacggcactcattgacctagactatgaggctcgccaagaatatgtgattgtggtgcaggccacatctgctcctttggtcagccgggccactgtgcacgtccgcctggttgaccagaatgacaacagccctgtgctcaacaacttccagatcctcttcaacaactatgtatccaaccgttcagacaccttcccgtcgggcattattgggcgcatcccagcttatgaccccgatgtctccgaccacctcttctactcctttgagcgtggcaatgagctgcagctgctggtagtcaaccagaccagtggggagctgcgactcagccgaaagctagacaataaccgcccactggtggcctccatgttggtgactgtcacagatggcctgcacagcgtgacggcgcagtgtgtgctgcgcgtggtcatcatcacggaggagttgctggccaacagcctgaccgtgcgccttgagaacatgtggcaggagcgcttcctgtcaccgctgctgggccgcttcctcgagggcgtggctgcggtgctcgctacgcccgctgaggacgtcttcatcttcaacatccagaacgacacagacgtagggggcaccgtgctcaatgtgagtttctcggcgctagctccacgtggggccggggcgggcgctgcagggccctggttcagctccgaggagctgcaggagcagttgtacgtgcgccgggcggcgctggcggctcgctccctgctcgacgtactgcccttcgacgacaacgtgtgcctgcgagagccctgtgagaactacatgaaatgcgtgtccgtgctccgctttgactcgtccgcgcccttcctggcctcggcctccacgctgttccgacccatccagcccatcgctggcctgcgctgccgctgcccgcccggattcacgggagacttttgcgagaccgagctcgacctctgctactccaacccatgtcgcaacggcggagcctgcgcgcggcgcgagggaggctacacgtgcgtctgccgcccgcgcttcaccggagaggactgcgagctggacaccgaggccggccgctgcgtgccgggcgtctgccgcaacgggggcacctgcaccgacgcgcccaacggcggctttcgctgccagtgcccggcaggcggcgccttcgagggcccgcgctgcgaggtggctgcgcgctccttcccgcccagttcgttcgtcatgtttcgcggcctgcggcagcgattccaccttacgctgtccctctcgttcgcgacagtgcagcagagcgggctgctcttctacaacgggcgcctgaacgagaagcacgacttcctggccctggaactcgtggctggccaagtgcggctcacatattccacgggtgaatccaacaccgtggtcagccccacagttccagggggcttgagtgacgggcaatggcatacagtgcatctgagatactacaacaagccccggacagatgccctagggggtgcacagggcccctccaaggacaaggtggctgtgctaagcgtggatgattgtgatgtggccgtggctctgcagtttggtgctgagattggcaactactcatgcgcggctgctggtgtgcaaacaagctccaagaagtccctggacctgacgggccctcttcttctgggaggtgtccccaacctccccgagaacttccccgtatcccataaggacttcatcggctgtatgcgggacctgcacattgatggccgccgagtggacatggcggcttttgtcgcaaataatggcaccatggcaggctgccaagccaagctacacttttgtgactcaggcccctgcaagaacagtggcttctgctcggagcgctggggcagcttcagctgcgactgccctgtgggcttcggcggcaaagactgtcagcttactatggcccatccccaccatttccgtggcaacggcacactgagctggaactttggaagtgacatggctgtgtctgtgccatggtacctggggctggcatttcggacacgggcaacgcagggggtcctgatgcaagtgcaggctgggccacacagcacgctcctttgccagctagatcgggggttactgtctgtgacagtgaccaggggctcgggccgtgcttcccatctccttctggaccaggtgactgtcagtgatggccggtggcacgatctgcggctggagttgcaggaggaaccaggtggccggcggggccaccatgtccttatggtctcactggactttagcctcttccaggacaccatggcggtggggagtgagctgcagggcctgaaggtaaagcagctccacgtgggaggcctgccccccggcagtgcagaggaggctcctcagggtctggttggctgcatccagggggtgtggctcggctccacaccctctggctccccggccctgctaccccccagccaccgagtgaatgcggagcctggctgtgttgtgaccaacgcctgtgcctctgggccctgcccacctcacgcagactgccgggacctctggcagaccttttcttgcacctgccagccaggttactacggcccaggctgtgtggatgcctgcctcctgaacccctgtcagaaccagggatcatgccggcacctgccaggagccccccatggctatacctgtgactgtgtgggtggctatttcgggcaccactgtgagcacaggatggaccagcagtgcccacggggctggtgggggagcccaacctgtggcccctgcaactgtgatgttcacaaaggttttgatcccaactgcaacaagacaaatgggcagtgtcactgcaaggagttccactaccgaccgcggggcagtgactcttgcctcccatgtgactgctaccctgtgggctccacctcgcgctcatgtgcaccccacagcgggcagtgcccctgtcgcccaggagcccttggccgccagtgcaacagctgtgacagtcccttcgcagaggtgacagccagcggctgccgggtgctctatgatgcctgccctaagtccctgagatctggtgtgtggtggccccagacaaagtttggcgtcctggccacagtgccctgtccccggggggccctgggtgctgctgtgcggctgtgtgatgaggcccagggttggctggagcccgacctcttcaactgtacctcccctgcctttcgagagctcagtctgctgctggatggcctagagctgaacaagacggcactggataccatggaggccaagaagctggctcagcggctacgggaggtgactggccacactgaccactattttagccaagatgttcgagtcactgcccgcctgctggcccacctgctggccttcgagagccatcagcagggcttcgggctgacagccacacaggatgcccacttcaatgagaatctgctgtgggccggctctgcactgcttgccccagagacaggggacttgtgggcggcgctggggcagcgggcccctgggggctccccaggcagcgcgggactggtgaggcacctggaggagtatgcagccacactcgcaaggaatatggaactcacatacctgaatcccatggggctggtgacgcctaatatcatgctcagcattgaccgcatggagcaccccagttctccccggggggcccgtcgctaccctcgctaccatagcaacctctttcgaggccaggatgcctgggatcctcacacccatgtgctgctgccttcccagtccccacggccatccccatctgaagttctgcccacaagcagcagcatagaaaactccaccacctcaagtgtggtccccccaccagccccgccagagccagagcctgggatctccattatcattctcctcgtttaccgcaccttagggggactgctccctgcccagttccaggcagaacgccgaggtgccaggcttcctcagaaccccgtcatgaactccccggtggtcagcgtggctgtgttccacggacgcaacttcctaaggggaatcctggagtcccccatcagcctagagtttcgcctgctacagacagcgaatcggagcaaggcgatctgtgtgcagtgggacccacctggcctggcggagcagcatggtgtgtggacagcacgggactgcgagctggtgcacaggaatgggtcccacgcacggtgtcgctgcagccggacagggacctttggggtcctcatggatgcctctccccgtgagaggctggagggcgacctggagctgctggctgtgttcacccacgtggtcgtggctgtgtctgtggctgcgctggtgctgactgcagccatcctgctgagcctgcgcagcctcaagtccaatgtgcgtgggatccatgccaatgtggcagccgccctgggggtggcagagctcctcttcctgctggggattcacaggacccacaatcagctggtgtgcactgcagtcgccatcctcctgcactacttcttcctcagcaccttcgcgtggctcttcgtgcaggggctgcacctctaccgcatgcaggttgagccacgcaacgtggaccgcggcgccatgcgcttctaccatgccctgggctggggcgtccctgctgtgctgctgggccttgctgtgggcctggaccctgagggctatgggaaccctgacttctgctggatctcagtccacgagcccctcatctggagctttgctggccctgttgtcctggtcatagtgatgaacgggaccatgtttctcctcgctgcccgcacatcctgctccacagggcagagggaggccaagaagacctctgcactgacccttcgcagctccttcctgctgcttctgctggtcagtgcctcctggctctttgggctcctggcagtcaaccacagcatcctagccttccactacctccatgctggactctgcggcctccagggcctggcggtgctgctgctcttctgtgtcctaaatgcagatgctcgggctgcctggatgccagcctgtctgggcaggaaggcagcgcctgaggaggcaaggccagcacctgggctgggacctggggcctacaacaacacggctctctttgaggagagtggcctcatccgcatcactctgggcgcctccaccgtctcctctgtgagcagtgcccgctccggccggacccaggaccaggacagccagcggggccgcagctacctcagggacaatgtcctggttcgacatggctcagccgctgaccacactgaccacagcctccaggctcatgctggccccactgacctggacgtggccatgttccatcgagatgctggtggagttggggcctggggcagggaggagggaggcagaggatctctccccatccccttttcttctaccccatactgggagcagtggctgact

SEQ ID NO: 65366 - DNA, 15396 bp, Homo sapiens
tctacctcgcgggtgcctctggtgtctccagaggtctccgaccccagcccgcccccagccctcccgcccagcccgcagccccctccctctgttccccgacctcagaccctgggcttccgacctcgacatcatgggtgacgcagaaggcgaagacgaggtccagttcctgcggacggacgatgaggtggtcctgcagtgcagcgctaccgtgctcaaggagcagctcaagctctgcctggccgccgagggcttcggcaaccgcctgtgcttcctggagcccactagcaacgcgcagaatgtgccccccgatctggccatctgttgcttcgtcctggagcagtccctgtctgtgcgagccctgcaggagatgctggctaacacggtggaggctggcgtggagtcatcccagggcgggggacacaggacgctcctgtatggccatgccatcctgctccggcatgcacacagccgcatgtatctgagctgcctcaccacctcccgctccatgactgacaagctggccttcgatgtgggactgcaggaggacgcaacaggagaggcttgctggtggaccatgcacccagcctccaagcagaggtctgaaggagaaaaggtccgcgttggggatgacatcatccttgtcagtgtctcctccgagcgctacctgcacctgtcgaccgccagtggggagctccaggttgacgcttccttcatgcagacactgtggaacatgaaccccatctgctcccgctgcgaagagggcttcgtgacgggaggtcacgtcctccgcctctttcatggacatatggatgagtgtctgaccatttcccctgctgacagtgatgaccagcgcagacttgtctactatgaggggggagctgtgtgcactcatgcccgctccctctggaggctggagccactgagaatcagctggagtgggagccacctgcgctggggccagccactccgagtccggcatgtcactaccgggcagtacctagcgctcaccgaggaccagggcctggtggtggttgacgccagcaaggctcacaccaaggctacctccttctgcttccgcatctccaaggagaagctggatgtggcccccaagcgggatgtggagggcatgggcccccctgagatcaagtacggggagtcactgtgcttcgtgcagcatgtggcctcaggactgtggctcacctatgccgctccagaccccaaggccctgcggctcggcgtgctcaagaagaaggccatgctgcaccaggagggccacatggacgacgcactgtcgctgacccgctgccagcaggaggagtcccaggccgcccgcatgatccacagcaccaatggcctatacaaccagttcatcaagagcctggacagcttcagcgggaagccacggggctcggggccacccgctggcacggcgctgcccatcgagggcgttatcctgagcctgcaggacctcatcatctacttcgagcctccctccgaggacttgcagcacgaggagaagcagagcaagctgcgaagcctgcgcaaccgccagagcctcttccaggaggaggggatgctctccatggtcctgaattgcatagaccgcctaaatgtctacaccactgctgcccactttgctgagtttgcaggggaggaggcagccgagtcctggaaagagattgtgaatcttctctatgaactcctagcttctctaatccgtggcaatcgtagcaactgtgccctcttctccacaaacttggactggctggtcagcaagctggatcggctggaggcctcgtctggcatcctggaggtcctgtactgtgtcctcattgagagtccagaggttctgaacatcatccaggagaatcacatcaagtccatcatctccctcctggacaagcatgggaggaaccacaaggtcctggacgtgctatgctccctgtgtgtgtgtaatggtgtggctgtacgctccaaccaagatcttattactgagaacttgctgcctggccgtgagcttctgctgcagacaaacctcatcaactatgtcaccagcatccgccccaacatctttgtgggccgagcggaaggcaccacgcagtacagcaaatggtactttgaggtgatggtggacgaggtgactccatttctgacagctcaggccacccacttgcgggtgggctgggccctcaccgagggctacaccccctaccctggggccggcgagggctggggcggcaacggggtcggcgatgacctctattcctacggctttgatggactgcatctctggacaggacacgtggcacgcccagtgacttccccagggcagcacctcctggcccctgaagacgtgatcagctgctgcctggacctcagcgtgccgtccatctccttccgcatcaacggctgccctgtgcagggtgtctttgagtccttcaacctggacgggctcttcttccctgttgtcagcttctcggctggtgtcaaggtgcggttcctccttggtggccgccatggtgaattcaagttcctgcccccacctggctatgctccatgccatgaggctgtgctccctcgagagcgactccatcttgaacccatcaaggagtatcgacgggaggggccccgggggcctcacctggtgggccccagtcgctgcctctcacacaccgacttcgtgccctgccctgtggacactgtccagattgtcctgccgccccatctggagcgcattcgggagaagctggcggagaacatccacgagctctgggcgctaacccgcatcgagcagggctggacctacggcccggttcgggatgacaacaagaggctgcacccgtgtcttgtggacttccacagccttccagagcctgagaggaactacaacctgcagatgtctggggagacgctcaagactctgctggctctgggctgccacgtgggcatggcggatgagaaggcggaggacaacctgaagaagacaaaactccccaagacgtatatgatgagcaatgggtacaagccggctccgctggacctgagccacgtgcggctgacgccggcgcagacaacactggtggaccgtctggcagaaaatgggcacaacgtgtgggcccgagaccgcgtgggccagggctggagctacagcgcagtgcaggacatcccagcgcgccgaaaccctcggctggtgccctaccgcctgctggatgaagccaccaagcgcagcaaccgggacagcctctgccaggccgtgcgcaccctcctgggctacggctacaacatcgagcctcctgaccaggagcccagtcaggtggagaaccagtctcgttgtgaccgggtgcgcatcttccgggcagagaaatcctatacagtgcagagcggccgctggtacttcgagtttgaagcagtcaccacaggcgagatgcgcgtgggctgggcgaggcccgagctgaggcctgatgtagagctgggagctgacgagctggcctatgtcttcaatgggcaccgcggccagcgctggcacttgggcagtgaaccatttgggcgcccctggcagccgggcgatgtcgttggctgtatgatcgacctcacagagaacaccattatcttcaccctcaatggcgaggtcctcatgtctgactcaggctccgaaacagccttccgggagattgagattggggacggcttcctgcccgtctgcagcttgggacctggccaggtgggtcatctgaacctgggccaggacgtgagctctctgaggttctttgccatctgtggcctccaggaaggcttcgagccatttgccatcaacatgcagcgcccagtcaccacctggttcagcaaaggcctgccccagtttgagccagtgccccttgaacaccctcactatgaggtatcccgagtggacggcactgtggacacgcccccctgcctgcgcctgacccaccgcacctggggctcccagaacagcctggtggagatgcttttcctgcggctgagcctcccagtccagttccaccagcacttccgctgcactgcaggggccaccccgctggcacctcctggcctgcagccccccgccgaggacgaggcccgggcggcggaacccgaccctgactacgaaaacctgcgccgctcagctgggggctggagcgaggcagagaacggcaaagaagggactgcgaaggagggcgcccccgggggcaccccgcaggcggggggagaggcgcagcccgccagggcggagaatgagaaggatgccaccaccgagaagaacaagaagagaggcttcttattcaaggccaagaaggtcgccatgatgacccagccaccggccacccccacgctgccccgactccctcacgacgtggtgcctgcagacaaccgcgatgaccccgagatcatcctcaacaccaccacgtactattactccgtgagggtctttgctggacaggagcccagctgcgtgtgggcgggctgggtcacccctgactaccatcagcacgacatgagcttcgacctcagcaaggtccgggtcgtgacggtgaccatgggggatgaacaaggcaacgtccacagcagcctcaagtgtagcaactgctacatggtgtggggcggagactttgtgagtcccgggcagcagggccggatcagccacacggaccttgtcattgggtgcctggtggacttggccactggcttaatgacctttacagccaatggcaaagagagcaacacctttttccaggtggaacccaacactaagctatttcctgccgtcttcgtcctgcccacccaccagaacgtcatccagtttgagctggggaagcagaagaacatcatgccgttgtcagccgccatgttccaaagcgagcgcaagaacccggccccgcagtgcccaccgcggctggagatgcagatgctgatgccagtgtcctggagccgcatgcccaaccacttcctgcaggtggagacgaggcgtgccggcgagcggctgggctgggccgtgcagtgccaggagccgctgaccatgatggcgctgcacatccccgaggagaaccggtgcatggacatcctggagctgtcggagcgcctggacctgcagcgcttccactcgcacaccctgcgcctctaccgcgctgtgtgcgccctgggcaacaatcgcgtggcgcacgctctgtgcagccacgtagaccaagctcagctgctgcacgccctggaggacgcgcacctgccaggcccactgcgcgcaggctactatgacctcctcatcagcatccacctcgaaagtgcctgccgcagccgccgctccatgctctctgaatacatcgtgcccctcacgcctgagacccgcgccatcacgctcttccctcctggaaggagcacagaaaatggtcacccccggcatggcctgccgggagttggagtcaccacttcgctgaggcccccgcatcatttctcgcccccctgtttcgtggccgctctgccagctgctggggcagcagaggccccggcccgcctcagccctgccatcccgctggaggccctgcgggacaaggcactgaggatgctgggggaggcggtgcgcgacggtgggcagcacgctcgcgaccccgtcggggcctccgtggagttccagtttgtgcctgtgctcaagctcgtgtccaccctgctggtgatgggcatctttggcgatgaggatgtgaaacagatcttgaagatgattgagcctgaggtcttcactgaggaagaagaggaggaggacgaggaggaagagggtgaagaggaagatgaggaggagaaggaggaggatgaggaggaaacagcacaggaaaaggaagatgaggaaaaagaggaagaggaggcagcagaaggggagaaagaagaaggcttggaggaagggctgctccagatgaagttgccagagtctgtgaagttacagatgtgccacctgctggagtatttctgtgaccaagagctgcagcaccgtgtggagtccctggcagcctttgcggagcgctatgtggacaagctccaggccaaccagcggagccgctatggcctcctcataaaagccttcagcatgaccgcagcagagactgcaagacgtacccgcgagttccgctccccaccccaggaacagatcaatatgctattgcaattcaaagatggtacagatgaggaagactgtcctctccctgaagagattcgacaggatttgcttgactttcatcaagacctgctggcacactgtggaattcagctagatggagaggaggaggaaccagaggaagagaccaccctgggcagccgcctcatgagcctgttggagaaagtgcggctggtgaagaagaaggaagagaaacctgaggaggagcggtcagcagaggagagcaaaccccggtccctgcaggagctggtgtcccacatggtggtgcgctgggcccaagaggacttcgtgcagagccccgagctggtgcgggccatgttcagcctcctgcaccggcagtacgacgggctgggtgagctgctgcgtgccctgccgcgggcgtacaccatctcaccgtcctccgtggaagacaccatgagcctgctcgagtgcctcggccagatccgctcgctgctcatcgtgcagatgggcccccaggaggagaacctcatgatccagagcatcgggaacatcatgaacaacaaagtcttctaccaacacccgaacctgatgagggcgctgggcatgcacgagacggtcatggaggtcatggtcaacgtcctcgggggcggcgagtccaaggagatccgcttccccaagatggtgacaagctgctgccgcttcctctgctatttctgccgaatcagccggcagaaccagcgctccatgtttgaccacctgagctacctgctggagaacagtggcatcggcctgggcatgcagggctccacgcccctggacgtggctgctgcctccgtcattgacaacaatgagctggccttggcattgcaggagcaggacctggaaaaggttgtgtcctacctggcaggctgtggcctccagagctgccccatgcttgtggccaaagggtacccagacattggctggaacccctgtggtggagagcgctacctggacttcctgcgctttgctgtcttcgtcaacggcgagagcgtggaggagaacgccaatgtggtggtgcggctgctcatccggaagcctgagtgcttcggacccgccctgcggggtgagggtggctcagggctgctggctgccatcgaagaggccatccgcatctccgaggaccctgcgagggatggcccaggcatccgcagggaccggcggcgcgagcactttggtgaggaaccgcctgaagaaaaccgggtgcacctgggacacgccatcatgtccttctatgccgccttgatcgacctgctcggacgctgtgcaccagagatgcatctaatccaagccggcaagggtgaggccctgcggatccgcgccatcctccgctcccttgtgcccttggaggaccttgtgggcatcatcagcctcccactgcagattcccaccctgggcaaagatggggctctggtgcagccaaagatgtcagcatccttcgtgccggaccacaaggcgtccatggtgctcttcctggaccgtgtgtatggcatcgagaaccaggacttcttgctgcacgtgctggacgtggggttcctgcccgacatgagggcagccgcctcgctggacacggccactttcagcaccaccgagatggcgctggccgtgaaccgctacctgtgcctggccgtgctgccgctcatcaccaagtgtgcgccgctctttgcgggcacagaacaccgcgccatcatggtggactctatgctgcataccgtgtaccgcctgtctcggggtcgttcgctcaccaaggcgcagcgtgacgtcatcgaggactgcctcatgtcgctctgcaggtacatccgcccgtcgatgctgcagcacctgttgcgccgcctggtgttcgacgtgcccatcctcaacgagttcgccaagatgccactcaagctcctcaccaaccactatgagcgctgttggaagtactactgcctacccacgggctgggccaacttcggggtcacctcagaggaggagctgcacctcacacggaaactcttctggggcatctttgactctctggcccataagaaatacgacccggagctgtaccgcatggccatgccttgtctgtgcgccattgccggggctctgccccccgactatgtggatgcctcatactcatctaaggcagagaaaaaggccacagtggatgctgaaggcaactttgatccccggcctgtggagaccctcaatgtgatcatcccggagaagctggactccttcattaacaagtttgcggagtacacacacgagaagtgggccttcgacaagatccagaacaactggtcctatggagagaacatagacgaggagctgaagacccaccccatgctgaggccctacaagaccttttcagagaaggacaaagagatttaccgctggcccatcaaggagtccctgaaggccatgattgcctgggaatggacgatagagaaggccagggagggtgaggaggagaagacggaaaagaaaaaaacgcggaagatatcacaaagtgcccagacctatgatcctcgagaaggctacaaccctcagccccccgaccttagtgctgttaccctgtcccgggagctgcaggccatggcagaacaactggcagaaaattaccacaacacgtggggacggaagaagaagcaggagctggaagccaaaggcggtgggacccaccccctgctggtcccctacgacacgctcacggccaaggagaaggcacgagatcgagagaaggcccaggagctactgaaattcctgcagatgaatggctacgcggttacaagaggccttaaggacatggaactggactcgtcttccattgaaaagcggtttgcctttggcttcctgcagcagctgctgcgctggatggacatttctcaggagttcattgcccacctggaggctgtggtcagcagtgggcgagtggaaaagtccccacatgaacaggagattaaattctttgccaagatcctgctccctttgatcaaccagtacttcaccaaccactgcctctatttcttgtccactccggctaaagtgctgggcagcggtggccacgcctctaacaaggagaaggaaatgatcaccagcctcttctgcaaacttgctgctctcgtccgccaccgagtctctctctttgggacagacgccccagctgtggtcaactgtcttcacatcctggcccgctccctggatgccaggacagtgatgaagtcaggccctgagatcgtgaaggctggcctccgctccttcttcgagagtgcctcggaggacatcgagaagatggtggagaacctgcggctgggcaaggtgtcgcaggcgcgcacccaggtgaaaggcgtgggccagaacctcacctacaccactgtggcactgctgccggtcctcaccaccctcttccagcacatcgcccagcaccagttcggagatgacgtcatcctggacgacgtccaggtctcttgctaccgaacgctgtgcagtatctactccctgggaaccaccaagaacacttatgtggaaaagcttcggccagccctcggggagtgcctggcccgtctggcagcagccatgccggtggcgttcctggagccgcagctgaacgagtacaacgcctgctccgtgtacaccaccaagtctccgcgggagcgggccatcctggggctccccaacagtgtggaggagatgtgtcccgacatcccggtgctggagcggctcatggcagacattggggggctggccgagtcaggtgcccgctacacagagatgccgcatgtcatcgagatcacgctgcccatgctatgcagctacctgccccgatggtgggagcgcgggcccgaggcacccccttccgccctgcccgccggcgcccccccaccctgcacagctgtcacctctgaccacctcaactccctgctggggaatatcctgagaatcatcgtcaacaacctgggcattgacgaggcctcctggatgaagcggctggctgtgttcgcacagcccattgtgagccgtgcacggccggagctcctgcagtcccacttcatcccaactatcgggcggctgcgcaagagggcagggaaggtggtgtccgaggaggagcagctgcgcctggaggccaaggcggaggcccaggagggcgagctgctggtgcgggacgagttctctgtgctctgccgggacctctacgccctgtatccgctgctcatccgctacgtggacaacaacagggcgcagtggctgacggagccgaatcccagcgcggaggagctgttcaggatggtgggcgagatcttcatctactggtccaagtcccacaacttcaagcgcgaggagcagaactttgtggtccagaatgagatcaacaacatgtccttcctgactgctgacaacaaaagcaaaatggctaaggtcggggagtccggtggctcggaccaggaacgcaccaagaagaagcgccggggggaccggtactctgtgcagacgtcactgatcgtggccacactgaagaagatgctgcccatcggcctgaatatgtgtgcgcccaccgaccaagacctcatcacgctggccaagacccgttacgccctgaaagacacagatgaggaggtccgggaatttctgcacaacaaccttcaccttcagggaaaggtcgaaggctccccgtctctgcgctggcagatggctctgtaccggggcgtcccgggtcgcgaggaggacgccgatgaccccgagaaaatcgtgcgcagagtccaggaagtgtcagccgtgctctactacctggaccagaccgagcacccttacaagtctaagaaggccgtgtggcacaagcttttgtccaaacagcgccggcgggcagtcgtggcctgtttccgtatgacgcccctgtacaacctgcccacgcaccgggcatgtaacatgttcctggagagctacaaggctgcatggatcctgactgaagaccacagttttgaggaccgcatgatagatgacctttcaaaagctggggagcaggaggaggaggaggaagaggtggaagagaagaagccagaccccctgcaccagttggtcctgcacttcagccgcactgccctgacggaaaagagcaaactggatgaggattacctgtacatggcctatgctgatatcatggcaaagagctgccacctggaggagggaggggagaacggtgaagctgaagaggaggttgaggtctcctttgaggagaaacagatggagaagcagaggctcttgtaccagcaagcacggctgcacacccggggggcggccgagatggtgctgcagatgatcagtgcctgcaaaggagagacaggtgccatggtgtcctccaccctgaagctgggcatctccatcctcaatggaggcaatgctgaggtccagcagaaaatgctggattatcttaaggacaagaaggaagttggcttcttccagagtatccaggcactgatgcaaacatgcagcgtcctggatctcaatgcctttgagagacagaacaaggccgaggggctgggcatggtgaatgaggatggcactgtcatcaatcgccagaacggagagaaggtcatggcggatgatgaattcacacaagacctgttccgattcctacaattgctctgtgaggggcacaataatgatttccagaactacctacggacacagacagggaacacgaccactattaacatcatcatttgcactgtggactacctcctgcggctgcaggaatccatcagcgacttctactggtactactcgggcaaggatgtcattgaagagcagggcaagaggaacttctccaaagccatgtcggtggctaagcaggtgttcaacagcctcactgagtacatccagggtccctgcaccgggaaccagcagagcctggcgcacagtcgcctatgggacgcagtggtgggattcctgcacgtgttcgcccacatgatgatgaagctcgctcaggactcaagccagatcgagctgctgaaggagctgctggatctgcagaaggacatggtggtgatgttgctgtcgctactagaagggaacgtggtgaacggcatgatcgcccggcagatggtggacatgctcgtggaatcctcatccaatgtggagatgatcctcaagttcttcgacatgttcctgaaactcaaggacattgtgggctctgaagccttccaggactacgtaacggatccccgtggcctcatctccaagaaggacttccagaaggccatggacagccagaagcagttcagcggtccagaaatccagttcctgctttcgtgctccgaagcggatgagaacgaaatgatcaactgcgaagagttcgccaaccgcttccaggagccagcacgcgacatcggcttcaacgtggcggtgctgctgaccaacctgtcggagcatgtgccgcatgaccctcgcctgcacaacttcctggagctggccgagagcatccttgagtacttccgcccctacctgggccgcatcgagatcatgggcgcgtcacgccgcatcgagcgcatctacttcgagatctcagagaccaaccgcgcccagtgggagatgccccaggtgaaggagtccaagcgccagttcatcttcgacgtggtgaacgagggcggcgaggctgagaagatggagctcttcgtgagtttctgcgaggacaccatcttcgagatgcagatcgccgcgcagatctcggagcccgagggcgagccggagaccgacgaggacgagggcgcgggcgcggcggaggcgggcgcggaaggcgcggaggagggcgcggcggggctcgagggcacggcggccacggcggcggcgggggcgacggcgcgggttgtggcggccgcaggccgggccctgcgaggcctcagctaccgcagcctgcggcggcgcgtgcggcggctgcggcggcttacggcccgcgaggcggccaccgcagtggcggcgctgctctgggcagcagtgacgcgcgctggggccgctggcgcgggggcggcggcgggcgcgctgggcctgctctggggctcgctgttcggcggcggcctggtggagggcgccaagaaggtgacggtgaccgagctcctggcaggcatgcccgaccccaccagcgacgaggtgcacggcgagcagccggccgggccgggcggagacgcagacggcgagggtgccagcgagggcgctggagacgccgcggagggcgctggagacgaggaggaggcggtgcacgaggccgggccgggcggtgccgacggggcggtggccgtgaccgatgggggccccttccggcccgaaggggctggcggtctcggggacatgggggacacgacgcctgcggaaccgcccacacccgagggctctcccatcctcaagaggaaattgggggtggatggagtggaggaggagctcccgccagagccagagcccgagccggaaccagagctggagccggagaaagccgatgccgagaatggggagaaggaagaagttcccgagcccacaccagagccccccaagaagcaagcacctccctcaccccctccaaagaaggaggaagctggaggcgaattctggggagaactggaggtgcagagggtgaagttcctgaactacctgtcccggaacttttacaccctgcggttccttgccctcttcttggcatttgccatcaacttcatcttgctgttttataaggtctcagactctccaccaggggaggacgacatggaaggctcagctgctggggatgtgtcaggtgcaggctctggtggcagctctggctggggcttgggggccggagaggaggcagagggcgatgaggatgagaacatggtgtactacttcctggaggaaagcacaggctacatggaacccgccctgcggtgtctgagcctcctgcatacactggtggcctttctctgcatcattggctataattgtctcaaggtgcccctggtaatctttaagcgggagaaggagctggcccggaagctggagtttgatggcctgtacatcacggagcagcctgaggacgatgacgtgaaggggcagtgggaccgactggtgctcaacacgccgtctttccctagcaactactgggacaagtttgtcaagcgcaaggtcctggacaaacatggggacatctacgggcgggagcggattgctgagctactgggcatggacctggccacactagagatcacagcccacaatgagcgcaagcccaacccgccgccagggctgctgacctggctcatgtccatcgatgtcaagtaccagatctggaagttcggggtcatcttcacagacaactccttcctgtacctgggctggtatatggtgatgtccctcttgggacactacaacaacttcttctttgctgcccatctcctggacatcgccatgggggtcaagacgctgcgcaccatcctgtcctctgtcacccacaatgggaaacagctggtgatgaccgtgggccttctggcggtggtcgtctacctgtacaccgtggtggccttcaacttcttccgcaagttctacaacaagagcgaggatgaggatgaacctgacatgaagtgtgatgacatgatgacgtgttacctgtttcacatgtacgtgggtgtccgggctggcggaggcattggggacgagatcgaggaccccgcgggtgacgaatacgagctctacagggtggtcttcgacatcaccttcttcttcttcgtcatcgtcatcctgttggccatcatccagggtctgatcatcgacgcttttggtgagctccgagaccaacaagagcaagtgaaggaggatatggagaccaagtgcttcatctgtggaatcggcagtgactactttgatacgacaccgcatggcttcgagactcacacgctggaggagcacaacctggccaattacatgtttttcctgatgtatttgataaacaaggatgagacagaacacacgggtcaggagtcttatgtctggaagatgtaccaagagagatgttgggatttcttcccagctggtgattgtttccgtaagcagtatgaggaccagcttagctgacacacccccagctggccctccacccccacctcaagtgccttattctcacagcaagccccttagtccccaagcccctccccctaaggcagctgggggagaggtgacctagtactggaaaataaatctgtgctacgccccccagcaaaaaaatgttg

SEQ ID NO: 65367 - DNA, 176 bp, Homo sapiens
  misc_feature (47)..(47): n is a, c, g, or t
tatatggcatagctgttccttgatgtacacttgtaatctagcagagntaagacggactgtcctctggccctaacatcttatactcacgctttctctctctctctctgcaggtctttccctagcaactactgggacaagtttgtcaagcgcaaggtgagaggacatggatgccctgg

SEQ ID NO: 65368 - DNA, 15309 bp, Homo sapiens
tctacctcgcgggtgcctctggtgtctccagaggtctccgaccccagcccgcccccagccctcccgcccagcccgcagccccctccctctgttccccgacctcagaccctgggcttccgacctcgacatcatgggtgacgcagaaggcgaagacgaggtccagttcctgcggacggacgatgaggtggtcctgcagtgcagcgctaccgtgctcaaggagcagctcaagctctgcctggccgccgagggcttcggcaaccgcctgtgcttcctggagcccactagcaacgcgcagaatgtgccccccgatctggccatctgttgcttcgtcctggagcagtccctgtctgtgcgagccctgcaggagatgctggctaacacggtggaggctggcgtggagtcatcccagggcgggggacacaggacgctcctgtatggccatgccatcctgctccggcatgcacacagccgcatgtatctgagctgcctcaccacctcccgctccatgactgacaagctggccttcgatgtgggactgcaggaggacgcaacaggagaggcttgctggtggaccatgcacccagcctccaagcagaggtctgaaggagaaaaggtccgcgttggggatgacatcatccttgtcagtgtctcctccgagcgctacctgcacctgtcgaccgccagtggggagctccaggttgacgcttccttcatgcagacactgtggaacatgaaccccatctgctcccgctgcgaagagggcttcgtgacgggaggtcacgtcctccgcctctttcatggacatatggatgagtgtctgaccatttcccctgctgacagtgatgaccagcgcagacttgtctactatgaggggggagctgtgtgcactcatgcccgctccctctggaggctggagccactgagaatcagctggagtgggagccacctgcgctggggccagccactccgagtccggcatgtcactaccgggcagtacctagcgctcaccgaggaccagggcctggtggtggttgacgccagcaaggctcacaccaaggctacctccttctgcttccgcatctccaaggagaagctggatgtggcccccaagcgggatgtggagggcatgggcccccctgagatcaagtacggggagtcactgtgcttcgtgcagcatgtggcctcaggactgtggctcacctatgccgctccagaccccaaggccctgcggctcggcgtgctcaagaagaaggccatgctgcaccaggagggccacatggacgacgcactgtcgctgacccgctgccagcaggaggagtcccaggccgcccgcatgatccacagcaccaatggcctatacaaccagttcatcaagagcctggacagcttcagcgggaagccacggggctcggggccacccgctggcacggcgctgcccatcgagggcgttatcctgagcctgcaggacctcatcatctacttcgagcctccctccgaggacttgcagcacgaggagaagcagagcaagctgcgaagcctgcgcaaccgccagagcctcttccaggaggaggggatgctctccatggtcctgaattgcatagaccgcctaaatgtctacaccactgctgcccactttgctgagtttgcaggggaggaggcagccgagtcctggaaagagattgtgaatcttctctatgaactcctagcttctctaatccgtggcaatcgtagcaactgtgccctcttctccacaaacttggactggctggtcagcaagctggatcggctggaggcctcgtctggcatcctggaggtcctgtactgtgtcctcattgagagtccagaggttctgaacatcatccaggagaatcacatcaagtccatcatctccctcctggacaagcatgggaggaaccacaaggtcctggacgtgctatgctccctgtgtgtgtgtaatggtgtggctgtacgctccaaccaagatcttattactgagaacttgctgcctggccgtgagcttctgctgcagacaaacctcatcaactatgtcaccagcatccgccccaacatctttgtgggccgagcggaaggcaccacgcagtacagcaaatggtactttgaggtgatggtggacgaggtgactccatttctgacagctcaggccacccacttgcgggtgggctgggccctcaccgagggctacaccccctaccctggggccggcgagggctggggcggcaacggggtcggcgatgacctctattcctacggctttgatggactgcatctctggacaggacacgtggcacgcccagtgacttccccagggcagcacctcctggcccctgaagacgtgatcagctgctgcctggacctcagcgtgccgtccatctccttccgcatcaacggctgccctgtgcagggtgtctttgagtccttcaacctggacgggctcttcttccctgttgtcagcttctcggctggtgtcaaggtgcggttcctccttggtggccgccatggtgaattcaagttcctgcccccacctggctatgctccatgccatgaggctgtgctccctcgagagcgactccatcttgaacccatcaaggagtatcgacgggaggggccccgggggcctcacctggtgggccccagtcgctgcctctcacacaccgacttcgtgccctgccctgtggacactgtccagattgtcctgccgccccatctggagcgcattcgggagaagctggcggagaacatccacgagctctgggcgctaacccgcatcgagcagggctggacctacggcccggttcgggatgacaacaagaggctgcacccgtgtcttgtggacttccacagccttccagagcctgagaggaactacaacctgcagatgtctggggagacgctcaagactctgctggctctgggctgccacgtgggcatggcggatgagaaggcggaggacaacctgaagaagacaaaactccccaagacgtatatgatgagcaatgggtacaagccggctccgctggacctgagccacgtgcggctgacgccggcgcagacaacactggtggaccgtctggcagaaaatgggcacaacgtgtgggcccgagaccgcgtgggccagggctggagctacagcgcagtgcaggacatcccagcgcgccgaaaccctcggctggtgccctaccgcctgctggatgaagccaccaagcgcagcaaccgggacagcctctgccaggccgtgcgcaccctcctgggctacggctacaacatcgagcctcctgaccaggagcccagtcaggtggagaaccagtctcgttgtgaccgggtgcgcatcttccgggcagagaaatcctatacagtgcagagcggccgctggtacttcgagtttgaagcagtcaccacaggcgagatgcgcgtgggctgggcgaggcccgagctgaggcctgatgtagagctgggagctgacgagctggcctatgtcttcaatgggcaccgcggccagcgctggcacttgggcagtgaaccatttgggcgcccctggcagccgggcgatgtcgttggctgtatgatcgacctcacagagaacaccattatcttcaccctcaatggcgaggtcctcatgtctgactcaggctccgaaacagccttccgggagattgagattggggacggcttcctgcccgtctgcagcttgggacctggccaggtgggtcatctgaacctgggccaggacgtgagctctctgaggttctttgccatctgtggcctccaggaaggcttcgagccatttgccatcaacatgcagcgcccagtcaccacctggttcagcaaaggcctgccccagtttgagccagtgccccttgaacaccctcactatgaggtatcccgagtggacggcactgtggacacgcccccctgcctgcgcctgacccaccgcacctggggctcccagaacagcctggtggagatgcttttcctgcggctgagcctcccagtccagttccaccagcacttccgctgcactgcaggggccaccccgctggcacctcctggcctgcagccccccgccgaggacgaggcccgggcggcggaacccgaccctgactacgaaaacctgcgccgctcagctgggggctggagcgaggcagagaacggcaaagaagggactgcgaaggagggcgcccccgggggcaccccgcaggcggggggagaggcgcagcccgccagggcggagaatgagaaggatgccaccaccgagaagaacaagaagagaggcttcttattcaaggccaagaaggtcgccatgatgacccagccaccggccacccccacgctgccccgactccctcacgacgtggtgcctgcagacaaccgcgatgaccccgagatcatcctcaacaccaccacgtactattactccgtgagggtctttgctggacaggagcccagctgcgtgtgggcgggctgggtcacccctgactaccatcagcacgacatgagcttcgacctcagcaaggtccgggtcgtgacggtgaccatgggggatgaacaaggcaacgtccacagcagcctcaagtgtagcaactgctacatggtgtggggcggagactttgtgagtcccgggcagcagggccggatcagccacacggaccttgtcattgggtgcctggtggacttggccactggcttaatgacctttacagccaatggcaaagagagcaacacctttttccaggtggaacccaacactaagctatttcctgccgtcttcgtcctgcccacccaccagaacgtcatccagtttgagctggggaagcagaagaacatcatgccgttgtcagccgccatgttccaaagcgagcgcaagaacccggccccgcagtgcccaccgcggctggagatgcagatgctgatgccagtgtcctggagccgcatgcccaaccacttcctgcaggtggagacgaggcgtgccggcgagcggctgggctgggccgtgcagtgccaggagccgctgaccatgatggcgctgcacatccccgaggagaaccggtgcatggacatcctggagctgtcggagcgcctggacctgcagcgcttccactcgcacaccctgcgcctctaccgcgctgtgtgcgccctgggcaacaatcgcgtggcgcacgctctgtgcagccacgtagaccaagctcagctgctgcacgccctggaggacgcgcacctgccaggcccactgcgcgcaggctactatgacctcctcatcagcatccacctcgaaagtgcctgccgcagccgccgctccatgctctctgaatacatcgtgcccctcacgcctgagacccgcgccatcacgctcttccctcctggaaggagcacagaaaatggtcacccccggcatggcctgccgggagttggagtcaccacttcgctgaggcccccgcatcatttctcgcccccctgtttcgtggccgctctgccagctgctggggcagcagaggccccggcccgcctcagccctgccatcccgctggaggccctgcgggacaaggcactgaggatgctgggggaggcggtgcgcgacggtgggcagcacgctcgcgaccccgtcggggcctccgtggagttccagtttgtgcctgtgctcaagctcgtgtccaccctgctggtgatgggcatctttggcgatgaggatgtgaaacagatcttgaagatgattgagcctgaggtcttcactgaggaagaagaggaggaggacgaggaggaagagggtgaagaggaagatgaggaggagaaggaggaggatgaggaggaaacagcacaggaaaaggaagatgaggaaaaagaggaagaggaggcagcagaaggggagaaagaagaaggcttggaggaagggctgctccagatgaagttgccagagtctgtgaagttacagatgtgccacctgctggagtatttctgtgaccaagagctgcagcaccgtgtggagtccctggcagcctttgcggagcgctatgtggacaagctccaggccaaccagcggagccgctatggcctcctcataaaagccttcagcatgaccgcagcagagactgcaagacgtacccgcgagttccgctccccaccccaggaacagatcaatatgctattgcaattcaaagatggtacagatgaggaagactgtcctctccctgaagagattcgacaggatttgcttgactttcatcaagacctgctggcacactgtggaattcagctagatggagaggaggaggaaccagaggaagagaccaccctgggcagccgcctcatgagcctgttggagaaagtgcggctggtgaagaagaaggaagagaaacctgaggaggagcggtcagcagaggagagcaaaccccggtccctgcaggagctggtgtcccacatggtggtgcgctgggcccaagaggacttcgtgcagagccccgagctggtgcgggccatgttcagcctcctgcaccggcagtacgacgggctgggtgagctgctgcgtgccctgccgcgggcgtacaccatctcaccgtcctccgtggaagacaccatgagcctgctcgagtgcctcggccagatccgctcgctgctcatcgtgcagatgggcccccaggaggagaacctcatgatccagagcatcgggaacatcatgaacaacaaagtcttctaccaacacccgaacctgatgagggcgctgggcatgcacgagacggtcatggaggtcatggtcaacgtcctcgggggcggcgagtccaaggagatccgcttccccaagatggtgacaagctgctgccgcttcctctgctatttctgccgaatcagccggcagaaccagcgctccatgtttgaccacctgagctacctgctggagaacagtggcatcggcctgggcatgcagggctccacgcccctggacgtggctgctgcctccgtcattgacaacaatgagctggccttggcattgcaggagcaggacctggaaaaggttgtgtcctacctggcaggctgtggcctccagagctgccccatgcttgtggccaaagggtacccagacattggctggaacccctgtggtggagagcgctacctggacttcctgcgctttgctgtcttcgtcaacggcgagagcgtggaggagaacgccaatgtggtggtgcggctgctcatccggaagcctgagtgcttcggacccgccctgcggggtgagggtggctcagggctgctggctgccatcgaagaggccatccgcatctccgaggaccctgcgagggatggcccaggcatccgcagggaccggcggcgcgagcactttggtgaggaaccgcctgaagaaaaccgggtgcacctgggacacgccatcatgtccttctatgccgccttgatcgacctgctcggacgctgtgcaccagagatgcatctaatccaagccggcaagggtgaggccctgcggatccgcgccatcctccgctcccttgtgcccttggaggaccttgtgggcatcatcagcctcccactgcagattcccaccctgggcaaagatggggctctggtgcagccaaagatgtcagcatccttcgtgccggaccacaaggcgtccatggtgctcttcctggaccgtgtgtatggcatcgagaaccaggacttcttgctgcacgtgctggacgtggggttcctgcccgacatgagggcagccgcctcgctggacacggccactttcagcaccaccgagatggcgctggccgtgaaccgctacctgtgcctggccgtgctgccgctcatcaccaagtgtgcgccgctctttgcgggcacagaacaccgcgccatcatggtggactctatgctgcataccgtgtaccgcctgtctcggggtcgttcgctcaccaaggcgcagcgtgacgtcatcgaggactgcctcatgtcgctctgcaggtacatccgcccgtcgatgctgcagcacctgttgcgccgcctggtgttcgacgtgcccatcctcaacgagttcgccaagatgccactcaagctcctcaccaaccactatgagcgctgttggaagtactactgcctacccacgggctgggccaacttcggggtcacctcagaggaggagctgcacctcacacggaaactcttctggggcatctttgactctctggcccataagaaatacgacccggagctgtaccgcatggccatgccttgtctgtgcgccattgccggggctctgccccccgactatgtggatgcctcatactcatctaaggcagagaaaaaggccacagtggatgctgaaggcaactttgatccccggcctgtggagaccctcaatgtgatcatcccggagaagctggactccttcattaacaagtttgcggagtacacacacgagaagtgggccttcgacaagatccagaacaactggtcctatggagagaacatagacgaggagctgaagacccaccccatgctgaggccctacaagaccttttcagagaaggacaaagagatttaccgctggcccatcaaggagtccctgaaggccatgattgcctgggaatggacgatagagaaggccagggagggtgaggaggagaagacggaaaagaaaaaaacgcggaagatatcacaaagtgcccagacctatgatcctcgagaaggctacaaccctcagccccccgaccttagtgctgttaccctgtcccgggagctgcaggccatggcagaacaactggcagaaaattaccacaacacgtggggacggaagaagaagcaggagctggaagccaaaggcggtgggacccaccccctgctggtcccctacgacacgctcacggccaaggagaaggcacgagatcgagagaaggcccaggagctactgaaattcctgcagatgaatggctacgcggttacaagaggccttaaggacatggaactggactcgtcttccattgaaaagcggtttgcctttggcttcctgcagcagctgctgcgctggatggacatttctcaggagttcattgcccacctggaggctgtggtcagcagtgggcgagtggaaaagtccccacatgaacaggagattaaattctttgccaagatcctgctccctttgatcaaccagtacttcaccaaccactgcctctatttcttgtccactccggctaaagtgctgggcagcggtggccacgcctctaacaaggagaaggaaatgatcaccagcctcttctgcaaacttgctgctctcgtccgccaccgagtctctctctttgggacagacgccccagctgtggtcaactgtcttcacatcctggcccgctccctggatgccaggacagtgatgaagtcaggccctgagatcgtgaaggctggcctccgctccttcttcgagagtgcctcggaggacatcgagaagatggtggagaacctgcggctgggcaaggtgtcgcaggcgcgcacccaggtgaaaggcgtgggccagaacctcacctacaccactgtggcactgctgccggtcctcaccaccctcttccagcacatcgcccagcaccagttcggagatgacgtcatcctggacgacgtccaggtctcttgctaccgaacgctgtgcagtatctactccctgggaaccaccaagaacacttatgtggaaaagcttcggccagccctcggggagtgcctggcccgtctggcagcagccatgccggtggcgttcctggagccgcagctgaacgagtacaacgcctgctccgtgtacaccaccaagtctccgcgggagcgggccatcctggggctccccaacagtgtggaggagatgtgtcccgacatcccggtgctggagcggctcatggcagacattggggggctggccgagtcaggtgcccgctacacagagatgccgcatgtcatcgagatcacgctgcccatgctatgcagctacctgccccgatggtgggagcgcgggcccgaggcacccccttccgccctgcccgccggcgcccccccaccctgcacagctgtcacctctgaccacctcaactccctgctggggaatatcctgagaatcatcgtcaacaacctgggcattgacgaggcctcctggatgaagcggctggctgtgttcgcacagcccattgtgagccgtgcacggccggagctcctgcagtcccacttcatcccaactatcgggcggctgcgcaagagggcagggaaggtggtgtccgaggaggagcagctgcgcctggaggccaaggcggaggcccaggagggcgagctgctggtgcgggacgagttctctgtgctctgccgggacctctacgccctgtatccgctgctcatccgctacgtggacaacaacagggcgcagtggctgacggagccgaatcccagcgcggaggagctgttcaggatggtgggcgagatcttcatctactggtccaagtcccacaacttcaagcgcgaggagcagaactttgtggtccagaatgagatcaacaacatgtccttcctgactgctgacaacaaaagcaaaatggctaaggtcggggagtccggtggctcggaccaggaacgcaccaagaagaagcgccggggggaccggtactctgtgcagacgtcactgatcgtggccacactgaagaagatgctgcccatcggcctgaatatgtgtgcgcccaccgaccaagacctcatcacgctggccaagacccgttacgccctgaaagacacagatgaggaggtccgggaatttctgcacaacaaccttcaccttcagggaaaggtcgaaggctccccgtctctgcgctggcagatggctctgtaccggggcgtcccgggtcgcgaggaggacgccgatgaccccgagaaaatcgtgcgcagagtccaggaagtgtcagccgtgctctactacctggaccagaccgagcacccttacaagtctaagaaggccgtgtggcacaagcttttgtccaaacagcgccggcgggcagtcgtggcctgtttccgtatgacgcccctgtacaacctgcccacgcaccgggcatgtaacatgttcctggagagctacaaggctgcatggatcctgactgaagaccacagttttgaggaccgcatgatagatgacctttcaaaagctggggagcaggaggaggaggaggaagaggtggaagagaagaagccagaccccctgcaccagttggtcctgcacttcagccgcactgccctgacggaaaagagcaaactggatgaggattacctgtacatggcctatgctgatatcatggcaaagagctgccacctggaggagggaggggagaacggtgaagctgaagaggaggttgaggtctcctttgaggagaaacagatggagaagcagaggctcttgtaccagcaagcacggctgcacacccggggggcggccgagatggtgctgcagatgatcagtgcctgcaaaggagagacaggtgccatggtgtcctccaccctgaagctgggcatctccatcctcaatggaggcaatgctgaggtccagcagaaaatgctggattatcttaaggacaagaaggaagttggcttcttccagagtatccaggcactgatgcaaacatgcagcgtcctggatctcaatgcctttgagagacagaacaaggccgaggggctgggcatggtgaatgaggatggcactgtcatcaatcgccagaacggagagaaggtcatggcggatgatgaattcacacaagacctgttccgattcctacaattgctctgtgaggggcacaataatgatttccagaactacctacggacacagacagggaacacgaccactattaacatcatcatttgcactgtggactacctcctgcggctgcaggaatccatcagcgacttctactggtactactcgggcaaggatgtcattgaagagcagggcaagaggaacttctccaaagccatgtcggtggctaagcaggtgttcaacagcctcactgagtacatccagggtccctgcaccgggaaccagcagagcctggcgcacagtcgcctatgggacgcagtggtgggattcctgcacgtgttcgcccacatgatgatgaagctcgctcaggactcaagccagatcgagctgctgaaggagctgctggatctgcagaaggacatggtggtgatgttgctgtcgctactagaagggaacgtggtgaacggcatgatcgcccggcagatggtggacatgctcgtggaatcctcatccaatgtggagatgatcctcaagttcttcgacatgttcctgaaactcaaggacattgtgggctctgaagccttccaggactacgtaacggatccccgtggcctcatctccaagaaggacttccagaaggccatggacagccagaagcagttcagcggtccagaaatccagttcctgctttcgtgctccgaagcggatgagaacgaaatgatcaactgcgaagagttcgccaaccgcttccaggagccagcacgcgacatcggcttcaacgtggcggtgctgctgaccaacctgtcggagcatgtgccgcatgaccctcgcctgcacaacttcctggagctggccgagagcatccttgagtacttccgcccctacctgggccgcatcgagatcatgggcgcgtcacgccgcatcgagcgcatctacttcgagatctcagagaccaaccgcgcccagtgggagatgccccaggtgaaggagtccaagcgccagttcatcttcgacgtggtgaacgagggcggcgaggctgagaagatggagctcttcgtgagtttctgcgaggacaccatcttcgagatgcagatcgccgcgcagatctcggagcccgagggcgagccggagaccgacgaggacgagggcgcgggcgcggcggaggcgggcgcggaaggcgcggaggagggcgcggcggggctcgagggcacggcggccacggcggcggcgggggcgacggcgcgggttgtggcggccgcaggccgggccctgcgaggcctcagctaccgcagcctgcggcggcgcgtgcggcggctgcggcggcttacggcccgcgaggcggccaccgcagtggcggcgctgctctgggcagcagtgacgcgcgctggggccgctggcgcgggggcggcggcgggcgcgctgggcctgctctggggctcgctgttcggcggcggcctggtggagggcgccaagaaggtgacggtgaccgagctcctggcaggcatgcccgaccccaccagcgacgaggtgcacggcgagcagccggccgggccgggcggagacgcagacggcgagggtgccagcgagggcgctggagacgccgcggagggcgctggagacgaggaggaggcggtgcacgaggccgggccgggcggtgccgacggggcggtggccgtgaccgatgggggccccttccggcccgaaggggctggcggtctcggggacatgggggacacgacgcctgcggaaccgcccacacccgagggctctcccatcctcaagaggaaattgggggtggatggagtggaggaggagctcccgccagagccagagcccgagccggaaccagagctggagccggagaaagccgatgccgagaatggggagaaggaagaagttcccgagcccacaccagagccccccaagaagcaagcacctccctcaccccctccaaagaaggaggaagctggaggcgaattctggggagaactggaggtgcagagggtgaagttcctggtctcagactctccaccaggggaggacgacatggaaggctcagctgctggggatgtgtcaggtgcaggctctggtggcagctctggctggggcttgggggccggagaggaggcagagggcgatgaggatgagaacatggtgtactacttcctggaggaaagcacaggctacatggaacccgccctgcggtgtctgagcctcctgcatacactggtggcctttctctgcatcattggctataattgtctcaaggtgcccctggtaatctttaagcgggagaaggagctggcccggaagctggagtttgatggcctgtacatcacggagcagcctgaggacgatgacgtgaaggggcagtgggaccgactggtgctcaacacgccgtctttccctagcaactactgggacaagtttgtcaagcgcaaggtcctggacaaacatggggacatctacgggcgggagcggattgctgagctactgggcatggacctggccacactagagatcacagcccacaatgagcgcaagcccaacccgccgccagggctgctgacctggctcatgtccatcgatgtcaagtaccagatctggaagttcggggtcatcttcacagacaactccttcctgtacctgggctggtatatggtgatgtccctcttgggacactacaacaacttcttctttgctgcccatctcctggacatcgccatgggggtcaagacgctgcgcaccatcctgtcctctgtcacccacaatgggaaacagctggtgatgaccgtgggccttctggcggtggtcgtctacctgtacaccgtggtggccttcaacttcttccgcaagttctacaacaagagcgaggatgaggatgaacctgacatgaagtgtgatgacatgatgacgtgttacctgtttcacatgtacgtgggtgtccgggctggcggaggcattggggacgagatcgaggaccccgcgggtgacgaatacgagctctacagggtggtcttcgacatcaccttcttcttcttcgtcatcgtcatcctgttggccatcatccagggtctgatcatcgacgcttttggtgagctccgagaccaacaagagcaagtgaaggaggatatggagaccaagtgcttcatctgtggaatcggcagtgactactttgatacgacaccgcatggcttcgagactcacacgctggaggagcacaacctggccaattacatgtttttcctgatgtatttgataaacaaggatgagacagaacacacgggtcaggagtcttatgtctggaagatgtaccaagagagatgttgggatttcttcccagctggtgattgtttccgtaagcagtatgaggaccagcttagctgacacacccccagctggccctccacccccacctcaagtgccttattctcacagcaagccccttagtccccaagcccctccccctaaggcagctgggggagaggtgacctagtactggaaaataaatctgtgctacgccccccagcaaaaaaatgttg

SEQ ID NO: 65369 - DNA, 6704 bp, Homo sapiens
  misc_feature (22)..(22): n is a, c, g, or t
ggagaagaagaaaaggaaaccnaatagctgtaaataaaaacgcggaagatatcacaaagtgcccagacctatgatcctcgagaaggctacaaccctcagccccccgaccttagtgctgttaccctgtcccgggagctgcaggccatggcagaacaactggcagaaaattaccacaacacgtggggacggaagaagaagcaggagctggaagccaaaggcggtgggacccaccccctgctggtcccctacgacacgctcacggccaaggagaaggcacgagatcgagagaaggcccaggagctactgaaattcctgcagatgaatggctacgcggttacaagaggccttaaggacatggaactggactcgtcttccattgaaaagcggtttgcctttggcttcctgcagcagctgctgcgctggatggacatttctcaggagttcattgcccacctggaggctgtggtcagcagtgggcgagtggaaaagtccccacatgaacaggagattaaattctttgccaagatcctgctccctttgatcaaccagtacttcaccaaccactgcctctatttcttgtccactccggctaaagtgctgggcagcggtggccacgcctctaacaaggagaaggaaatgatcaccagcctcttctgcaaacttgctgctctcgtccgccaccgagtctctctctttgggacagacgccccagctgtggtcaactgtcttcacatcctggcccgctccctggatgccaggacagtgatgaagtcaggccctgagatcgtgaaggctggcctccgctccttcttcgagagtgcctcggaggacatcgagaagatggtggagaacctgcggctgggcaaggtgtcgcaggcgcgcacccaggtgaaaggcgtgggccagaacctcacctacaccactgtggcactgctgccggtcctcaccaccctcttccagcacatcgcccagcaccagttcggagatgacgtcatcctggacgacgtccaggtctcttgctaccgaacgctgtgcagtatctactccctgggaaccaccaagaacacttatgtggaaaagcttcggccagccctcggggagtgcctggcccgtctggcagcagccatgccggtggcgttcctggagccgcagctgaacgagtacaacgcctgctccgtgtacaccaccaagtctccgcgggagcgggccatcctggggctccccaacagtgtggaggagatgtgtcccgacatcccggtgctggagcggctcatggcagacattggggggctggccgagtcaggtgcccgctacacagagatgccgcatgtcatcgagatcacgctgcccatgctatgcagctacctgccccgatggtgggagcgcgggcccgaggcacccccttccgccctgcccgccggcgcccccccaccctgcacagctgtcacctctgaccacctcaactccctgctggggaatatcctgagaatcatcgtcaacaacctgggcattgacgaggcctcctggatgaagcggctggctgtgttcgcacagcccattgtgagccgtgcacggccggagctcctgcagtcccacttcatcccaactatcgggcggctgcgcaagagggcagggaaggtggtgtccgaggaggagcagctgcgcctggaggccaaggcggaggcccaggagggcgagctgctggtgcgggacgagttctctgtgctctgccgggacctctacgccctgtatccgctgctcatccgctacgtggacaacaacagggcgcagtggctgacggagccgaatcccagcgcggaggagctgttcaggatggtgggcgagatcttcatctactggtccaagtcccacaacttcaagcgcgaggagcagaactttgtggtccagaatgagatcaacaacatgtccttcctgactgctgacaacaaaagcaaaatggctaaggtcggggagtccggtggctcggaccaggaacgcaccaagaagaagcgccggggggaccggtactctgtgcagacgtcactgatcgtggccacactgaagaagatgctgcccatcggcctgaatatgtgtgcgcccaccgaccaagacctcatcacgctggccaagacccgttacgccctgaaagacacagatgaggaggtccgggaatttctgcacaacaaccttcaccttcagggaaaggtcgaaggctccccgtctctgcgctggcagatggctctgtaccggggcgtcccgggtcgcgaggaggacgccgatgaccccgagaaaatcgtgcgcagagtccaggaagtgtcagccgtgctctactacctggaccagaccgagcacccttacaagtctaagaaggccgtgtggcacaagcttttgtccaaacagcgccggcgggcagtcgtggcctgtttccgtatgacgcccctgtacaacctgcccacgcaccgggcatgtaacatgttcctggagagctacaaggctgcatggatcctgactgaagaccacagttttgaggaccgcatgatagatgacctttcaaaagctggggagcaggaggaggaggaggaagaggtggaagagaagaagccagaccccctgcaccagttggtcctgcacttcagccgcactgccctgacggaaaagagcaaactggatgaggattacctgtacatggcctatgctgatatcatggcaaagagctgccacctggaggagggaggggagaacggtgaagctgaagaggaggttgaggtctcctttgaggagaaacagatggagaagcagaggctcttgtaccagcaagcacggctgcacacccggggggcggccgagatggtgctgcagatgatcagtgcctgcaaaggagagacaggtgccatggtgtcctccaccctgaagctgggcatctccatcctcaatggaggcaatgctgaggtccagcagaaaatgctggattatcttaaggacaagaaggaagttggcttcttccagagtatccaggcactgatgcaaacatgcagcgtcctggatctcaatgcctttgagagacagaacaaggccgaggggctgggcatggtgaatgaggatggcactgtcatcaatcgccagaacggagagaaggtcatggcggatgatgaattcacacaagacctgttccgattcctacaattgctctgtgaggggcacaataatgatttccagaactacctacggacacagacagggaacacgaccactattaacatcatcatttgcactgtggactacctcctgcggctgcaggaatccatcagcgacttctactggtactactcgggcaaggatgtcattgaagagcagggcaagaggaacttctccaaagccatgtcggtggctaagcaggtgttcaacagcctcactgagtacatccagggtccctgcaccgggaaccagcagagcctggcgcacagtcgcctatgggacgcagtggtgggattcctgcacgtgttcgcccacatgatgatgaagctcgctcaggactcaagccagatcgagctgctgaaggagctgctggatctgcagaaggacatggtggtgatgttgctgtcgctactagaagggaacgtggtgaacggcatgatcgcccggcagatggtggacatgctcgtggaatcctcatccaatgtggagatgatcctcaagttcttcgacatgttcctgaaactcaaggacattgtgggctctgaagccttccaggactacgtaacggatccccgtggcctcatctccaagaaggacttccagaaggccatggacagccagaagcagttcagcggtccagaaatccagttcctgctttcgtgctccgaagcggatgagaacgaaatgatcaactgcgaagagttcgccaaccgcttccaggagccagcacgcgacatcggcttcaacgtggcggtgctgctgaccaacctgtcggagcatgtgccgcatgaccctcgcctgcacaacttcctggagctggccgagagcatccttgagtacttccgcccctacctgggccgcatcgagatcatgggcgcgtcacgccgcatcgagcgcatctacttcgagatctcagagaccaaccgcgcccagtgggagatgccccaggtgaaggagtccaagcgccagttcatcttcgacgtggtgaacgagggcggcgaggctgagaagatggagctcttcgtgagtttctgcgaggacaccatcttcgagatgcagatcgccgcgcagatctcggagcccgagggcgagccggagaccgacgaggacgagggcgcgggcgcggcggaggcgggcgcggaaggcgcggaggagggcgcggcggggctcgagggcacggcggccacggcggcggcgggggcgacggcgcgggttgtggcggccgcaggccgggccctgcgaggcctcagctaccgcagcctgcggcggcgcgtgcggcggctgcggcggcttacggcccgcgaggcggccaccgcagtggcggcgctgctctgggcagcagtgacgcgcgctggggccgctggcgcgggggcggcggcgggcgcgctgggcctgctctggggctcgctgttcggcggcggcctggtggagggcgccaagaaggtgacggtgaccgagctcctggcaggcatgcccgaccccaccagcgacgaggtgcacggcgagcagccggccgggccgggcggagacgcagacggcgagggtgccagcgagggcgctggagacgccgcggagggcgctggagacgaggaggaggcggtgcacgaggccgggccgggcggtgccgacggggcggtggccgtgaccgatgggggccccttccggcccgaaggggctggcggtctcggggacatgggggacacgacgcctgcggaaccgcccacacccgagggctctcccatcctcaagaggaaattgggggtggatggagtggaggaggagctcccgccagagccagagcccgagccggaaccagagctggagccggagaaagccgatgccgagaatggggagaaggaagaagttcccgagcccacaccagagccccccaagaagcaagcacctccctcaccccctccaaagaaggaggaagctggaggcgaattctggggagaactggaggtgcagagggtgaagttcctggtctcagactctccaccaggggaggacgacatggaaggctcagctgctggggatgtgtcaggtgcaggctctggtggcagctctggctggggcttgggggccggagaggaggcagagggcgatgaggatgagaacatggtgtactacttcctggaggaaagcacaggctacatggaacccgccctgcggtgtctgagcctcctgcatacactggtggcctttctctgcatcattggctataattgtctcaaggtgcccctggtaatctttaagcgggagaaggagctggcccggaagctggagtttgatggcctgtacatcacggagcagcctgaggacgatgacgtgaaggggcagtgggaccgactggtgctcaacacgccgtctttccctagcaactactgggacaagtttgtcaagcgcaaggtcctggacaaacatggggacatctacgggcgggagcggattgctgagctactgggcatggacctggccacactagagatcacagcccacaatgagcgcaagcccaacccgccgccagggctgctgacctggctcatgtccatcgatgtcaagtaccagatctggaagttcggggtcatcttcacagacaactccttcctgtacctgggctggtatatggtgatgtccctcttgggacactacaacaacttcttctttgctgcccatctcctggacatcgccatgggggtcaagacgctgcgcaccatcctgtcctctgtcacccacaatgggaaacagctggtgatgaccgtgggccttctggcggtggtcgtctacctgtacaccgtggtggccttcaacttcttccgcaagttctacaacaagagcgaggatgaggatgaacctgacatgaagtgtgatgacatgatgacgtgttacctgtttcacatgtacgtgggtgtccgggctggcggaggcattggggacgagatcgaggaccccgcgggtgacgaatacgagctctacagggtggtcttcgacatcaccttcttcttcttcgtcatcgtcatcctgttggccatcatccagggtctgatcatcgacgcttttggtgagctccgagaccaacaagagcaagtgaaggaggatatggagaccaagtgcttcatctgtggaatcggcagtgactactttgatacgacaccgcatggcttcgagactcacacgctggaggagcacaacctggccaattacatgtttttcctgatgtatttgataaacaaggatgagacagaacacacgggtcaggagtcttatgtctggaagatgtaccaagagagatgttgggatttcttcccagctggtgattgtttccgtaagcagtatgaggaccagcttagctgacacacccccagctggccctccacccccacctcaagtgccttattctcacagcaagccccttagtccccaagcccctccccctaaggcagctgggggagaggtgacctagtactggaaaataaatctgtgctacgccccccagcaaaaaaatgttg

SEQ ID NO: 65370 - DNA, 9021 bp, Homo sapiens
tctacctcgcgggtgcctctggtgtctccagaggtctccgaccccagcccgcccccagccctcccgcccagcccgcagccccctccctctgttccccgacctcagaccctgggcttccgacctcgacatcatgggtgacgcagaaggcgaagacgaggtccagttcctgcggacggacgatgaggtggtcctgcagtgcagcgctaccgtgctcaaggagcagctcaagctctgcctggccgccgagggcttcggcaaccgcctgtgcttcctggagcccactagcaacgcgcagaatgtgccccccgatctggccatctgttgcttcgtcctggagcagtccctgtctgtgcgagccctgcaggagatgctggctaacacggtggaggctggcgtggagtcatcccagggcgggggacacaggacgctcctgtatggccatgccatcctgctccggcatgcacacagccgcatgtatctgagctgcctcaccacctcccgctccatgactgacaagctggccttcgatgtgggactgcaggaggacgcaacaggagaggcttgctggtggaccatgcacccagcctccaagcagaggtctgaaggagaaaaggtccgcgttggggatgacatcatccttgtcagtgtctcctccgagcgctacctgcacctgtcgaccgccagtggggagctccaggttgacgcttccttcatgcagacactgtggaacatgaaccccatctgctcccgctgcgaagagggcttcgtgacgggaggtcacgtcctccgcctctttcatggacatatggatgagtgtctgaccatttcccctgctgacagtgatgaccagcgcagacttgtctactatgaggggggagctgtgtgcactcatgcccgctccctctggaggctggagccactgagaatcagctggagtgggagccacctgcgctggggccagccactccgagtccggcatgtcactaccgggcagtacctagcgctcaccgaggaccagggcctggtggtggttgacgccagcaaggctcacaccaaggctacctccttctgcttccgcatctccaaggagaagctggatgtggcccccaagcgggatgtggagggcatgggcccccctgagatcaagtacggggagtcactgtgcttcgtgcagcatgtggcctcaggactgtggctcacctatgccgctccagaccccaaggccctgcggctcggcgtgctcaagaagaaggccatgctgcaccaggagggccacatggacgacgcactgtcgctgacccgctgccagcaggaggagtcccaggccgcccgcatgatccacagcaccaatggcctatacaaccagttcatcaagagcctggacagcttcagcgggaagccacggggctcggggccacccgctggcacggcgctgcccatcgagggcgttatcctgagcctgcaggacctcatcatctacttcgagcctccctccgaggacttgcagcacgaggagaagcagagcaagctgcgaagcctgcgcaaccgccagagcctcttccaggaggaggggatgctctccatggtcctgaattgcatagaccgcctaaatgtctacaccactgctgcccactttgctgagtttgcaggggaggaggcagccgagtcctggaaagagattgtgaatcttctctatgaactcctagcttctctaatccgtggcaatcgtagcaactgtgccctcttctccacaaacttggactggctggtcagcaagctggatcggctggaggcctcgtctggcatcctggaggtcctgtactgtgtcctcattgagagtccagaggttctgaacatcatccaggagaatcacatcaagtccatcatctccctcctggacaagcatgggaggaaccacaaggtcctggacgtgctatgctccctgtgtgtgtgtaatggtgtggctgtacgctccaaccaagatcttattactgagaacttgctgcctggccgtgagcttctgctgcagacaaacctcatcaactatgtcaccagcatccgccccaacatctttgtgggccgagcggaaggcaccacgcagtacagcaaatggtactttgaggtgatggtggacgaggtgactccatttctgacagctcaggccacccacttgcgggtgggctgggccctcaccgagggctacaccccctaccctggggccggcgagggctggggcggcaacggggtcggcgatgacctctattcctacggctttgatggactgcatctctggacaggacacgtggcacgcccagtgacttccccagggcagcacctcctggcccctgaagacgtgatcagctgctgcctggacctcagcgtgccgtccatctccttccgcatcaacggctgccctgtgcagggtgtctttgagtccttcaacctggacgggctcttcttccctgttgtcagcttctcggctggtgtcaaggtgcggttcctccttggtggccgccatggtgaattcaagttcctgcccccacctggctatgctccatgccatgaggctgtgctccctcgagagcgactccatcttgaacccatcaaggagtatcgacgggaggggccccgggggcctcacctggtgggccccagtcgctgcctctcacacaccgacttcgtgccctgccctgtggacactgtccagattgtcctgccgccccatctggagcgcattcgggagaagctggcggagaacatccacgagctctgggcgctaacccgcatcgagcagggctggacctacggcccggttcgggatgacaacaagaggctgcacccgtgtcttgtggacttccacagccttccagagcctgagaggaactacaacctgcagatgtctggggagacgctcaagactctgctggctctgggctgccacgtgggcatggcggatgagaaggcggaggacaacctgaagaagacaaaactccccaagacgtatatgatgagcaatgggtacaagccggctccgctggacctgagccacgtgcggctgacgccggcgcagacaacactggtggaccgtctggcagaaaatgggcacaacgtgtgggcccgagaccgcgtgggccagggctggagctacagcgcagtgcaggacatcccagcgcgccgaaaccctcggctggtgccctaccgcctgctggatgaagccaccaagcgcagcaaccgggacagcctctgccaggccgtgcgcaccctcctgggctacggctacaacatcgagcctcctgaccaggagcccagtcaggtggagaaccagtctcgttgtgaccgggtgcgcatcttccgggcagagaaatcctatacagtgcagagcggccgctggtacttcgagtttgaagcagtcaccacaggcgagatgcgcgtgggctgggcgaggcccgagctgaggcctgatgtagagctgggagctgacgagctggcctatgtcttcaatgggcaccgcggccagcgctggcacttgggcagtgaaccatttgggcgcccctggcagccgggcgatgtcgttggctgtatgatcgacctcacagagaacaccattatcttcaccctcaatggcgaggtcctcatgtctgactcaggctccgaaacagccttccgggagattgagattggggacggcttcctgcccgtctgcagcttgggacctggccaggtgggtcatctgaacctgggccaggacgtgagctctctgaggttctttgccatctgtggcctccaggaaggcttcgagccatttgccatcaacatgcagcgcccagtcaccacctggttcagcaaaggcctgccccagtttgagccagtgccccttgaacaccctcactatgaggtatcccgagtggacggcactgtggacacgcccccctgcctgcgcctgacccaccgcacctggggctcccagaacagcctggtggagatgcttttcctgcggctgagcctcccagtccagttccaccagcacttccgctgcactgcaggggccaccccgctggcacctcctggcctgcagccccccgccgaggacgaggcccgggcggcggaacccgaccctgactacgaaaacctgcgccgctcagctgggggctggagcgaggcagagaacggcaaagaagggactgcgaaggagggcgcccccgggggcaccccgcaggcggggggagaggcgcagcccgccagggcggagaatgagaaggatgccaccaccgagaagaacaagaagagaggcttcttattcaaggccaagaaggtcgccatgatgacccagccaccggccacccccacgctgccccgactccctcacgacgtggtgcctgcagacaaccgcgatgaccccgagatcatcctcaacaccaccacgtactattactccgtgagggtctttgctggacaggagcccagctgcgtgtgggcgggctgggtcacccctgactaccatcagcacgacatgagcttcgacctcagcaaggtccgggtcgtgacggtgaccatgggggatgaacaaggcaacgtccacagcagcctcaagtgtagcaactgctacatggtgtggggcggagactttgtgagtcccgggcagcagggccggatcagccacacggaccttgtcattgggtgcctggtggacttggccactggcttaatgacctttacagccaatggcaaagagagcaacacctttttccaggtggaacccaacactaagctatttcctgccgtcttcgtcctgcccacccaccagaacgtcatccagtttgagctggggaagcagaagaacatcatgccgttgtcagccgccatgttccaaagcgagcgcaagaacccggccccgcagtgcccaccgcggctggagatgcagatgctgatgccagtgtcctggagccgcatgcccaaccacttcctgcaggtggagacgaggcgtgccggcgagcggctgggctgggccgtgcagtgccaggagccgctgaccatgatggcgctgcacatccccgaggagaaccggtgcatggacatcctggagctgtcggagcgcctggacctgcagcgcttccactcgcacaccctgcgcctctaccgcgctgtgtgcgccctgggcaacaatcgcgtggcgcacgctctgtgcagccacgtagaccaagctcagctgctgcacgccctggaggacgcgcacctgccaggcccactgcgcgcaggctactatgacctcctcatcagcatccacctcgaaagtgcctgccgcagccgccgctccatgctctctgaatacatcgtgcccctcacgcctgagacccgcgccatcacgctcttccctcctggaaggagcacagaaaatggtcacccccggcatggcctgccgggagttggagtcaccacttcgctgaggcccccgcatcatttctcgcccccctgtttcgtggccgctctgccagctgctggggcagcagaggccccggcccgcctcagccctgccatcccgctggaggccctgcgggacaaggcactgaggatgctgggggaggcggtgcgcgacggtgggcagcacgctcgcgaccccgtcggggcctccgtggagttccagtttgtgcctgtgctcaagctcgtgtccaccctgctggtgatgggcatctttggcgatgaggatgtgaaacagatcttgaagatgattgagcctgaggtcttcactgaggaagaagaggaggaggacgaggaggaagagggtgaagaggaagatgaggaggagaaggaggaggatgaggaggaaacagcacaggaaaaggaagatgaggaaaaagaggaagaggaggcagcagaaggggagaaagaagaaggcttggaggaagggctgctccagatgaagttgccagagtctgtgaagttacagatgtgccacctgctggagtatttctgtgaccaagagctgcagcaccgtgtggagtccctggcagcctttgcggagcgctatgtggacaagctccaggccaaccagcggagccgctatggcctcctcataaaagccttcagcatgaccgcagcagagactgcaagacgtacccgcgagttccgctccccaccccaggaacagatcaatatgctattgcaattcaaagatggtacagatgaggaagactgtcctctccctgaagagattcgacaggatttgcttgactttcatcaagacctgctggcacactgtggaattcagctagatggagaggaggaggaaccagaggaagagaccaccctgggcagccgcctcatgagcctgttggagaaagtgcggctggtgaagaagaaggaagagaaacctgaggaggagcggtcagcagaggagagcaaaccccggtccctgcaggagctggtgtcccacatggtggtgcgctgggcccaagaggacttcgtgcagagccccgagctggtgcgggccatgttcagcctcctgcaccggcagtacgacgggctgggtgagctgctgcgtgccctgccgcgggcgtacaccatctcaccgtcctccgtggaagacaccatgagcctgctcgagtgcctcggccagatccgctcgctgctcatcgtgcagatgggcccccaggaggagaacctcatgatccagagcatcgggaacatcatgaacaacaaagtcttctaccaacacccgaacctgatgagggcgctgggcatgcacgagacggtcatggaggtcatggtcaacgtcctcgggggcggcgagtccaaggagatccgcttccccaagatggtgacaagctgctgccgcttcctctgctatttctgccgaatcagccggcagaaccagcgctccatgtttgaccacctgagctacctgctggagaacagtggcatcggcctgggcatgcagggctccacgcccctggacgtggctgctgcctccgtcattgacaacaatgagctggccttggcattgcaggagcaggacctggaaaaggttgtgtcctacctggcaggctgtggcctccagagctgccccatgcttgtggccaaagggtacccagacattggctggaacccctgtggtggagagcgctacctggacttcctgcgctttgctgtcttcgtcaacggcgagagcgtggaggagaacgccaatgtggtggtgcggctgctcatccggaagcctgagtgcttcggacccgccctgcggggtgagggtggctcagggctgctggctgccatcgaagaggccatccgcatctccgaggaccctgcgagggatggcccaggcatccgcagggaccggcggcgcgagcactttggtgaggaaccgcctgaagaaaaccgggtgcacctgggacacgccatcatgtccttctatgccgccttgatcgacctgctcggacgctgtgcaccagagatgcatctaatccaagccggcaagggtgaggccctgcggatccgcgccatcctccgctcccttgtgcccttggaggaccttgtgggcatcatcagcctcccactgcagattcccaccctgggcaaagatggggctctggtgcagccaaagatgtcagcatccttcgtgccggaccacaaggcgtccatggtgctcttcctggaccgtgtgtatggcatcgagaaccaggacttcttgctgcacgtgctggacgtggggttcctgcccgacatgagggcagccgcctcgctggacacggccactttcagcaccaccgagatggcgctggccgtgaaccgctacctgtgcctggccgtgctgccgctcatcaccaagtgtgcgccgctctttgcgggcacagaacaccgcgccatcatggtggactctatgctgcataccgtgtaccgcctgtctcggggtcgttcgctcaccaaggcgcagcgtgacgtcatcgaggactgcctcatgtcgctctgcaggtacatccgcccgtcgatgctgcagcacctgttgcgccgcctggtgttcgacgtgcccatcctcaacgagttcgccaagatgccactcaagctcctcaccaaccactatgagcgctgttggaagtactactgcctacccacgggctgggccaacttcggggtcacctcagaggaggagctgcacctcacacggaaactcttctggggcatctttgactctctggcccataagaaatacgacccggagctgtaccgcatggccatgccttgtctgtgcgccattgccggggctctgccccccgactatgtggatgcctcatactcatctaaggcagagaaaaaggccacagtggatgctgaaggcaactttgatccccggcctgtggagaccctcaatgtgatcatcccggagaagctggactccttcattaacaagtttgcggagtacacacacgagaagtgggccttcgacaagatccagaacaactggtcctatggagagaacatagacgaggagctgaagacccaccccatgctgaggccctacaagaccttttcagagaaggacaaagagatttaccgctggcccatcaaggagtccctgaaggccatgattgcctgggaatggacgatagagaaggccagggagggtgaggaggagaagacggaaaagaaaaaaacgcggaagatatcacaaagtgcccagacctatgatcctcgagaaggctacaaccctcagccccccgaccttagtgctgttaccctgtcccgggagctgcaggccatggcagaacaactggcagaaaatgaccaaatcctgtgtatttgttttatatatttaataactgttttaaatgaaagttttagtaaaaaaaatacaaaacaaaaagattaaattgctattgctgtagtaagagaagctctttgtatctgaacatagttgtatttgaaatttgtggttttttaatttatttaaaattggggggagggcatgggaaggatttaacaccgatatattgttgccgctgaaaatgaactttatgaaccttttccaag

SEQ ID NO: 65371 - DNA, 3585 bp, Homo sapiens
tctacctcgcgggtgcctctggtgtctccagaggtctccgaccccagcccgcccccagccctcccgcccagcccgcagccccctccctctgttccccgacctcagaccctgggcttccgacctcgacatcatgggtgacgcagaaggcgaagacgaggtccagttcctgcggacggacgatgaggtggtcctgcagtgcagcgctaccgtgctcaaggagcagctcaagctctgcctggccgccgagggcttcggcaaccgcctgtgcttcctggagcccactagcaacgcgcagaatgtgccccccgatctggccatctgttgcttcgtcctggagcagtccctgtctgtgcgagccctgcaggagatgctggctaacacggtggaggctggcgtggagtcatcccagggcgggggacacaggacgctcctgtatggccatgccatcctgctccggcatgcacacagccgcatgtatctgagctgcctcaccacctcccgctccatgactgacaagctggccttcgatgtgggactgcaggaggacgcaacaggagaggcttgctggtggaccatgcacccagcctccaagcagaggtctgaaggagaaaaggtccgcgttggggatgacatcatccttgtcagtgtctcctccgagcgctacctgcacctgtcgaccgccagtggggagctccaggttgacgcttccttcatgcagacactgtggaacatgaaccccatctgctcccgctgcgaagagggcttcgtgacgggaggtcacgtcctccgcctctttcatggacatatggatgagtgtctgaccatttcccctgctgacagtgatgaccagcgcagacttgtctactatgaggggggagctgtgtgcactcatgcccgctccctctggaggctggagccactgagaatcagctggagtgggagccacctgcgctggggccagccactccgagtccggcatgtcactaccgggcagtacctagcgctcaccgaggaccagggcctggtggtggttgacgccagcaaggctcacaccaaggctacctccttctgcttccgcatctccaaggagaagctggatgtggcccccaagcgggatgtggagggcatgggcccccctgagatcaagtacggggagtcactgtgcttcgtgcagcatgtggcctcaggactgtggctcacctatgccgctccagaccccaaggccctgcggctcggcgtgctcaagaagaaggccatgctgcaccaggagggccacatggacgacgcactgtcgctgacccgctgccagcaggaggagtcccaggccgcccgcatgatccacagcaccaatggcctatacaaccagttcatcaagagcctggacagcttcagcgggaagccacggggctcggggccacccgctggcacggcgctgcccatcgagggcgttatcctgagcctgcaggacctcatcatctacttcgagcctccctccgaggacttgcagcacgaggagaagcagagcaagctgcgaagcctgcgcaaccgccagagcctcttccaggaggaggggatgctctccatggtcctgaattgcatagaccgcctaaatgtctacaccactgctgcccactttgctgagtttgcaggggaggaggcagccgagtcctggaaagagattgtgaatcttctctatgaactcctagcttctctaatccgtggcaatcgtagcaactgtgccctcttctccacaaacttggactggctggtcagcaagctggatcggctggaggcctcgtctggcatcctggaggtcctgtactgtgtcctcattgagagtccagaggttctgaacatcatccaggagaatcacatcaagtccatcatctccctcctggacaagcatgggaggaaccacaaggtcctggacgtgctatgctccctgtgtgtgtgtaatggtgtggctgtacgctccaaccaagatcttattactgagaacttgctgcctggccgtgagcttctgctgcagacaaacctcatcaactatgtcaccagcatccgccccaacatctttgtgggccgagcggaaggcaccacgcagtacagcaaatggtactttgaggtgatggtggacgaggtgactccatttctgacagctcaggccacccacttgcgggtgggctgggccctcaccgagggctacaccccctaccctggggccggcgagggctggggcggcaacggggtcggcgatgacctctattcctacggctttgatggactgcatctctggacaggacacgtggcacgcccagtgacttccccagggcagcacctcctggcccctgaagacgtgatcagctgctgcctggacctcagcgtgccgtccatctccttccgcatcaacggctgccctgtgcagggtgtctttgagtccttcaacctggacgggctcttcttccctgttgtcagcttctcggctggtgtcaaggtgcggttcctccttggtggccgccatggtgaattcaagttcctgcccccacctggctatgctccatgccatgaggctgtgctccctcgagagcgactccatcttgaacccatcaaggagtatcgacgggaggggccccgggggcctcacctggtgggccccagtcgctgcctctcacacaccgacttcgtgccctgccctgtggacactgtccagattgtcctgccgccccatctggagcgcattcgggagaagctggcggagaacatccacgagctctgggcgctaacccgcatcgagcagggctggacctacggcccggttcgggatgacaacaagaggctgcacccgtgtcttgtggacttccacagccttccagagcctgagaggaactacaacctgcagatgtctggggagacgctcaagactctgctggctctgggctgccacgtgggcatggcggatgagaaggcggaggacaacctgaagaagacaaaactccccaagacgtatatgatgagcaatgggtacaagccggctccgctggacctgagccacgtgcggctgacgccggcgcagacaacactggtggaccgtctggcagaaaatgggcacaacgtgtgggcccgagaccgcgtgggccagggctggagctacagcgcagtgcaggacatcccagcgcgccgaaaccctcggctggtgccctaccgcctgctggatgaagccaccaagcgcagcaaccgggacagcctctgccaggccgtgcgcaccctcctgggctacggctacaacatcgagcctcctgaccaggagcccagtcaggtggagaaccagtctcgttgtgaccgggtgcgcatcttccgggcagagaaatcctatacagtgcagagcggccgctggtacttcgagtttgaagcagtcaccacaggcgagatgcgcgtgggctgggcgaggcccgagctgaggcctgatgtagagctgggagctgacgagctggcctatgtcttcaatgggcaccgcgtgggtacctccctgggcaccattctgccaggtcctgtggtctctcccacagcttgtctactctggccctgcct

SEQ ID NO: 65372 - DNA, 1943 bp, Homo sapiens
tctacctcgcgggtgcctctggtgtctccagaggtctccgaccccagcccgcccccagccctcccgcccagcccgcagccccctccctctgttccccgacctcagaccctgggcttccgacctcgacatcatgggtgacgcagaaggcgaagacgaggtccagttcctgcggacggacgatgaggtggtcctgcagtgcagcgctaccgtgctcaaggagcagctcaagctctgcctggccgccgagggcttcggcaaccgcctgtgcttcctggagcccactagcaacgcgcagaatgtgccccccgatctggccatctgttgcttcgtcctggagcagtccctgtctgtgcgagccctgcaggagatgctggctaacacggtggaggctggcgtggagtcatcccagggcgggggacacaggacgctcctgtatggccatgccatcctgctccggcatgcacacagccgcatgtatctgagctgcctcaccacctcccgctccatgactgacaagctggccttcgatgtgggactgcaggaggacgcaacaggagaggcttgctggtggaccatgcacccagcctccaagcagaggtctgaaggagaaaaggtccgcgttggggatgacatcatccttgtcagtgtctcctccgagcgctacctgcacctgtcgaccgccagtggggagctccaggttgacgcttccttcatgcagacactgtggaacatgaaccccatctgctcccgctgcgaagagggcttcgtgacgggaggtcacgtcctccgcctctttcatggacatatggatgagtgtctgaccatttcccctgctgacagtgatgaccagcgcagacttgtctactatgaggggggagctgtgtgcactcatgcccgctccctctggaggctggagccactgagaatcagctggagtgggagccacctgcgctggggccagccactccgagtccggcatgtcactaccgggcagtacctagcgctcaccgaggaccagggcctggtggtggttgacgccagcaaggctcacaccaaggctacctccttctgcttccgcatctccaaggagaagctggatgtggcccccaagcgggatgtggagggcatgggcccccctgagatcaagtacggggagtcactgtgcttcgtgcagcatgtggcctcaggactgtggctcacctatgccgctccagaccccaaggccctgcggctcggcgtgctcaagaagaaggccatgctgcaccaggagggccacatggacgacgcactgtcgctgacccgctgccagcaggaggagtcccaggccgcccgcatgatccacagcaccaatggcctatacaaccagttcatcaagagcctggacagcttcagcgggaagccacggggctcggggccacccgctggcacggcgctgcccatcgagggcgttatcctgagcctgcaggacctcatcatctacttcgagcctccctccgaggacttgcagcacgaggagaagcagagcaagctgcgaagcctgcgcaaccgccagagcctcttccaggaggaggggatgctctccatggtcctgaattgcatagaccgcctaaatgtctacaccactgctgcccactttgctgagtttgcaggggaggaggcagccgagtcctggaaagagattgtgaatcttctctatgaactcctagcttctctaatccgtggcaatcgtagcaactgtgccctcttctccacaaacttggactggctggtcagcaagctggatcggctggaggcctcgtctggcatcctggaggtcctgtactgtgtcctcattgagagtccagaggttctgaacatcatccaggagaatcacatcaagtccatctgacccatcttatacgtcctcacactcattttcaacctcctgtcaaaacacatagcat

SEQ ID NO: 65373 - DNA, 514 bp, Homo sapiens
gtagctgggattacaggcatgcaccaccacgcccggctcatttttgtatttttagtagagacagggtttcaccacattggccaggctggtctcctgacctcaagtgatccatccgccttggccttccaaagtgctgggattacaggtgtgagccactgcatccggcccccaggaggatttaatctctggccccacagctcagaatcctaacttcaggggaaccctgacctctgcccttcatttcagagctacgggagcatccaagggagcactttccattagggtttccaggatgcaatctccacaggagcctccaatatctgtcccttttctcttgttatcattggttctgtgggacctgtgacgtctgacccatctctggtgactgatgcaggacacgtggcacgcccagtgacttccccagggcagcacctcctggcccctgaagacgtgatcagctgctgcctggacctcagcgtgccgtccatctccttccgcatcaacggctgccctg

SEQ ID NO: 65374 - DNA, 241 bp, Homo sapiens
aatgttcatctgcatggccagatgaccctagaaaccccatccctctgactggatgtctcctggtccccatctcctcctccaagatctctctctgggcagcccccttccctgggatccccaccccctccctcacctcccctccgctgaccccagggcgcagtggctgacggagccgaatcccagcgcggaggagctgttcaggatggtgggcgagatcttcatctactggtccaagtcccac

SEQ ID NO: 65375 - DNA, 310 bp, Homo sapiens
cacctgtcgaccgccagtggggagctccaggttgacgcttccttcatgcagacactgtggaacatgaaccccatctgctcccgctgcgaagagggtgagggccccagacctccccctaaatggagatccccccaaaacagacccttaatgttgcccttcaggcatacccaaatggagccttggaacctcagacctcaaacctagatctccaaattatggctctcacacttagatctccagctgaccccaaatccagacccccagagctcagaacccccccaaaccccgaactaaatatcaggctcccaaa

SEQ ID NO: 65376 - DNA, 407 bp, Homo sapiens
gaccagattccggggagctgaacccttgacttcactctcttctgtgtccccagacttgtctactatgaggggggagctgtgtgcactcatgcccgctccctctggaggctggagccactgagaatcaggtagggcggggaagatggggagagaccagggagaggctggggtcacctggcaggctgggaggacagaaaaggtcttgagggaagatctgataaagagactgaagggtctcgagggaaaatcagagcagcctgagagagagatgaaaatctcggccaggcgtggtgacttcatgcctgtaatcccagcactttgggaggctgaggcaagaggatcactggaggccagaagttcaaaaccagcctaggcaacatcatgagacccccgtctctgcaaaaaaa

SEQ ID NO: 65377 - DNA, 12498 bp, Homo sapiens
ctgtatgatcgacctcacagagaacaccattatcttcaccctcaatggcgaggtcctcatgtctgactcaggctccgaaacagccttccgggagattgagattggggacggcttcctgcccgtctgcagcttgggacctggccaggtgggtcatctgaacctgggccaggacgtgagctctctgaggttctttgccatctgtggcctccaggaaggcttcgagccatttgccatccacgtgcggctgacgccggcgcagacaacactggtggaccgtctggcagaaaatgggcacaacgtgtgggcccgagaccgcgtgggccagggctggagctacagcgcagtgcaggacatcccagcgcgccgaaaccctcggctggtgccctaccgcctgctggatgaagccaccaagcgcagcaaccgggacagcctctgccaggccgtgcgcaccctcctgggctacggctacaacatcgagcctcctgaccaggagcccagtcaggtggagaaccagtctcgttgtgaccgggtgcgcatcttccgggcagagaaatcctatacagtgcagagcggccgctggtacttcgagtttgaagcagtcaccacaggcgagatgcgcgtgggctgggcgaggcccgagctgaggcctgatgtagagctgggagctgacgagctggcctatgtcttcaatgggcaccgcggccagcgctggcacttgggcagtgaaccatttgggcgcccctggcagccgggcgatgtcgttggctgtatgatcgacctcacagagaacaccattatcttcaccctcaatggcgaggtcctcatgtctgactcaggctccgaaacagccttccgggagattgagattggggacggcttcctgcccgtctgcagcttgggacctggccaggtgggtcatctgaacctgggccaggacgtgagctctctgaggttctttgccatctgtggcctccaggaaggcttcgagccatttgccatcaacatgcagcgcccagtcaccacctggttcagcaaaggcctgccccagtttgagccagtgccccttgaacaccctcactatgaggtatcccgagtggacggcactgtggacacgcccccctgcctgcgcctgacccaccgcacctggggctcccagaacagcctggtggagatgcttttcctgcggctgagcctcccagtccagttccaccagcacttccgctgcactgcaggggccaccccgctggcacctcctggcctgcagccccccgccgaggacgaggcccgggcggcggaacccgaccctgactacgaaaacctgcgccgctcagctgggggctggagcgaggcagagaacggcaaagaagggactgcgaaggagggcgcccccgggggcaccccgcaggcggggggagaggcgcagcccgccagggcggagaatgagaaggatgccaccaccgagaagaacaagaagagaggcttcttattcaaggccaagaaggtcgccatgatgacccagccaccggccacccccacgctgccccgactccctcacgacgtggtgcctgcagacaaccgcgatgaccccgagatcatcctcaacaccaccacgtactattactccgtgagggtctttgctggacaggagcccagctgcgtgtgggcgggctgggtcacccctgactaccatcagcacgacatgagcttcgacctcagcaaggtccgggtcgtgacggtgaccatgggggatgaacaaggcaacgtccacagcagcctcaagtgtagcaactgctacatggtgtggggcggagactttgtgagtcccgggcagcagggccggatcagccacacggaccttgtcattgggtgcctggtggacttggccactggcttaatgacctttacagccaatggcaaagagagcaacacctttttccaggtggaacccaacactaagctatttcctgccgtcttcgtcctgcccacccaccagaacgtcatccagtttgagctggggaagcagaagaacatcatgccgttgtcagccgccatgttccaaagcgagcgcaagaacccggccccgcagtgcccaccgcggctggagatgcagatgctgatgccagtgtcctggagccgcatgcccaaccacttcctgcaggtggagacgaggcgtgccggcgagcggctgggctgggccgtgcagtgccaggagccgctgaccatgatggcgctgcacatccccgaggagaaccggtgcatggacatcctggagctgtcggagcgcctggacctgcagcgcttccactcgcacaccctgcgcctctaccgcgctgtgtgcgccctgggcaacaatcgcgtggcgcacgctctgtgcagccacgtagaccaagctcagctgctgcacgccctggaggacgcgcacctgccaggcccactgcgcgcaggctactatgacctcctcatcagcatccacctcgaaagtgcctgccgcagccgccgctccatgctctctgaatacatcgtgcccctcacgcctgagacccgcgccatcacgctcttccctcctggaaggagcacagaaaatggtcacccccggcatggcctgccgggagttggagtcaccacttcgctgaggcccccgcatcatttctcgcccccctgtttcgtggccgctctgccagctgctggggcagcagaggccccggcccgcctcagccctgccatcccgctggaggccctgcgggacaaggcactgaggatgctgggggaggcggtgcgcgacggtgggcagcacgctcgcgaccccgtcggggcctccgtggagttccagtttgtgcctgtgctcaagctcgtgtccaccctgctggtgatgggcatctttggcgatgaggatgtgaaacagatcttgaagatgattgagcctgaggtcttcactgaggaagaagaggaggaggacgaggaggaagagggtgaagaggaagatgaggaggagaaggaggaggatgaggaggaaacagcacaggaaaaggaagatgaggaaaaagaggaagaggaggcagcagaaggggagaaagaagaaggcttggaggaagggctgctccagatgaagttgccagagtctgtgaagttacagatgtgccacctgctggagtatttctgtgaccaagagctgcagcaccgtgtggagtccctggcagcctttgcggagcgctatgtggacaagctccaggccaaccagcggagccgctatggcctcctcataaaagccttcagcatgaccgcagcagagactgcaagacgtacccgcgagttccgctccccaccccaggaacagatcaatatgctattgcaattcaaagatggtacagatgaggaagactgtcctctccctgaagagattcgacaggatttgcttgactttcatcaagacctgctggcacactgtggaattcagctagatggagaggaggaggaaccagaggaagagaccaccctgggcagccgcctcatgagcctgttggagaaagtgcggctggtgaagaagaaggaagagaaacctgaggaggagcggtcagcagaggagagcaaaccccggtccctgcaggagctggtgtcccacatggtggtgcgctgggcccaagaggacttcgtgcagagccccgagctggtgcgggccatgttcagcctcctgcaccggcagtacgacgggctgggtgagctgctgcgtgccctgccgcgggcgtacaccatctcaccgtcctccgtggaagacaccatgagcctgctcgagtgcctcggccagatccgctcgctgctcatcgtgcagatgggcccccaggaggagaacctcatgatccagagcatcgggaacatcatgaacaacaaagtcttctaccaacacccgaacctgatgagggcgctgggcatgcacgagacggtcatggaggtcatggtcaacgtcctcgggggcggcgagtccaaggagatccgcttccccaagatggtgacaagctgctgccgcttcctctgctatttctgccgaatcagccggcagaaccagcgctccatgtttgaccacctgagctacctgctggagaacagtggcatcggcctgggcatgcagggctccacgcccctggacgtggctgctgcctccgtcattgacaacaatgagctggccttggcattgcaggagcaggacctggaaaaggttgtgtcctacctggcaggctgtggcctccagagctgccccatgcttgtggccaaagggtacccagacattggctggaacccctgtggtggagagcgctacctggacttcctgcgctttgctgtcttcgtcaacggcgagagcgtggaggagaacgccaatgtggtggtgcggctgctcatccggaagcctgagtgcttcggacccgccctgcggggtgagggtggctcagggctgctggctgccatcgaagaggccatccgcatctccgaggaccctgcgagggatggcccaggcatccgcagggaccggcggcgcgagcactttggtgaggaaccgcctgaagaaaaccgggtgcacctgggacacgccatcatgtccttctatgccgccttgatcgacctgctcggacgctgtgcaccagagatgcatctaatccaagccggcaagggtgaggccctgcggatccgcgccatcctccgctcccttgtgcccttggaggaccttgtgggcatcatcagcctcccactgcagattcccaccctgggcaaagatggggctctggtgcagccaaagatgtcagcatccttcgtgccggaccacaaggcgtccatggtgctcttcctggaccgtgtgtatggcatcgagaaccaggacttcttgctgcacgtgctggacgtggggttcctgcccgacatgagggcagccgcctcgctggacacggccactttcagcaccaccgagatggcgctggccgtgaaccgctacctgtgcctggccgtgctgccgctcatcaccaagtgtgcgccgctctttgcgggcacagaacaccgcgccatcatggtggactctatgctgcataccgtgtaccgcctgtctcggggtcgttcgctcaccaaggcgcagcgtgacgtcatcgaggactgcctcatgtcgctctgcaggtacatccgcccgtcgatgctgcagcacctgttgcgccgcctggtgttcgacgtgcccatcctcaacgagttcgccaagatgccactcaagctcctcaccaaccactatgagcgctgttggaagtactactgcctacccacgggctgggccaacttcggggtcacctcagaggaggagctgcacctcacacggaaactcttctggggcatctttgactctctggcccataagaaatacgacccggagctgtaccgcatggccatgccttgtctgtgcgccattgccggggctctgccccccgactatgtggatgcctcatactcatctaaggcagagaaaaaggccacagtggatgctgaaggcaactttgatccccggcctgtggagaccctcaatgtgatcatcccggagaagctggactccttcattaacaagtttgcggagtacacacacgagaagtgggccttcgacaagatccagaacaactggtcctatggagagaacatagacgaggagctgaagacccaccccatgctgaggccctacaagaccttttcagagaaggacaaagagatttaccgctggcccatcaaggagtccctgaaggccatgattgcctgggaatggacgatagagaaggccagggagggtgaggaggagaagacggaaaagaaaaaaacgcggaagatatcacaaagtgcccagacctatgatcctcgagaaggctacaaccctcagccccccgaccttagtgctgttaccctgtcccgggagctgcaggccatggcagaacaactggcagaaaattaccacaacacgtggggacggaagaagaagcaggagctggaagccaaaggcggtgggacccaccccctgctggtcccctacgacacgctcacggccaaggagaaggcacgagatcgagagaaggcccaggagctactgaaattcctgcagatgaatggctacgcggttacaagaggccttaaggacatggaactggactcgtcttccattgaaaagcggtttgcctttggcttcctgcagcagctgctgcgctggatggacatttctcaggagttcattgcccacctggaggctgtggtcagcagtgggcgagtggaaaagtccccacatgaacaggagattaaattctttgccaagatcctgctccctttgatcaaccagtacttcaccaaccactgcctctatttcttgtccactccggctaaagtgctgggcagcggtggccacgcctctaacaaggagaaggaaatgatcaccagcctcttctgcaaacttgctgctctcgtccgccaccgagtctctctctttgggacagacgccccagctgtggtcaactgtcttcacatcctggcccgctccctggatgccaggacagtgatgaagtcaggccctgagatcgtgaaggctggcctccgctccttcttcgagagtgcctcggaggacatcgagaagatggtggagaacctgcggctgggcaaggtgtcgcaggcgcgcacccaggtgaaaggcgtgggccagaacctcacctacaccactgtggcactgctgccggtcctcaccaccctcttccagcacatcgcccagcaccagttcggagatgacgtcatcctggacgacgtccaggtctcttgctaccgaacgctgtgcagtatctactccctgggaaccaccaagaacacttatgtggaaaagcttcggccagccctcggggagtgcctggcccgtctggcagcagccatgccggtggcgttcctggagccgcagctgaacgagtacaacgcctgctccgtgtacaccaccaagtctccgcgggagcgggccatcctggggctccccaacagtgtggaggagatgtgtcccgacatcccggtgctggagcggctcatggcagacattggggggctggccgagtcaggtgcccgctacacagagatgccgcatgtcatcgagatcacgctgcccatgctatgcagctacctgccccgatggtgggagcgcgggcccgaggcacccccttccgccctgcccgccggcgcccccccaccctgcacagctgtcacctctgaccacctcaactccctgctggggaatatcctgagaatcatcgtcaacaacctgggcattgacgaggcctcctggatgaagcggctggctgtgttcgcacagcccattgtgagccgtgcacggccggagctcctgcagtcccacttcatcccaactatcgggcggctgcgcaagagggcagggaaggtggtgtccgaggaggagcagctgcgcctggaggccaaggcggaggcccaggagggcgagctgctggtgcgggacgagttctctgtgctctgccgggacctctacgccctgtatccgctgctcatccgctacgtggacaacaacagggcgcagtggctgacggagccgaatcccagcgcggaggagctgttcaggatggtgggcgagatcttcatctactggtccaagtcccacaacttcaagcgcgaggagcagaactttgtggtccagaatgagatcaacaacatgtccttcctgactgctgacaacaaaagcaaaatggctaaggtcggggagtccggtggctcggaccaggaacgcaccaagaagaagcgccggggggaccggtactctgtgcagacgtcactgatcgtggccacactgaagaagatgctgcccatcggcctgaatatgtgtgcgcccaccgaccaagacctcatcacgctggccaagacccgttacgccctgaaagacacagatgaggaggtccgggaatttctgcacaacaaccttcaccttcagggaaaggtcgaaggctccccgtctctgcgctggcagatggctctgtaccggggcgtcccgggtcgcgaggaggacgccgatgaccccgagaaaatcgtgcgcagagtccaggaagtgtcagccgtgctctactacctggaccagaccgagcacccttacaagtctaagaaggccgtgtggcacaagcttttgtccaaacagcgccggcgggcagtcgtggcctgtttccgtatgacgcccctgtacaacctgcccacgcaccgggcatgtaacatgttcctggagagctacaaggctgcatggatcctgactgaagaccacagttttgaggaccgcatgatagatgacctttcaaaagctggggagcaggaggaggaggaggaagaggtggaagagaagaagccagaccccctgcaccagttggtcctgcacttcagccgcactgccctgacggaaaagagcaaactggatgaggattacctgtacatggcctatgctgatatcatggcaaagagctgccacctggaggagggaggggagaacggtgaagctgaagaggaggttgaggtctcctttgaggagaaacagatggagaagcagaggctcttgtaccagcaagcacggctgcacacccggggggcggccgagatggtgctgcagatgatcagtgcctgcaaaggagagacaggtgccatggtgtcctccaccctgaagctgggcatctccatcctcaatggaggcaatgctgaggtccagcagaaaatgctggattatcttaaggacaagaaggaagttggcttcttccagagtatccaggcactgatgcaaacatgcagcgtcctggatctcaatgcctttgagagacagaacaaggccgaggggctgggcatggtgaatgaggatggcactgtcatcaatcgccagaacggagagaaggtcatggcggatgatgaattcacacaagacctgttccgattcctacaattgctctgtgaggggcacaataatgatttccagaactacctacggacacagacagggaacacgaccactattaacatcatcatttgcactgtggactacctcctgcggctgcaggaatccatcagcgacttctactggtactactcgggcaaggatgtcattgaagagcagggcaagaggaacttctccaaagccatgtcggtggctaagcaggtgttcaacagcctcactgagtacatccagggtccctgcaccgggaaccagcagagcctggcgcacagtcgcctatgggacgcagtggtgggattcctgcacgtgttcgcccacatgatgatgaagctcgctcaggactcaagccagatcgagctgctgaaggagctgctggatctgcagaaggacatggtggtgatgttgctgtcgctactagaagggaacgtggtgaacggcatgatcgcccggcagatggtggacatgctcgtggaatcctcatccaatgtggagatgatcctcaagttcttcgacatgttcctgaaactcaaggacattgtgggctctgaagccttccaggactacgtaacggatccccgtggcctcatctccaagaaggacttccagaaggccatggacagccagaagcagttcagcggtccagaaatccagttcctgctttcgtgctccgaagcggatgagaacgaaatgatcaactgcgaagagttcgccaaccgcttccaggagccagcacgcgacatcggcttcaacgtggcggtgctgctgaccaacctgtcggagcatgtgccgcatgaccctcgcctgcacaacttcctggagctggccgagagcatccttgagtacttccgcccctacctgggccgcatcgagatcatgggcgcgtcacgccgcatcgagcgcatctacttcgagatctcagagaccaaccgcgcccagtgggagatgccccaggtgaaggagtccaagcgccagttcatcttcgacgtggtgaacgagggcggcgaggctgagaagatggagctcttcgtgagtttctgcgaggacaccatcttcgagatgcagatcgccgcgcagatctcggagcccgagggcgagccggagaccgacgaggacgagggcgcgggcgcggcggaggcgggcgcggaaggcgcggaggagggcgcggcggggctcgagggcacggcggccacggcggcggcgggggcgacggcgcgggttgtggcggccgcaggccgggccctgcgaggcctcagctaccgcagcctgcggcggcgcgtgcggcggctgcggcggcttacggcccgcgaggcggccaccgcagtggcggcgctgctctgggcagcagtgacgcgcgctggggccgctggcgcgggggcggcggcgggcgcgctgggcctgctctggggctcgctgttcggcggcggcctggtggagggcgccaagaaggtgacggtgaccgagctcctggcaggcatgcccgaccccaccagcgacgaggtgcacggcgagcagccggccgggccgggcggagacgcagacggcgagggtgccagcgagggcgctggagacgccgcggagggcgctggagacgaggaggaggcggtgcacgaggccgggccgggcggtgccgacggggcggtggccgtgaccgatgggggccccttccggcccgaaggggctggcggtctcggggacatgggggacacgacgcctgcggaaccgcccacacccgagggctctcccatcctcaagaggaaattgggggtggatggagtggaggaggagctcccgccagagccagagcccgagccggaaccagagctggagccggagaaagccgatgccgagaatggggagaaggaagaagttcccgagcccacaccagagccccccaagaagcaagcacctccctcaccccctccaaagaaggaggaagctggaggcgaattctggggagaactggaggtgcagagggtgaagttcctggtctcagactctccaccaggggaggacgacatggaaggctcagctgctggggatgtgtcaggtgcaggctctggtggcagctctggctggggcttgggggccggagaggaggcagagggcgatgaggatgagaacatggtgtactacttcctggaggaaagcacaggctacatggaacccgccctgcggtgtctgagcctcctgcatacactggtggcctttctctgcatcattggctataattgtctcaaggtgcccctggtaatctttaagcgggagaaggagctggcccggaagctggagtttgatggcctgtacatcacggagcagcctgaggacgatgacgtgaaggggcagtgggaccgactggtgctcaacacgccgtctttccctagcaactactgggacaagtttgtcaagcgcaaggtcctggacaaacatggggacatctacgggcgggagcggattgctgagctactgggcatggacctggccacactagagatcacagcccacaatgagcgcaagcccaacccgccgccagggctgctgacctggctcatgtccatcgatgtcaagtaccagatctggaagttcggggtcatcttcacagacaactccttcctgtacctgggctggtatatggtgatgtccctcttgggacactacaacaacttcttctttgctgcccatctcctggacatcgccatgggggtcaagacgctgcgcaccatcctgtcctctgtcacccacaatgggaaacagctggtgatgaccgtgggccttctggcggtggtcgtctacctgtacaccgtggtggccttcaacttcttccgcaagttctacaacaagagcgaggatgaggatgaacctgacatgaagtgtgatgacatgatgacgtgttacctgtttcacatgtacgtgggtgtccgggctggcggaggcattggggacgagatcgaggaccccgcgggtgacgaatacgagctctacagggtggtcttcgacatcaccttcttcttcttcgtcatcgtcatcctgttggccatcatccagggtctgatcatcgacgcttttggtgagctccgagaccaacaagagcaagtgaaggaggatatggagaccaagtgcttcatctgtggaatcggcagtgactactttgatacgacaccgcatggcttcgagactcacacgctggaggagcacaacctggccaattacatgtttttcctgatgtatttgataaacaaggatgagacagaacacacgggtcaggagtcttatgtctggaagatgtaccaagagagatgttgggatttcttcccagctggtgattgtttccgtaagcagtatgaggaccagcttagctgacacacccccagctggccctccacccccacctcaagtgccttattctcacagcaagccccttagtccccaagcccctccccctaaggcagctgggggagaggtgacctagtactggaaaataaatctgtgctacgccccccagcaaaaaaatgttg

SEQ ID NO: 65378 - DNA, 10849 bp, Homo sapiens
tctacctcgcgggtgcctctggtgtctccagaggtctccgaccccagcccgcccccagccctcccgcccagcccgcagccccctccctctgttccccgacctcagaccctgggcttccgacctcgacatcatgggtgacgcagaaggcgaagacgaggtccagttcctgcggacggacgatgaggtggtcctgcagtgcagcgctaccgtgctcaaggagcagctcaagctctgcctggccgccgagggcttcggcaaccgcctgtgcttcctggagcccactagcaacgcgcagaatgtgccccccgatctggccatctgttgcttcgtcctggagcagtccctgtctgtgcgagccctgcaggagatgctggctaacacggtggaggctggcgtggagtcatcccagggcgggggacacaggacgctcctgtatggccatgccatcctgctccggcatgcacacagccgcatgtatctgagctgcctcaccacctcccgctccatgactgacaagctggccttcgatgtgggactgcaggaggacgcaacaggagaggcttgctggtggaccatgcacccagcctccaagcagaggtctgaaggagaaaaggtccgcgttggggatgacatcatccttgtcagtgtctcctccgagcgctacctgcacctgtcgaccgccagtggggagctccaggttgacgcttccttcatgcagacactgtggaacatgaaccccatctgctcccgctgcgaagagggcttcgtgacgggaggtcacgtcctccgcctctttcatggacatatggatgagtgtctgaccatttcccctgctgacagtgatgaccagcgcagacttgtctactatgaggggggagctgtgtgcactcatgcccgctccctctggaggctggagccactgagaatcagctggagtgggagccacctgcgctggggccagccactccgagtccggcatgtcactaccgggcagtacctagcgctcaccgaggaccagggcctggtggtggttgacgccagcaaggctcacaccaaggctacctccttctgcttccgcatctccaaggagaagctggatgtggcccccaagcgggatgtggagggcatgggcccccctgagatcaagtacggggagtcactgtgcttcgtgcagcatgtggcctcaggactgtggctcacctatgccgctccagaccccaaggccctgcggctcggcgtgctcaagaagaaggccatgctgcaccaggagggccacatggacgacgcactgtcgctgacccgctgccagcaggaggagtcccaggccgcccgcatgatccacagcaccaatggcctatacaaccagttcatcaagagcctggacagcttcagcgggaagccacggggctcggggccacccgctggcacggcgctgcccatcgagggcgttatcctgagcctgcaggacctcatcatctacttcgagcctccctccgaggacttgcagcacgaggagaagcagagcaagctgcgaagcctgcgcaaccgccagagcctcttccaggaggaggggatgctctccatggtcctgaattgcatagaccgcctaaatgtctacaccactgctgcccactttgctgagtttgcaggggaggaggcagccgagtcctggaaagagattgtgaatcttctctatgaactcctagcttctctaatccgtggcaatcgtagcaactgtgccctcttctccacaaacttggactggctggtcagcaagctggatcggctggaggcctcgtctggcatcctggaggtcctgtactgtgtcctcattgagagtccagaggttctgaacatcatccaggagaatcacatcaagtccatcatctccctcctggacaagcatgggaggaaccacaaggtcctggacgtgctatgctccctgtgtgtgtgtaatggtgtggctgtacgctccaaccaagatcttattactgagaacttgctgcctggccgtgagcttctgctgcagacaaacctcatcaactatgtcaccagcatccgccccaacatctttgtgggccgagcggaaggcaccacgcagtacagcaaatggtactttgaggtgatggtggacgaggtgactccatttctgacagctcaggccacccacttgcgggtgggctgggccctcaccgagggctacaccccctaccctggggccggcgagggctggggcggcaacggggtcggcgatgacctctattcctacggctttgatggactgcatctctggacaggacacgtggcacgcccagtgacttccccagggcagcacctcctggcccctgaagacgtgatcagctgctgcctggacctcagcgtgccgtccatctccttccgcatcaacggctgccctgtgcagggtgtctttgagtccttcaacctggacgggctcttcttccctgttgtcagcttctcggctggtgtcaaggtgcggttcctccttggtggccgccatggtgaattcaagttcctgcccccacctggctatgctccatgccatgaggctgtgctccctcgagagcgactccatcttgaacccatcaaggagtatcgacgggaggggccccgggggcctcacctggtgggccccagtcgctgcctctcacacaccgacttcgtgccctgccctgtggacactgtccagattgtcctgccgccccatctggagcgcattcgggagaagctggcggagaacatccacgagctctgggcgctaacccgcatcgagcagggctggacctacggcccggttcgggatgacaacaagaggctgcacccgtgtcttgtggacttccacagccttccagagcctgagaggaactacaacctgcagatgtctggggagacgctcaagactctgctggctctgggctgccacgtgggcatggcggatgagaaggcggaggacaacctgaagaagacaaaactccccaagacgtatatgatgagcaatgggtacaagccggctccgctggacctgagccacgtgcggctgacgccggcgcagacaacactggtggaccgtctggcagaaaatgggcacaacgtgtgggcccgagaccgcgtgggccagggctggagctacagcgcagtgcaggacatcccagcgcgccgaaaccctcggctggtgccctaccgcctgctggatgaagccaccaagcgcagcaaccgggacagcctctgccaggccgtgcgcaccctcctgggctacggctacaacatcgagcctcctgaccaggagcccagtcaggtggagaaccagtctcgttgtgaccgggtgcgcatcttccgggcagagaaatcctatacagtgcagagcggccgctggtacttcgagtttgaagcagtcaccacaggcgagatgcgcgtgggctgggcgaggcccgagctgaggcctgatgtagagctgggagctgacgagctggcctatgtcttcaatgggcaccgcggccagcgctggcacttgggcagtgaaccatttgggcgcccctggcagccgggcgatgtcgttggctgtatgatcgacctcacagagaacaccattatcttcaccctcaatggcgaggtcctcatgtctgactcaggctccgaaacagccttccgggagattgagattggggacggcttcctgcccgtctgcagcttgggacctggccaggtgggtcatctgaacctgggccaggacgtgagctctctgaggttctttgccatctgtggcctccaggaaggcttcgagccatttgccatcaacatgcagcgcccagtcaccacctggttcagcaaaggcctgccccagtttgagccagtgccccttgaacaccctcactatgaggtatcccgagtggacggcactgtggacacgcccccctgcctgcgcctgacccaccgcacctggggctcccagaacagcctggtggagatgcttttcctgcggctgagcctcccagtccagttccaccagcacttccgctgcactgcaggggccaccccgctggcacctcctggcctgcagccccccgccgaggacgaggcccgggcggcggaacccgaccctgactacgaaaacctgcgccgctcagctgggggctggagcgaggcagagaacggcaaagaagggactgcgaaggagggcgcccccgggggcaccccgcaggcggggggagaggcgcagcccgccagggcggagaatgagaaggatgccaccaccgagaagaacaagaagagaggcttcttattcaaggccaagaaggtcgccatgatgacccagccaccggccacccccacgctgccccgactccctcacgacgtggtgcctgcagacaaccgcgatgaccccgagatcatcctcaacaccaccacgtactattactccgtgagggtctttgctggacaggagcccagctgcgtgtgggcgggctgggtcacccctgactaccatcagcacgacatgagcttcgacctcagcaaggtccgggtcgtgacggtgaccatgggggatgaacaaggcaacgtccacagcagcctcaagtgtagcaactgctacatggtgtggggcggagactttgtgagtcccgggcagcagggccggatcagccacacggaccttgtcattgggtgcctggtggacttggccactggcttaatgacctttacagccaatggcaaagagagcaacacctttttccaggtggaacccaacactaagctatttcctgccgtcttcgtcctgcccacccaccagaacgtcatccagtttgagctggggaagcagaagaacatcatgccgttgtcagccgccatgttccaaagcgagcgcaagaacccggccccgcagtgcccaccgcggctggagatgcagatgctgatgccagtgtcctggagccgcatgcccaaccacttcctgcaggtggagacgaggcgtgccggcgagcggctgggctgggccgtgcagtgccaggagccgctgaccatgatggcgctgcacatccccgaggagaaccggtgcatggacatcctggagctgtcggagcgcctggacctgcagcgcttccactcgcacaccctgcgcctctaccgcgctgtgtgcgccctgggcaacaatcgcgtggcgcacgctctgtgcagccacgtagaccaagctcagctgctgcacgccctggaggacgcgcacctgccaggcccactgcgcgcaggctactatgacctcctcatcagcatccacctcgaaagtgcctgccgcagccgccgctccatgctctctgaatacatcgtgcccctcacgcctgagacccgcgccatcacgctcttccctcctggaaggagcacagaaaatggtcacccccggcatggcctgccgggagttggagtcaccacttcgctgaggcccccgcatcatttctcgcccccctgtttcgtggccgctctgccagctgctggggcagcagaggccccggcccgcctcagccctgccatcccgctggaggccctgcgggacaaggcactgaggatgctgggggaggcggtgcgcgacggtgggcagcacgctcgcgaccccgtcggggcctccgtggagttccagtttgtgcctgtgctcaagctcgtgtccaccctgctggtgatgggcatctttggcgatgaggatgtgaaacagatcttgaagatgattgagcctgaggtcttcactgaggaagaagaggaggaggacgaggaggaagagggtgaagaggaagatgaggaggagaaggaggaggatgaggaggaaacagcacaggaaaaggaagatgaggaaaaagaggaagaggaggcagcagaaggggagaaagaagaaggcttggaggaagggctgctccagatgaagttgccagagtctgtgaagttacagatgtgccacctgctggagtatttctgtgaccaagagctgcagcaccgtgtggagtccctggcagcctttgcggagcgctatgtggacaagctccaggccaaccagcggagccgctatggcctcctcataaaagccttcagcatgaccgcagcagagactgcaagacgtacccgcgagttccgctccccaccccaggaacagatcaatatgctattgcaattcaaagatggtacagatgaggaagactgtcctctccctgaagagattcgacaggatttgcttgactttcatcaagacctgctggcacactgtggaattcagctagatggagaggaggaggaaccagaggaagagaccaccctgggcagccgcctcatgagcctgttggagaaagtgcggctggtgaagaagaaggaagagaaacctgaggaggagcggtcagcagaggagagcaaaccccggtccctgcaggagctggtgtcccacatggtggtgcgctgggcccaagaggacttcgtgcagagccccgagctggtgcgggccatgttcagcctcctgcaccggcagtacgacgggctgggtgagctgctgcgtgccctgccgcgggcgtacaccatctcaccgtcctccgtggaagacaccatgagcctgctcgagtgcctcggccagatccgctcgctgctcatcgtgcagatgggcccccaggaggagaacctcatgatccagagcatcgggaacatcatgaacaacaaagtcttctaccaacacccgaacctgatgagggcgctgggcatgcacgagacggtcatggaggtcatggtcaacgtcctcgggggcggcgagtccaaggagatccgcttccccaagatggtgacaagctgctgccgcttcctctgctatttctgccgaatcagccggcagaaccagcgctccatgtttgaccacctgagctacctgctggagaacagtggcatcggcctgggcatgcagggctccacgcccctggacgtggctgctgcctccgtcattgacaacaatgagctggccttggcattgcaggagcaggacctggaaaaggttgtgtcctacctggcaggctgtggcctccagagctgccccatgcttgtggccaaagggtacccagacattggctggaacccctgtggtggagagcgctacctggacttcctgcgctttgctgtcttcgtcaacggcgagagcgtggaggagaacgccaatgtggtggtgcggctgctcatccggaagcctgagtgcttcggacccgccctgcggggtgagggtggctcagggctgctggctgccatcgaagaggccatccgcatctccgaggaccctgcgagggatggcccaggcatccgcagggaccggcggcgcgagcactttggtgaggaaccgcctgaagaaaaccgggtgcacctgggacacgccatcatgtccttctatgccgccttgatcgacctgctcggacgctgtgcaccagagatgcatctaatccaagccggcaagggtgaggccctgcggatccgcgccatcctccgctcccttgtgcccttggaggaccttgtgggcatcatcagcctcccactgcagattcccaccctgggcaaagatggggctctggtgcagccaaagatgtcagcatccttcgtgccggaccacaaggcgtccatggtgctcttcctggaccgtgtgtatggcatcgagaaccaggacttcttgctgcacgtgctggacgtggggttcctgcccgacatgagggcagccgcctcgctggacacggccactttcagcaccaccgagatggcgctggccgtgaaccgctacctgtgcctggccgtgctgccgctcatcaccaagtgtgcgccgctctttgcgggcacagaacaccgcgccatcatggtggactctatgctgcataccgtgtaccgcctgtctcggggtcgttcgctcaccaaggcgcagcgtgacgtcatcgaggactgcctcatgtcgctctgcaggtacatccgcccgtcgatgctgcagcacctgttgcgccgcctggtgttcgacgtgcccatcctcaacgagttcgccaagatgccactcaagctcctcaccaaccactatgagcgctgttggaagtactactgcctacccacgggctgggccaacttcggggtcacctcagaggaggagctgcacctcacacggaaactcttctggggcatctttgactctctggcccataagaaatacgacccggagctgtaccgcatggccatgccttgtctgtgcgccattgccggggctctgccccccgactatgtggatgcctcatactcatctaaggcagagaaaaaggccacagtggatgctgaaggcaactttgatccccggcctgtggagaccctcaatgtgatcatcccggagaagctggactccttcattaacaagtttgcggagtacacacacgagaagtgggccttcgacaagatccagaacaactggtcctatggagagaacatagacgaggagctgaagacccaccccatgctgaggccctacaagaccttttcagagaaggacaaagagatttaccgctggcccatcaaggagtccctgaaggccatgattgcctgggaatggacgatagagaaggccagggagggtgaggaggagaagacggaaaagaaaaaaacgcggaagatatcacaaagtgcccagacctatgatcctcgagaaggctacaaccctcagccccccgaccttagtgctgttaccctgtcccgggagctgcaggccatggcagaacaactggcagaaaattaccacaacacgtggggacggaagaagaagcaggagctggaagccaaaggcggtgggacccaccccctgctggtcccctacgacacgctcacggccaaggagaaggcacgagatcgagagaaggcccaggagctactgaaattcctgcagatgaatggctacgcggttacaagaggccttaaggacatggaactggactcgtcttccattgaaaagcggtttgcctttggcttcctgcagcagctgctgcgctggatggacatttctcaggagttcattgcccacctggaggctgtggtcagcagtgggcgagtggaaaagtccccacatgaacaggagattaaattctttgccaagatcctgctccctttgatcaaccagtacttcaccaaccactgcctctatttcttgtccactccggctaaagtgctgggcagcggtggccacgcctctaacaaggagaaggaaatgatcaccagcctcttctgcaaacttgctgctctcgtccgccaccgagtctctctctttgggacagacgccccagctgtggtcaactgtcttcacatcctggcccgctccctggatgccaggacagtgatgaagtcaggccctgagatcgtgaaggctggcctccgctccttcttcgagagtgcctcggaggacatcgagaagatggtggagaacctgcggctgggcaaggtgtcgcaggcgcgcacccaggtgaaaggcgtgggccagaacctcacctacaccactgtggcactgctgccggtcctcaccaccctcttccagcacatcgcccagcaccagttcggagatgacgtcatcctggacgacgtccaggtctcttgctaccgaacgctgtgcagtatctactccctgggaaccaccaagaacacttatgtggaaaagcttcggccagccctcggggagtgcctggcccgtctggcagcagccatgccggtggcgttcctggagccgcagctgaacgagtacaacgcctgctccgtgtacaccaccaagtctccgcgggagcgggccatcctggggctccccaacagtgtggaggagatgtgtcccgacatcccggtgctggagcggctcatggcagacattggggggctggccgagtcaggtgcccgctacacagagatgccgcatgtcatcgagatcacgctgcccatgctatgcagctacctgccccgatggtgggagcgcgggcccgaggcacccccttccgccctgcccgccggcgcccccccaccctgcacagctgtcacctctgaccacctcaactccctgctggggaatatcctgagaatcatcgtcaacaacctgggcattgacgaggcctcctggatgaagcggctggctgtgttcgcacagcccattgtgagccgtgcacggccggagctcctgcagtcccacttcatcccaactatcgggcggctgcgcaagagggcagggaaggtggtgtccgaggaggagcagctgcgcctggaggccaaggcggaggcccaggagggcgagctgctggtgcgggacgagttctctgtgctctgccgggacctctacgccctgtatccgctgctcatccgctacgtggacaacaacagggcgcagtggctgacggagccgaatcccagcgcggaggagctgttcaggatggtgggcgagatcttcatctactggtccaagtcccacaacttcaagcgcgaggagcagaactttgtggtccagaatgagatcaacaacatgtccttcctgactgctgacaacaaaagcaaaatggctaaggtcggggcttggttctgggaggagcacttggcagagagggcgggagcaccctctaggacttcctacctggcctgtcctcacccagccagcccgtcctgggcgcaatccctgcagtcctcagagcagcccctcttacctcctctccctctcccttcctccccagctccttcctcctcctgtatcttctccctcctcccatctccctcctcctctccatctccctcttctctcatctctgtctccttcctcctcctgtatcttctccctcctcccatttcc

SEQ ID NO: 65379 - DNA, 6562 bp, Homo sapiens
  misc_feature (6016)..(6016): n is a, c, g, or t
tctacctcgcgggtgcctctggtgtctccagaggtctccgaccccagcccgcccccagccctcccgcccagcccgcagccccctccctctgttccccgacctcagaccctgggcttccgacctcgacatcatgggtgacgcagaaggcgaagacgaggtccagttcctgcggacggacgatgaggtggtcctgcagtgcagcgctaccgtgctcaaggagcagctcaagctctgcctggccgccgagggcttcggcaaccgcctgtgcttcctggagcccactagcaacgcgcagaatgtgccccccgatctggccatctgttgcttcgtcctggagcagtccctgtctgtgcgagccctgcaggagatgctggctaacacggtggaggctggcgtggagtcatcccagggcgggggacacaggacgctcctgtatggccatgccatcctgctccggcatgcacacagccgcatgtatctgagctgcctcaccacctcccgctccatgactgacaagctggccttcgatgtgggactgcaggaggacgcaacaggagaggcttgctggtggaccatgcacccagcctccaagcagaggtctgaaggagaaaaggtccgcgttggggatgacatcatccttgtcagtgtctcctccgagcgctacctgcacctgtcgaccgccagtggggagctccaggttgacgcttccttcatgcagacactgtggaacatgaaccccatctgctcccgctgcgaagagggcttcgtgacgggaggtcacgtcctccgcctctttcatggacatatggatgagtgtctgaccatttcccctgctgacagtgatgaccagcgcagacttgtctactatgaggggggagctgtgtgcactcatgcccgctccctctggaggctggagccactgagaatcagctggagtgggagccacctgcgctggggccagccactccgagtccggcatgtcactaccgggcagtacctagcgctcaccgaggaccagggcctggtggtggttgacgccagcaaggctcacaccaaggctacctccttctgcttccgcatctccaaggagaagctggatgtggcccccaagcgggatgtggagggcatgggcccccctgagatcaagtacggggagtcactgtgcttcgtgcagcatgtggcctcaggactgtggctcacctatgccgctccagaccccaaggccctgcggctcggcgtgctcaagaagaaggccatgctgcaccaggagggccacatggacgacgcactgtcgctgacccgctgccagcaggaggagtcccaggccgcccgcatgatccacagcaccaatggcctatacaaccagttcatcaagagcctggacagcttcagcgggaagccacggggctcggggccacccgctggcacggcgctgcccatcgagggcgttatcctgagcctgcaggacctcatcatctacttcgagcctccctccgaggacttgcagcacgaggagaagcagagcaagctgcgaagcctgcgcaaccgccagagcctcttccaggaggaggggatgctctccatggtcctgaattgcatagaccgcctaaatgtctacaccactgctgcccactttgctgagtttgcaggggaggaggcagccgagtcctggaaagagattgtgaatcttctctatgaactcctagcttctctaatccgtggcaatcgtagcaactgtgccctcttctccacaaacttggactggctggtcagcaagctggatcggctggaggcctcgtctggcatcctggaggtcctgtactgtgtcctcattgagagtccagaggttctgaacatcatccaggagaatcacatcaagtccatcatctccctcctggacaagcatgggaggaaccacaaggtcctggacgtgctatgctccctgtgtgtgtgtaatggtgtggctgtacgctccaaccaagatcttattactgagaacttgctgcctggccgtgagcttctgctgcagacaaacctcatcaactatgtcaccagcatccgccccaacatctttgtgggccgagcggaaggcaccacgcagtacagcaaatggtactttgaggtgatggtggacgaggtgactccatttctgacagctcaggccacccacttgcgggtgggctgggccctcaccgagggctacaccccctaccctggggccggcgagggctggggcggcaacggggtcggcgatgacctctattcctacggctttgatggactgcatctctggacaggacacgtggcacgcccagtgacttccccagggcagcacctcctggcccctgaagacgtgatcagctgctgcctggacctcagcgtgccgtccatctccttccgcatcaacggctgccctgtgcagggtgtctttgagtccttcaacctggacgggctcttcttccctgttgtcagcttctcggctggtgtcaaggtgcggttcctccttggtggccgccatggtgaattcaagttcctgcccccacctggctatgctccatgccatgaggctgtgctccctcgagagcgactccatcttgaacccatcaaggagtatcgacgggaggggccccgggggcctcacctggtgggccccagtcgctgcctctcacacaccgacttcgtgccctgccctgtggacactgtccagattgtcctgccgccccatctggagcgcattcgggagaagctggcggagaacatccacgagctctgggcgctaacccgcatcgagcagggctggacctacggcccggttcgggatgacaacaagaggctgcacccgtgtcttgtggacttccacagccttccagagcctgagaggaactacaacctgcagatgtctggggagacgctcaagactctgctggctctgggctgccacgtgggcatggcggatgagaaggcggaggacaacctgaagaagacaaaactccccaagacgtatatgatgagcaatgggtacaagccggctccgctggacctgagccacgtgcggctgacgccggcgcagacaacactggtggaccgtctggcagaaaatgggcacaacgtgtgggcccgagaccgcgtgggccagggctggagctacagcgcagtgcaggacatcccagcgcgccgaaaccctcggctggtgccctaccgcctgctggatgaagccaccaagcgcagcaaccgggacagcctctgccaggccgtgcgcaccctcctgggctacggctacaacatcgagcctcctgaccaggagcccagtcaggtggagaaccagtctcgttgtgaccgggtgcgcatcttccgggcagagaaatcctatacagtgcagagcggccgctggtacttcgagtttgaagcagtcaccacaggcgagatgcgcgtgggctgggcgaggcccgagctgaggcctgatgtagagctgggagctgacgagctggcctatgtcttcaatgggcaccgcggccagcgctggcacttgggcagtgaaccatttgggcgcccctggcagccgggcgatgtcgttggctgtatgatcgacctcacagagaacaccattatcttcaccctcaatggcgaggtcctcatgtctgactcaggctccgaaacagccttccgggagattgagattggggacggcttcctgcccgtctgcagcttgggacctggccaggtgggtcatctgaacctgggccaggacgtgagctctctgaggttctttgccatctgtggcctccaggaaggcttcgagccatttgccatcaacatgcagcgcccagtcaccacctggttcagcaaaggcctgccccagtttgagccagtgccccttgaacaccctcactatgaggtatcccgagtggacggcactgtggacacgcccccctgcctgcgcctgacccaccgcacctggggctcccagaacagcctggtggagatgcttttcctgcggctgagcctcccagtccagttccaccagcacttccgctgcactgcaggggccaccccgctggcacctcctggcctgcagccccccgccgaggacgaggcccgggcggcggaacccgaccctgactacgaaaacctgcgccgctcagctgggggctggagcgaggcagagaacggcaaagaagggactgcgaaggagggcgcccccgggggcaccccgcaggcggggggagaggcgcagcccgccagggcggagaatgagaaggatgccaccaccgagaagaacaagaagagaggcttcttattcaaggccaagaaggtcgccatgatgacccagccaccggccacccccacgctgccccgactccctcacgacgtggtgcctgcagacaaccgcgatgaccccgagatcatcctcaacaccaccacgtactattactccgtgagggtctttgctggacaggagcccagctgcgtgtgggcgggctgggtcacccctgactaccatcagcacgacatgagcttcgacctcagcaaggtccgggtcgtgacggtgaccatgggggatgaacaaggcaacgtccacagcagcctcaagtgtagcaactgctacatggtgtggggcggagactttgtgagtcccgggcagcagggccggatcagccacacggaccttgtcattgggtgcctggtggacttggccactggcttaatgacctttacagccaatggcaaagagagcaacacctttttccaggtggaacccaacactaagctatttcctgccgtcttcgtcctgcccacccaccagaacgtcatccagtttgagctggggaagcagaagaacatcatgccgttgtcagccgccatgttccaaagcgagcgcaagaacccggccccgcagtgcccaccgcggctggagatgcagatgctgatgccagtgtcctggagccgcatgcccaaccacttcctgcaggtggagacgaggcgtgccggcgagcggctgggctgggccgtgcagtgccaggagccgctgaccatgatggcgctgcacatccccgaggagaaccggtgcatggacatcctggagctgtcggagcgcctggacctgcagcgcttccactcgcacaccctgcgcctctaccgcgctgtgtgcgccctgggcaacaatcgcgtggcgcacgctctgtgcagccacgtagaccaagctcagctgctgcacgccctggaggacgcgcacctgccaggcccactgcgcgcaggctactatgacctcctcatcagcatccacctcgaaagtgcctgccgcagccgccgctccatgctctctgaatacatcgtgcccctcacgcctgagacccgcgccatcacgctcttccctcctggaaggagcacagaaaatggtcacccccggcatggcctgccgggagttggagtcaccacttcgctgaggcccccgcatcatttctcgcccccctgtttcgtggccgctctgccagctgctggggcagcagaggccccggcccgcctcagccctgccatcccgctggaggccctgcgggacaaggcactgaggatgctgggggaggcggtgcgcgacggtgggcagcacgctcgcgaccccgtcggggcctccgtggagttccagtttgtgcctgtgctcaagctcgtgtccaccctgctggtgatgggcatctttggcgatgaggatgtgaaacagatcttgaagatgattgagcctgaggtcttcactgaggaagaagaggaggaggacgaggaggaagagggtgaagaggaagatgaggaggagaaggaggagagtctttgatgttcccattcgcagacgccgctgctcacgccttttttagcaagccttctgctgatggaagcactaggatgattctaggctgttaaatagatttctcaataatgtaaataactaaatgttctctgcatatagcaggaaaactagcatgaaatattgtttcaggccctgggttctatgtgacactacattaggaantggactgttgggtttgctttgtgtttttgaggtagaggaagaaatgggaatcttttttttctcttccaggagtcagtggaagaatagttctctagctaaggaacggacataccttgtgttttaaaatattttatacttacaaaaatctagaaatggagaggggaactgttttgaataaggatttaaaatacctggacaggattgagagaactatgtgactcattctgtggaaaagactctgcggtgtgaggtatttgaactgctcccattgtagtggctatccatgtagggaatccctaaaattttggtcgccccggggaacttgttgggctaaacaactgaacggcgtgtgtggtgcctgaacagcggcgtcgtgataaagactatggcgaagcgacgctattctaccagcgtataattcgtgctcgagaacgggataagtccacggcatattgctctcgtggttttggtgcatactgctatctgctgtgttttaagtacttatatatttgtatttgaggatagaaaacaggaagaacacagagc

SEQ ID NO: 65380 - DNA, 1671 bp, Homo sapiens
tctacctcgcgggtgcctctggtgtctccagaggtctccgaccccagcccgcccccagccctcccgcccagcccgcagccccctccctctgttccccgacctcagaccctgggcttccgacctcgacatcatgggtgacgcagaaggcgaagacgaggtccagttcctgcggacggacgatgaggtggtcctgcagtgcagcgctaccgtgctcaaggagcagctcaagctctgcctggccgccgagggcttcggcaaccgcctgtgcttcctggagcccactagcaacgcgcagaatgtgccccccgatctggccatctgttgcttcgtcctggagcagtccctgtctgtgcgagccctgcaggagatgctggctaacacggtggaggctggcgtggagtcatcccagggcgggggacacaggacgctcctgtatggccatgccatcctgctccggcatgcacacagccgcatgtatctgagctgcctcaccacctcccgctccatgactgacaagctggccttcgatgtgggactgcaggaggacgcaacaggagaggcttgctggtggaccatgcacccagcctccaagcagaggtctgaaggagaaaaggtccgcgttggggatgacatcatccttgtcagtgtctcctccgagcgctacctgcacctgtcgaccgccagtggggagctccaggttgacgcttccttcatgcagacactgtggaacatgaaccccatctgctcccgctgcgaagagggcttcgtgacgggaggtcacgtcctccgcctctttcatggacatatggatgagtgtctgaccatttcccctgctgacagtgatgaccagcgcagacttgtctactatgaggggggagctgtgtgcactcatgcccgctccctctggaggctggagccactgagaatcagctggagtgggagccacctgcgctggggccagccactccgagtccggcatgtcactaccgggcagtacctagcgctcaccgaggaccagggcctggtggtggttgacgccagcaaggctcacaccaaggctacctccttctgcttccgcatctccaaggagaagctggatgtggcccccaagcgggatgtggagggcatgggcccccctgagatcaagtacggggagtcactgtgcttcgtgcagcatgtggcctcaggactgtggctcacctatgccgctccagaccccaaggccctgcggctcggcgtgctcaagaagaaggccatgctgcaccaggagggccacatggacgacgcactgtcgctgacccgctgccagcaggaggagtcccaggccgcccgcatgatccacagcaccaatggcctatacaaccagttcatcaagagcctggacagctaccctccaaaccaccacagtgtctgtcacacccccactaccgctgccacgccctctgaatcatgcagggaagggtctgcccctgccctggcacacacaggcacccattccctccccctgctgacatgtgtatgcgtatgcatacacaccacacacacacacatgcacaagtatgtgcgaacagccctccaaagcctatgccacagacagctcttgccccagccagaactcagccatatcacgctcgccgtctgtccagtcattctaccataaggtcgcaggtt

SEQ ID NO: 65381 - DNA, 276 bp, Homo sapiens
gaagcaagagaagtttcaaggaagtcctgatggtctcacctccatctctcctcccacacggctgtccttccacagatgtgccacctgctggagtatttctgtgaccaagagctgcagcaccgtgtggagtccctggcagcctttgcggagcgctatgtggacaagctccaggccaaccagcggagccgctatggcctcctcataaaagccttcagcatgaccgcagcagagactgcaagacgtacccgcgagttccgctccccaccccaggaacag

SEQ ID NO: 65382 - DNA, 2345 bp, Homo sapiens
  misc_feature (48)..(48): n is a, c, g, or t
  misc_feature (457)..(457): n is a, c, g, or t
  misc_feature (680)..(680): n is a, c, g, or t
  misc_feature (728)..(728): n is a, c, g, or t
  misc_feature (1082)..(1082): n is a, c, g, or t
  misc_feature (1267)..(1267): n is a, c, g, or t
  misc_feature (1784)..(1784): n is a, c, g, or t
  misc_feature (1795)..(1795): n is a, c, g, or t
  misc_feature (2210)..(2210): n is a, c, g, or t
tacttcaatttttaaaagcattaaaatatgttagcttgtatagatacnactagaaaataaaaagttagatgaactttttctcttgggtgaatttttagacagtgtaagatagatgacagaccacactgacaagtagttcaagaatctgatttttgtggagaattttttttaactattatatttgaggtgttcagtgaaaagttattttcctttccataccttccccccatctcttagtttccttctgcagaggcaaccagtgttacctgcaagtttcttctgcatccttccagagatacgccaggcatacgcatgtgcatgtgcaaatataatccctcctttttgcttattaaaagttattttgcacaagggacccatgagtctaatggcaatgggacactttaagcctcactatccagatcagcctctgctcttcattgttgtggggttttttttnaattgttattaaaagtacattttggagagcaaactaagtcagatttggggggatttttatcactcaacattttgttgtgaaatgccctacatatagggaagttgaaacaatattataccaaccatcctctaccagatggaaaaattgcaaacgttttgccatttttgcttcttctttctctttctctgccattatgacatttcacctgtacaaaattcagcangcatctcctaagaataaggatatttttctacataaccacaatagtaanaatcttaaacatacttccagaatatccaatctatattcaaatttccacagttgtcccccaaaacatgtcttttacagattttacttccagaccaagttcaaatccacatttatggcctacatttggtgtcttagtttcttttcatctaatcagtcaccacacatttgttgttatgtttatttagaaataagttgttagactctgtgtatatgttttgtgttagtagaaaatgataatagttgtagtaggatgcatcggagtaaaaaggaaaaggctgatcagggccagaggtcaatgactgacctgggggttctgggaacctcaggcccaaagtagttataatgggacttaggngatcattatctcagctcacctgtaacctatactttggcatattgattgaaaggctctgggttattaaaaaaaaaggtgacagagttaaaaataacagtaacagtgacaagcaagatagaaatatatttctctttcatgcagcacagctctgctccacaaagccttcaaggctgattgataggtgntctgtggtataagagactaagtctctagggtattatcattatccaggtggtccgggatgactcaccacccccagattttagtcagtcggaagtggggagatggtataccctgcaagttgctcagtacctccatgcatgtctgactggccagaacttaatctaagcttcaagggaggttgggaagtgtagtcttcattctggggagccatataccagctaaaagtcccagtatcttagaaggggaccagtatggggaccatgaatactttctgtgacagacttaatactttattaataccacttataaccagataatactttactatttataaaacatttgctttgcaagccaggtctacactgccttcataaaaagtatttctaatactataaaactttgttcataaatcattttgcttttgaattaactaagcaaaccaaactaagaaaccaaatttgattcttttgacaacattaatcatgaatgttcagtaactttacaaccctccacttgganaggggaattantagaaacaaattattattgtaactctacagcattttagactttgccttacaaaatactttcagggatgtttaaaagtgtatagctgccagtttatttaaaaacgactagaataataggtccaacttcacaagggtcattgtacgaggaccaaattagataaaccatgcttagtatatcagaagacacatagtaagcacatgataaatattagttagcatgatgattagttcaatttttttttttttaatctcatttacgggccaggcatgatggctcatgccggtaatcccagcactttgggaggccaaggtgggtggatcacttgaggtcaagagttcgagactaacctggctaacatggtgaaatcctgctctactaaaaacacgaatattagtcgagtgtgggggcatgaanctgtattcccagctactcaggggactgaggcacgagaatcacttgaacccaggaggaagaggtttcagtgagcctagtttgcaccactgcactccagcctgggcaacagagtgagatactgtttcaaaaaaaaaa

SEQ ID NO: 65383 - DNA, 459 bp, Homo sapiens
ttctaggaagtcagcatggatcaaccttatgttccctgctgccagaccctattctcctacctcaaaatgacaacagattttgaaagagtaacaaaatatgaaagaagttatcagcacaatgtaagcttcccatttttgtggctttgtcctgagggaaggccatgaatatagtataattcggggttgctaaaacttcactgaaaagcacattgcctttctggcctgggaaagacccaggtggcagcagccactgggaattgaaggtgaatctgggagaggagagcgttggagaggaatcaaacttaactcataaagccaataaagcccttgggaaactggcctcctattccatgtacacagtccctgtacagggtttctgatctgtgcaggcgctgccgctaagctcctgaaacagagagtgccgctgggaagaaatcgacctctcccactccagtgctg

SEQ ID NO: 65384 - DNA, 456 bp, Homo sapiens
cagcatatgtccacccattaccaaaatttgactatcatttaaggttaaaacttacaaatttgtctgcacatcaaatttcacaaatttgaaaattgccttaaccattttgattaataagtttcatctgccataattaaagtctgaagtgttcatcaagataagtaaatttgcatatggataatacccaataacttgttttttcagaatttttcaccatatgtatactgagaaatacaaatattttaatctgcgttgccgtatgatatgattgcacttagaacacccaatttacttaaatcttggtttacttttgacttgataccataatctttaaaatcatttgtcatctttttttttttttttttgagacggagtctcgctctgtcgcccaggctggatgcactccagcctgggcaaaagagcgaaactccatctcaaataaacaaacaaataaat

SEQ ID NO: 65385 - DNA, 786 bp, Homo sapiens
aagtcttctcccactgatgaggtaaacctcgagaccaatccagaaataaattgccaagcttctatcaaataattcaaaaggagacccaggactcttgatgatacacttgaagtcactaaatatgaaagatgatagcatcttggaaggcaagagcagaggaaaggagaattttcacagggaagaagaaagagttggtgaaagtgaaattgctttaacaaaataatgatctctatacctccttctcgaactgtggtttgaaggacagtatcatcagcattacttggagcttgtgagaaatttagaatttcaaggccccctcgaccccaacttactggtgcaaactctgtattgtaacccgatccccaaggtgattctagtgtacattaaagtgtgagagtcttgttatgaatggattcttatagtgctgcaatttagaacatcttttaagaattataaagacaattttgtgtctcttgtatctgaaataagtattaaaggcaaaatatatattgatatcatggcactgttcttaaggaattaacatccagatgaattattttgcatcttttcattggaaataaaaagcccggggctgggtggcgggcgaaagaatcagagagctctgatcagtgtgtagatgtatcaatatctatttaatatgtactccagcagagagtccaggctttaaatcattggaagcaatctctcaatttttattctcaacatgtttcacctttaggcaatattacaataaaattctctgtgggtttgtaaacttagtgccac

SEQ ID NO: 65386 - DNA, 1759 bp, Homo sapiens
  misc_feature (2)..(3): n is a, c, g, or t
  misc_feature (171)..(171): n is a, c, g, or t
  misc_feature (190)..(190): n is a, c, g, or t
  misc_feature (488)..(488): n is a, c, g, or t
  misc_feature (590)..(590): n is a, c, g, or t
  misc_feature (781)..(781): n is a, c, g, or t
  misc_feature (921)..(921): n is a, c, g, or t
gnntcctaagtataatttttgaaatagcttgataatttcctcaaatgagaaattgatcctagtaagagattgattataactcaactcttacaaaagaaggattaatggaatctatagagaatcacagaaagctaaaactagtcattaaaagcttgcccaaatcaatttcanaattggtacataattatantaataaaaataattttaaaatggcatttattttgaacaatgtataaccattcattctcataatggtgaaaaacggccttaataaaggattaaaagctggagagagacggagggattctcagagcaccagcccaagtgaagattgctgcttactgcaatggaaaagggagacagttagcattgggttaatatttaccatgttttactctctgggataggcattttatttacaatatctcttatgggaatgttttatttatttcattttctctagactgagatccttgcagagaaactgncatgcacaaaaaaatgtcctttgagttaaattggtcactttataagagatccagatttctccccaagtagagaaatttgcgcagaatgtggaagacaaactncccattggaaacacatgcaaaatcactcagtagggatactctcctaccctgggcaagtgaggtcttcttgcagtaaatagtttccactgaggatggacttagaatgaagctaccttgaggggacacgtaggctactagtattcaggaacaacctgccagagacaatgcaggaagtgtgtgtgaaatgaccnaaaagataagagggtagagaaaccctaatggaaggacagatagtgtgaataaaggtagattctgaaaagaatgagctagcacattgtgtaaagatgaggagagaattagggctctggaggagagatctgaggaaaccacncagaatatagcacagagagatacaaagaagaagaatttggatgagtcatgaaaagcttggaggacaggctgagaaggtcccgcagtgtctaactgaattctagaaggaaaggctagggagactggaatagaggccatatgtggaggaatgtgggtgagaacttgctaaactgaggaaaaacactcttccccaggtggaagaggcacactgagttcagagtagtgatggtaaataacaaccacatccaccactagacactctttggtgaactatagggtattaaagacaaagagaaaaattctaaaagcagactgggacaacaaatctgtatttgtagcaggaaaaagcatgaggttcaggttttgactgtactgcttgctgcctgtgtcatcttaagtaggtcacctacctgcttcgagcctcagaggacatctgtcattggctaatgggagtagaagtggctaataacaagaacaatgactaccacacgaggttttgtgagccctgaaatatttccagagaataaatgtaaaagcattttaagtcattaaacaaatgggccgggcatggtggctcacacctgtaatcccagcactttgggaggccaaggcgggtggatcacctgaggtcgggagttcgagaccagtctgaccaacatggagaaaccctgtctctactaaaaatgcaaaattagccgggcatggtggctcatgcctgtaatcccagccactcaggaggctgaggcaggagaatcacctgaatgggaggcagaggttgcagtgagccgagatcgcgccattgcactccaacctgggcaacaaaagcgaaacttcatctc

SEQ ID NO: 65387 - DNA, 408 bp, Homo sapiens
ctctctttctctctctttttcccagagtaaacttcataggaaataagttttcaccatagtgttcacatcccttctcagggtggaagtcacccaccattttaaaaacgagagcaagaagggctggacttggtggctcatgcctgtaattccagcagtttgggaggctgaggcagatggaacacttgagcccaggagttcaagaccagcctgggcaacatagtgagactccccatctctacagaaatttaaaaatgagctgggcatggtggtgtacacctttggtcccagctactcaagaggctgaggcaggaggatcacttgatccctgaagatcaaggctgctgcagtgagctgtgatcgcactactgcactccagcctgggccacagagtgaaccctgtctctaaaa

SEQ ID NO: 65388 - DNA, 3404 bp, Homo sapiens
ggccctgggacctttgcctattttctgattgataggctttgttttgtctttacctccttctttctggggaaaacttcagttttatcgcacgttccccttttccatatcttcatcttccctctacccagattgtgaagatggaaagggtccaacccctggaagagaatgtgggaaatgcagccaggccaagattcgagaggaacaagctattgctggtggcctctgtaattcagggactggggctgctcctgtgcttcacctacatctgcctgcacttctctgctcttcaggtatcacatcggtatcctcgaattcaaagtatcaaagtacaatttaccgaatataagaaggagaaaggtttcatcctcacttcccaaaaggaggatgaaatcatgaaggtgcagaacaactcagtcatcatcaactgtgatgggttttatctcatctccctgaagggctacttctcccaggaagtcaacattagccttcattaccagaaggatgaggagcccctcttccaactgaagaaggtcaggtctgtcaactccttgatggtggcctctctgacttacaaagacaaagtctacttgaatgtgaccactgacaatacctccctggatgacttccatgtgaatggcggagaactgattcttatccatcaaaatcctggtgaattctgtgtcctttgaggggctgatggcaatatctaaaaccaggcaccagcatgaacaccaagctgggggtggacagggcatggattcttcattgcaagtgaaggagcctcccagctcagccacgtgggatgtgacaagaagcagatcctggccctcccgcccccacccctcagggatatttaaaacttattttatataccagttaatcttatttatccttatattttctaaattgcctagccgtcacaccccaagattgccttgagcctactaggcacctttgtgagaaagaaaaaatagatgcctcttcttcaagatgcattgtttctattggtcaggcaattgtcataataaacttatgtcattgaaaacggtacctgactaccatttgctggaaatttgacatgtgtgtggcattatcaaaatgaagaggagcaaggagtgaaggagtggggttatgaatctgccaaaggtggtatgaaccaacccctggaagccaaagcggcctctccaaggttaaattgattgcagtttgcatattgcctaaatttaaactttctcatttggtgggggttcaaaagaagaatcagcttgtgaaaaatcaggacttgaagagagccgtctaagaaataccacgtgctttttttctttaccattttgctttcccagcctccaaacatagttaatagaaatttcccttcaaagaactgtctggggatgtgatgctttgaaaaatctaatcagtgacttaagagagattttcttgtatacagggagagtgagataacttattgtgaagggttagctttactgtacaggatagcagggaactggacatctcagggtaaaagtcagtacggattttaatagcctggggaggaaaacacattctttgccacagacaggcaaagcaacacatgctcatcctcctgcctatgctgagatacgcactcagctccatgtcttgtacacacagaaacattgctggtttcaagaaatgaggtgatcctattatcaaattcaatctgatgtcaaatagcactaagaagttattgtgccttatgaaaaataatgatctctgtctagaaataccatagaccatatatagtctcacattgataattgaaactagaagggtctatatcagcctatgccagggcttcaatggaatagtatccccttatgtttagttgaaatgtccccttaacttgatataatgtgttatgcttatggcgctgtgacaatctgatttttcatgtcaacttccagatgatttgtaacttctctgtgccaaaccttttataaacataaatttttgagatatgtattttaaaattgtagcacatgtttccctgacattttcaatagaggatacaacatcacagaatctttctggatgattctgtgttatcaaggaattgtactgtgctacaattatctctagaatctccagaaaggtggagggctgttcgcccttacactaaatggtctcagttggatttttttttcctgttttctatttcctcttaagtacaccttcaactatattcccatccctctattttaatctgttatgaaggaaggtaaataaaaatgctaaatagaagaaattgtaggtaaggtaagaggaatcaagttctgagtggctgccaaggcactcacagaatcataatcatggctaaatatttatggagggcctactgtggaccaggcactgggctaaatacttacatttacaagaatcattctgagacagatattcaatgatatctggcttcactactcagaagattgtgtgtgtgtttgtgtgtgtgtgtgtgtgtgtatttcactttttgttattgaccatgttctgcaaaattgcagttactcagtgagtgatatccgaaaaagtaaacgtttatgactataggtaatatttaagaaaatgcatggttcatttttaagtttggaatttttatctatatttctcacagatgtgcagtgcacatgcaggcctaagtatatgttgtgtgtgttgtttgtctttgacgtcatggtcccctctcttaggtgctcactcgctttgggtgcacctggcctgctcttcccatgttggcctctgcaaccacacagggatatttctgctatgcaccagcctcactccaccttccttccatcaaaaatatgtgtgtgtgtctcagtccctgtaagtcatgtccttcacagggagaattaacccttcgatatacatggcagagttttgtgggaaaagaattgaatgaaaagtcaggagatcagaattttaaatttgacttagccactaactagccatgtaaccttgggaaagtcatttcccatttctgggtcttgcttttctttctgttaaatgagaggaatgttaaatatctaacagtttagaatcttatgcttacagtgttatctgtgaatgcacatattaaatgtctatgttcttgttgctatgagtcaaggagtgtaaccttctcctttactatgttgaatgtatttttttctggacaagcttacatcttcctcagccatctttgtgagtccttcaagagcagttatcaattgttagttagatattttctatttagagaatgcttaagggattccaatcccgatccaaatcataatttgttcttaagtatactgggcaggtcccctattttaagtcataattttgtatttagtgctttcctggctctcagagagtattaatattgatat

SEQ ID NO: 65389 - DNA, 3339 bp, Homo sapiens
agtcgtgctctgtcacccaggctggagtacagtggcgtgatgtgtgcttactgcagcctacacctcccagttcaagtgattctcctgcctcagccttccaagtagctgggattacagattgtgaagatggaaagggtccaacccctggaagagaatgtgggaaatgcagccaggccaagattcgagaggaacaagctattgctggtggcctctgtaattcagggactggggctgctcctgtgcttcacctacatctgcctgcacttctctgctcttcaggtatcacatcggtatcctcgaattcaaagtatcaaagtacaatttaccgaatataagaaggagaaaggtttcatcctcacttcccaaaaggaggatgaaatcatgaaggtgcagaacaactcagtcatcatcaactgtgatgggttttatctcatctccctgaagggctacttctcccaggaagtcaacattagccttcattaccagaaggatgaggagcccctcttccaactgaagaaggtcaggtctgtcaactccttgatggtggcctctctgacttacaaagacaaagtctacttgaatgtgaccactgacaatacctccctggatgacttccatgtgaatggcggagaactgattcttatccatcaaaatcctggtgaattctgtgtcctttgaggggctgatggcaatatcttcattgcaagtgaaggagcctcccagctcagccacgtgggatgtgacaagaagcagatcctggccctcccgcccccacccctcagggatatttaaaacttattttatataccagttaatcttatttatccttatattttctaaattgcctagccgtcacaccccaagattgccttgagcctactaggcacctttgtgagaaagaaaaaatagatgcctcttcttcaagatgcattgtttctattggtcaggcaattgtcataataaacttatgtcattgaaaacggtacctgactaccatttgctggaaatttgacatgtgtgtggcattatcaaaatgaagaggagcaaggagtgaaggagtggggttatgaatctgccaaaggtggtatgaaccaacccctggaagccaaagcggcctctccaaggttaaattgattgcagtttgcatattgcctaaatttaaactttctcatttggtgggggttcaaaagaagaatcagcttgtgaaaaatcaggacttgaagagagccgtctaagaaataccacgtgctttttttctttaccattttgctttcccagcctccaaacatagttaatagaaatttcccttcaaagaactgtctggggatgtgatgctttgaaaaatctaatcagtgacttaagagagattttcttgtatacagggagagtgagataacttattgtgaagggttagctttactgtacaggatagcagggaactggacatctcagggtaaaagtcagtacggattttaatagcctggggaggaaaacacattctttgccacagacaggcaaagcaacacatgctcatcctcctgcctatgctgagatacgcactcagctccatgtcttgtacacacagaaacattgctggtttcaagaaatgaggtgatcctattatcaaattcaatctgatgtcaaatagcactaagaagttattgtgccttatgaaaaataatgatctctgtctagaaataccatagaccatatatagtctcacattgataattgaaactagaagggtctatatcagcctatgccagggcttcaatggaatagtatccccttatgtttagttgaaatgtccccttaacttgatataatgtgttatgcttatggcgctgtgacaatctgatttttcatgtcaacttccagatgatttgtaacttctctgtgccaaaccttttataaacataaatttttgagatatgtattttaaaattgtagcacatgtttccctgacattttcaatagaggatacaacatcacagaatctttctggatgattctgtgttatcaaggaattgtactgtgctacaattatctctagaatctccagaaaggtggagggctgttcgcccttacactaaatggtctcagttggatttttttttcctgttttctatttcctcttaagtacaccttcaactatattcccatccctctattttaatctgttatgaaggaaggtaaataaaaatgctaaatagaagaaattgtaggtaaggtaagaggaatcaagttctgagtggctgccaaggcactcacagaatcataatcatggctaaatatttatggagggcctactgtggaccaggcactgggctaaatacttacatttacaagaatcattctgagacagatattcaatgatatctggcttcactactcagaagattgtgtgtgtgtttgtgtgtgtgtgtgtgtgtgtatttcactttttgttattgaccatgttctgcaaaattgcagttactcagtgagtgatatccgaaaaagtaaacgtttatgactataggtaatatttaagaaaatgcatggttcatttttaagtttggaatttttatctatatttctcacagatgtgcagtgcacatgcaggcctaagtatatgttgtgtgtgttgtttgtctttgacgtcatggtcccctctcttaggtgctcactcgctttgggtgcacctggcctgctcttcccatgttggcctctgcaaccacacagggatatttctgctatgcaccagcctcactccaccttccttccatcaaaaatatgtgtgtgtgtctcagtccctgtaagtcatgtccttcacagggagaattaacccttcgatatacatggcagagttttgtgggaaaagaattgaatgaaaagtcaggagatcagaattttaaatttgacttagccactaactagccatgtaaccttgggaaagtcatttcccatttctgggtcttgcttttctttctgttaaatgagaggaatgttaaatatctaacagtttagaatcttatgcttacagtgttatctgtgaatgcacatattaaatgtctatgttcttgttgctatgagtcaaggagtgtaaccttctcctttactatgttgaatgtatttttttctggacaagcttacatcttcctcagccatctttgtgagtccttcaagagcagttatcaattgttagttagatattttctatttagagaatgcttaagggattccaatcccgatccaaatcataatttgttcttaagtatactgggcaggtcccctattttaagtcataattttgtatttagtgctttcctggctctcagagagtattaatattgatat

SEQ ID NO: 65390 - DNA, 908 bp, Homo sapiens
  misc_feature (96)..(96): n is a, c, g, or t
  misc_feature (157)..(157): n is a, c, g, or t
  misc_feature (164)..(164): n is a, c, g, or t
  misc_feature (232)..(232): n is a, c, g, or t
  misc_feature (245)..(245): n is a, c, g, or t
  misc_feature (277)..(277): n is a, c, g, or t
  misc_feature (307)..(307): n is a, c, g, or t
  misc_feature (371)..(371): n is a, c, g, or t
  misc_feature (376)..(376): n is a, c, g, or t
cagttattaaacattaccagcacaacattggcttcttattcctcagtttaccaggctgttactcaaaattcactctccagccctgctttggagcanttgggaacttcagcattttgatccacctttttggagccacctcatgtgaaaaatggatganaccttcntcagcaaacctgtctacgtaggagctggtatgaggatcacacaatgcaagcaaataaaatgagaaaanatgattcaacaanaggcttcactgatttactgtttaactgctttnaccaaagtgcttggttcttatatgaataanaaaggggatgagttatccaccagaatgaaagttatattctggtttgaagcttctgctgtcaganaatanagttttctatagtgtggaagaacagcatcatcttcaagcaaggtggaattaagcatgtgacatgaactgtgtttctcacccaggaggaggagtcgtgctctgtcacccaggctggagtacagtggcgtgatgtctgcttactgcagcctacacctcccagttcaagtgattctcctgcctcagccttccaagtagctgggattacaggtatttgctaccaaacctggctaattgtttgtggttttagtagagatgagatttcatcatgttggccaggctagtctcgaactcctggactcaagtgattcgcctacttcagcctcccaaagtgctgggattataggtgtgagccactgtgcccggtcccactgagccaattctcttattgccactttggactcctcccagtgaggacaaatagacactgaggacatcatgatatgcagaaagaaacttggagtgcaagacaagagacctgcacctttctttcagctccgttccaagctgcttgatcacagacatctcttctgtt

SEQ ID NO: 65391 - DNA, 3528 bp, Homo sapiens
atcgaccggatgcccaagacatcaaccggaattaggctcttttgagaagaaaacaaagagagtaaccaaatatagaacagctgagtgcattcaccagtctgggagccctgagagtgctttttctaacaaccacagtgttacatatttccttacaccatgggatgataaaacacaggacacatggctccattcaaggctaactgattgcacaacggctctgagcaggagagagcaaaaggtgaaccacagttgtacagcttgctggtggttggggtcacattggactatcaatatccaggagatgttgagaaaaagaggggatcctttccaacaagtcatccagcaactctgggacagaaggaaagctgtgggaagaaaagcagggtgctggtttctaggacactaaacctcatggtatcacatcggtatcctcgaattcaaagtatcaaagtacaatttaccgaatataagaaggagaaaggtttcatcctcacttcccaaaaggaggatgaaatcatgaaggtgcagaacaactcagtcatcatcaactgtgatgggttttatctcatctccctgaagggctacttctcccaggaagtcaacattagccttcattaccagaaggatgaggagcccctcttccaactgaagaaggtcaggtctgtcaactccttgatggtggcctctctgacttacaaagacaaagtctacttgaatgtgaccactgacaatacctccctggatgacttccatgtgaatggcggagaactgattcttatccatcaaaatcctggtgaattctgtgtcctttgaggggctgatggcaatatctaaaaccaggcaccagcatgaacaccaagctgggggtggacagggcatggattcttcattgcaagtgaaggagcctcccagctcagccacgtgggatgtgacaagaagcagatcctggccctcccgcccccacccctcagggatatttaaaacttattttatataccagttaatcttatttatccttatattttctaaattgcctagccgtcacaccccaagattgccttgagcctactaggcacctttgtgagaaagaaaaaatagatgcctcttcttcaagatgcattgtttctattggtcaggcaattgtcataataaacttatgtcattgaaaacggtacctgactaccatttgctggaaatttgacatgtgtgtggcattatcaaaatgaagaggagcaaggagtgaaggagtggggttatgaatctgccaaaggtggtatgaaccaacccctggaagccaaagcggcctctccaaggttaaattgattgcagtttgcatattgcctaaatttaaactttctcatttggtgggggttcaaaagaagaatcagcttgtgaaaaatcaggacttgaagagagccgtctaagaaataccacgtgctttttttctttaccattttgctttcccagcctccaaacatagttaatagaaatttcccttcaaagaactgtctggggatgtgatgctttgaaaaatctaatcagtgacttaagagagattttcttgtatacagggagagtgagataacttattgtgaagggttagctttactgtacaggatagcagggaactggacatctcagggtaaaagtcagtacggattttaatagcctggggaggaaaacacattctttgccacagacaggcaaagcaacacatgctcatcctcctgcctatgctgagatacgcactcagctccatgtcttgtacacacagaaacattgctggtttcaagaaatgaggtgatcctattatcaaattcaatctgatgtcaaatagcactaagaagttattgtgccttatgaaaaataatgatctctgtctagaaataccatagaccatatatagtctcacattgataattgaaactagaagggtctatatcagcctatgccagggcttcaatggaatagtatccccttatgtttagttgaaatgtccccttaacttgatataatgtgttatgcttatggcgctgtgacaatctgatttttcatgtcaacttccagatgatttgtaacttctctgtgccaaaccttttataaacataaatttttgagatatgtattttaaaattgtagcacatgtttccctgacattttcaatagaggatacaacatcacagaatctttctggatgattctgtgttatcaaggaattgtactgtgctacaattatctctagaatctccagaaaggtggagggctgttcgcccttacactaaatggtctcagttggatttttttttcctgttttctatttcctcttaagtacaccttcaactatattcccatccctctattttaatctgttatgaaggaaggtaaataaaaatgctaaatagaagaaattgtaggtaaggtaagaggaatcaagttctgagtggctgccaaggcactcacagaatcataatcatggctaaatatttatggagggcctactgtggaccaggcactgggctaaatacttacatttacaagaatcattctgagacagatattcaatgatatctggcttcactactcagaagattgtgtgtgtgtttgtgtgtgtgtgtgtgtgtgtatttcactttttgttattgaccatgttctgcaaaattgcagttactcagtgagtgatatccgaaaaagtaaacgtttatgactataggtaatatttaagaaaatgcatggttcatttttaagtttggaatttttatctatatttctcacagatgtgcagtgcacatgcaggcctaagtatatgttgtgtgtgttgtttgtctttgacgtcatggtcccctctcttaggtgctcactcgctttgggtgcacctggcctgctcttcccatgttggcctctgcaaccacacagggatatttctgctatgcaccagcctcactccaccttccttccatcaaaaatatgtgtgtgtgtctcagtccctgtaagtcatgtccttcacagggagaattaacccttcgatatacatggcagagttttgtgggaaaagaattgaatgaaaagtcaggagatcagaattttaaatttgacttagccactaactagccatgtaaccttgggaaagtcatttcccatttctgggtcttgcttttctttctgttaaatgagaggaatgttaaatatctaacagtttagaatcttatgcttacagtgttatctgtgaatgcacatattaaatgtctatgttcttgttgctatgagtcaaggagtgtaaccttctcctttactatgttgaatgtatttttttctggacaagcttacatcttcctcagccatctttgtgagtccttcaagagcagttatcaattgttagttagatattttctatttagagaatgcttaagggattccaatcccgatccaaatcataatttgttcttaagtatactgggcaggtcccctattttaagtcataattttgtatttagtgctttcctggctctcagagagtattaatattgatat

SEQ ID NO: 65392 - DNA, 334 bp, Homo sapiens
ggcatggagcaggcaatgacttgttcatagtcgctgcaattatgagcaccagcttgaacttaggaactcttataaatttctgttttcaaccaagtattgagtgtctgctatgtgtcagacactgcgctaggtgctgaaatctcacttctactgaggaagacaggaacataaatggtgatgatcattgcattagaagtgatgccacgggaatagtgtggggcctctccaggggaatctgaaggtagggagaccacacttctccagtggtggagagggcagacagcgtgtatggggtcctgaaggtctgatgcaaaggtcatgtttgagctgttca

SEQ ID NO: 65393 - DNA, 236 bp, Homo sapiens
catttggacgctggagggtggctagcgtggctggaagcggccagccaggggttcacagaactgaaggtgaggcctccagaggccctagtctctacctgagtgtctctgaaactggggggatggggtggagcctttagggggaagggaagagggaactgaagaggaagtgggggagggaggtagaggaggcaagtctggcgccatgctgagtcaccgcccacaaggcccagggcggg

SEQ ID NO: 65394 - DNA, 1520 bp, Homo sapiens
gcgcgttcgggagcttcggccctgcgtaggaggcgggtgcaggtgtgggtgctgagccgcccgccgcctggagggggagacagcttcaggacacgcaggccgcagcgagggcccgggccctggggatcccaggccatggatgctccccactccaaagcagccctggacagcattaacgagctgcccgagaacatcctgctggagctgttcacgcacgtgcccgcccgccagctgctgctgaactgccgcctggtctgcagcctctggcgggacctcatcgacctcatgaccctctggaaacgcaagtgcctgcgagagggcttcatcaccaaggactgggaccagcccgtggccgactggaaaatcttctacttcctacggagcctgcataggaacctcctgcgcaacccgtgtgctgaagaggatatgtttgcatggcaaattgatttcaatggtggggaccgctggaaggtggagagcctccctggagcccacgggacagattttcctgaccccaaagtcaagaagtattttgtcacatcctacgaaatgtgcctcaagtcccagctggtggaccttgtagccgagggctactgggaggagctactagacacattccggccggacatcgtggttaaggactggtttgctgccagagccgactgtggctgcacctaccaactcaaagtgcagctggcctcggctgactacttcgtgttggcctccttcgagcccccacctgtgaccatccaacagtggaacaatgccacatggacagaggtctcctacaccttctcagactacccccggggtgtccgctacatcctcttccagcatgggggcagggacacccagtactgggcaggctggtatgggccccgagtcaccaacagcagcattgtcgtcagccccaagatgaccaggaaccaggcctcctccgaggctcagcctgggcagaagcatggacaggaggaggctgcccaatcgccctaccgagctgttgtccagattttctgacagctgtccatcctgtgtctgggtcagccagaggttcctccaggcaggagctgagcatggggtgggcagtgaggtccctgtaccagcgactcctgccccggttcaaccctaccagcttgtggtaacttactgtcacatagctctgacgttttgttgtaataaatgttttcaggccgggcactgtggctcacgcctgtaatcccagcactttgggagaccgaggcaggtggatcacgaggtcaggagatagagaccatcctggccaacacggtgaaaccctgtctctactaaaaatacaaaaaattagccgggcgtggtggcgggcgcctgtagtcccagctactcgggaggctgatgcagaagaatggcgtgaacccggaaggcagagcttgcagtgagccgagatcacgccactgcactccagcctgggtgacagagcgagactctggctcataaaataataataataataaataaataaaaaataaatgttttcagtaaaa

SEQ ID NO: 65395 - DNA, 1640 bp, Homo sapiens
gcgttcacggagcctgcgggcgctggtccgggcggccaggggtggggggcgcgggcggctgggcccggacttcgactgggggcctggccccggggccacccaggcggaggctctgcggccgcctccaccccggccacatcccgaggccggcgccgggttcggagaactgtcaagggacctccaggcccccacacgcctgcgagatccggcgcttgccttgccccagccacagtttctgtttccgagaaaccggccatggatgctccccactccaaagcagccctggacagcattaacgagctgcccgagaacatcctgctggagctgttcacgcacgtgcccgcccgccagctgctgctgaactgccgcctggtctgcagcctctggcgggacctcatcgacctcatgaccctctggaaacgcaagtgcctgcgagagggcttcatcaccaaggactgggaccagcccgtggccgactggaaaatcttctacttcctacggagcctgcataggaacctcctgcgcaacccgtgtgctgaagaggatatgtttgcatggcaaattgatttcaatggtggggaccgctggaaggtggagagcctccctggagcccacgggacagattttcctgaccccaaagtcaagaagtattttgtcacatcctacgaaatgtgcctcaagtcccagctggtggaccttgtagccgagggctactgggaggagctactagacacattccggccggacatcgtggttaaggactggtttgctgccagagccgactgtggctgcacctaccaactcaaagtgcagctggcctcggctgactacttcgtgttggcctccttcgagcccccacctgtgaccatccaacagtggaacaatgccacatggacagaggtctcctacaccttctcagactacccccggggtgtccgctacatcctcttccagcatgggggcagggacacccagtactgggcaggctggtatgggccccgagtcaccaacagcagcattgtcgtcagccccaagatgaccaggaaccaggcctcctccgaggctcagcctgggcagaagcatggacaggaggaggctgcccaatcgccctaccgagctgttgtccagattttctgacagctgtccatcctgtgtctgggtcagccagaggttcctccaggcaggagctgagcatggggtgggcagtgaggtccctgtaccagcgactcctgccccggttcaaccctaccagcttgtggtaacttactgtcacatagctctgacgttttgttgtaataaatgttttcaggccgggcactgtggctcacgcctgtaatcccagcactttgggagaccgaggcaggtggatcacgaggtcaggagatagagaccatcctggccaacacggtgaaaccctgtctctactaaaaatacaaaaaattagccgggcgtggtggcgggcgcctgtagtcccagctactcgggaggctgatgcagaagaatggcgtgaacccggaaggcagagcttgcagtgagccgagatcacgccactgcactccagcctgggtgacagagcgagactctggctcataaaataataataataataaataaataaaaaataaatgttttcagtaaaa

SEQ ID NO: 65396 - DNA, 1913 bp, Homo sapiens
gttcttttcattccatcactttaggtgatgggtaagatttttgaaagccttatattttttgattttgttgtctagtttaatcctacctttaatagttgtgtttggtaaaattcccacttgaatgtgacactgataataattatgctgatttttagcatctcttataggaatcaaagtttattaaagttacatagaggattgaaaaatgtatatcactcaatttttatctaaggaaggataggttataaagggaggtacctaaatactcaaataatgtatatattctttttcataacatatggaatgctttaagcaatgttttgaaaaaaatctgcgtatctttgacttaattggcacatgactttttcaagcagccattcattcagaggtttgttttctctcagtccttttgctacattcactttcttttcaaagaaatgttaattattacaaaaattgacatagatatctttcccaaacttggggtaaaacccatggttatgtggaacataactgttcttaaaaagtcaattataatttgtaactcacatcctttgagctaaactaaattaaaattacagtatttaataattctttgggcatttttaagaggtctgaatttgtatttttcttcatttttgaaactttacatttgttgactttttttcattctcatttaaaatatattgtgctatgataaccaaccttcttccaaggagtgaccattactgcctacatttgcgttgctttctacatagagacttgtataatagtattaatagtagctcattctctctaaaaatttactggccactgataggatgttttgtttccttgataaaacaaatgtaaatgaggaattttatttgaattggaatattgtttttctagaggacattcatatctgcactattatctgatgacatgttggtaattttaaagactgcaaggcagtttagagaatgaagtaaaccaatagatactcttttgattctccaaagaaatataattttggtttttgttcctcagagagagtttgaaagaaattttcagatgttctgttccctatagagggcctattccaggatctaaatgaatgggaatttataattcctttcatagactcaaacctgaaagcagaaatttttagtagttgagttgctttaagtgaattttaacaaatatgacacagaaaaggtcagatgctgttgtataaaattttttactagtgtgtcttatataattctttcttctcattaattcagtgcctttttcctctaagcatactcttggtccatgccccatgcagtgtcaactgatgtttaagctacagagcattgttgtagtggtgagggccctctgttgcaggggcatggggaaatgcatatattaatcaggggctggaggagtatacatgattcttgtgttcatgttgtcatttgaaactcttcacataaaattttctaatattcatttggaaaacctctccactggagaggtttcatctctgagaggttttgtaataatagtgtaagttcagtaaatccagtccaaattctcatcacatgtattatttgatactaaattttcaattattacttcaaaataagagtctgaggatttcttcttactggcgttcttaaaggtctctaaaattaaagaacaagatgtggttttttgtttaagacgtttttagtttatttgttgttaagttaaactggagaaagtttgtcatcctcattttcaaactgaaaactaatcaaatatagtgcctatttagtctcaaaataaggtaactattaacttgattatactatataatattctcaattacatttgaatttaaaaatattgagctcttgattacaatttaatacattgtaaaaagtattaaatcctttgaaacatctttt

SEQ ID NO: 65397 - DNA, 449 bp, Homo sapiens
gccgagatggccagggagcccgcggaggaggccgcagaggagaagctctcagaggaggccacagaggaaccagacgcagaggaaccggccacagaagaaccgaccgcacagggaggccacggccccagaggaagtcactaaatctcagcccgaaaagtgggatgaagaggcccaagatgctgcaggcgaggaagagaaagaacaagaaaaagagaaggatgcggaaaacaaggtgaagaactccaaagggacctagacgcagcagaggtgaagccaagaaaatccagatgcctgtgggaattgtaacacatatcattccaaagttcgttacatcaaaagtgatatccagtgacatctaactttcatggatgtatgtgacagtgttcaagttaaaaaataaaagtttgttttaaatgaataaactgaaacgtgggaagatttttcaataa

SEQ ID NO: 65398 - DNA, 538 bp, Homo sapiens
accagcacaggctgttgaagcttgagagatttatttaaatcccagaatggcccctcatgtaaaaacaaaagcaacaagcttttctagtgctaggcagacaaggttggtgtgatcatttgactgaaaccttcagttccacaagcaccctgatatccaagctcgtgagttacaaaaggaaaagatgggcttctctacttgtttaagatatagcacacaaatgttgcagatatacacagagctggccattttcttctatttagaaagtcactggtgctggttaatgttgtactattgtttatcatctctcatttcatcccacagtcgggaggaaaagaaagaagactctgttgttcattgtttttatctttttctccagatgcctgtgggaattgtaacacatatcattccaaagttcgttacatcaaaagtgatatccagtgacatctaactttcatggatgtatgtgacagtgttcaagttaaaaaataaaagtttgttttaaatgaataaactgaaacgtgggaagatttttcaataa

SEQ ID NO: 65399 - DNA, 2394 bp, Homo sapiens
cggcagaggagctagggagtgtggcactgagccggctcaggcagagacgcggcaccatggctagcaagaaagtctgcattgtaggctccgggaactggggctcagccatcgccaagatcgtgggtggcaatgcagcccagctggcacagtttgacccacgggtgaccatgtgggtatttgaggaagacattggaggcaaaaagctgactgagatcatcaacacgcagcatgagaatgtcaaatacctgccagggcacaagttgcccccaaatgtggtggctgtcccagatgtggtccaggctgcagaggatgctgacatcctgatctttgtggtgccccatcagttcatcggcaagatctgtgaccagctcaagggccatctgaaggcaaacgccactggcatatctcttattaagggggtagacgagggccccaatgggctgaagctcatctcggaagtgattggggagcgcctcggcatccccatgagtgtgctgatgggggccaacattgccagcgaggtggctgatgagaagttctgtgagacaaccattggctgcaaggacccggcccagggacaactcctgaaagagctgatgcagacaccaaacttccgtatcacagtggtgcaagaggtggacacagtagagatctgtggagccttaaagaatgtagtggccgtgggggctggcttctgtgatggcctgggctttggcgacaacaccaaggcggcagtgatccggctgggactcatggagatgatagccttcgccaagctcttctgcagtggccctgtgtcctctgccaccttcttggagagctgtggtgttgctgacctgatcactacctgctatggagggcggaaccggaaagtggctgaggcctttgcgcgtacaggaaagtccattgagcagctggagaaagagttgctgaatgggcagaaactgcaggggcccgagacagcccgggagctatacagcatcctccagcacaagggcctggtagacaagtttcccttgttcatggctgtgtacaaggtgtgctacgagggccagccagtgggtgaattcatccactgcctgcagaatcatccagaacatatgtgagtggggccagggcccaggccaggccgcttttttaccccagtggagaccagcagaagcctggggtacctagtcaccaggatctccaggactcccagggagcagagtcttctcatcttttcactggaggacaggaggctatggggcccagctacgcacctggagatcctgaactgtcaagccactggcagcctcatgccaccacatttgccagaaatgcagttgccctgtccctctccagatgtggggctttctccatatcctctgggaggggtggaatcaagccccagtgctgcctgcttggtggcgggggtgatgtatgtggagaagggttgggggagaggccggtagggcaggggctgctagtggctgtctcacatacaccagtaatcctgttaaagggctgaagaagtatcttagccacaggagcgatgaggcaaggattgtcagggaggggtctgggcttctgagctgatgcaggccccaaggacccctttgctgacctctgccaggacccacacagcttcgatggatctcagtgtttgttaacaaaatacaaagatctcaaacaaaccccttttagcttctcctagcaacatctgtgtcctcagaaacctctggttctcccccttccccctcccccaggctgccctggcacccaaattgctgccatgctggcatctgtagctcggtggcttgacattctccccagggacttcccggttcctagttctttgccagctcctccccactctgtgcgacctttccaagccttccctcaccctccccgccagcaccctctttggggagcaggaacttaatctgctgacagagctacacctttcataacaggctcagatcactcagctccctgtgacctttgtattcacccagggcttccttctcagtagctctagctgggggaggtgtcagctgggcccctcctgtgctatctccccagaggacatccctgactccacccctttcttcctcccaaactctgcacctcttcctcagctgctccagaccggccagggtaaccagctaaccatgcctggcatctggaagccagcaggccagagggtggcccaaaggctgatgaacggtagggaagggtgagcagattcctatgttggtgggcaccaatattccaagggcagctctctttgctgaatgagggccttctcgtgaggtactgacagacagcgtgcagcagaagcctctcgaagctgttgtctagcattgctgtgtacacggcctgggggacacggagaagaaccgaacagccgct

SEQ ID NO: 65400 - DNA, 2422 bp, Homo sapiens
cggcagaggagctagggagtgtggcactgagccggctcaggcagagacgcggcaccatggctagcaagaaagtctgcattgtaggctccgggaactggggctcagccatcgccaagatcgtgggtggcaatgcagcccagctggcacagtttgacccacgggtgaccatgtgggtatttgaggaagacattggaggcaaaaagctgactgagatcatcaacacgcagcatgagaatgtcaaatacctgccagggcacaagttgcccccaaatgtggtggctgtcccagatgtggtccaggctgcagaggatgctgacatcctgatctttgtggtgccccatcagttcatcggcaagatctgtgaccagctcaagggccatctgaaggcaaacgccactggcatatctcttattaagggggtagacgagggccccaatgggctgaagctcatctcggaagtgattggggagcgcctcggcatccccatgagtgtgctgatgggggccaacattgccagcgaggtggctgatgagaagttctgtgagacaaccattggctgcaaggacccggcccagggacaactcctgaaagagctgatgcagacaccaaacttccgtatcacagtggtgcaagaggtggacacagtagagatctgtggagccttaaagaatgtagtggccgtgggggctggcttctgtgatggcctgggctttggcgacaacaccaaggcggcagtgatccggctgggactcatggagatgatagccttcgccaagctcttctgcagtggccctgtgtcctctgccaccttcttggagagctgtggtgttgctgacctgatcactacctgctatggagggcggaaccggaaagtggctgaggcctttgcgcgtacaggaaagtccattgagcagctggagaaagagttgctgaatgggcagaaactgcaggggcccgagacagcccgggagctatacagcatcctccagcacaagggcctggtagacaagtttcccttgttcatggctgtgtacaaggtgtgctacgagggccagccagtgggtgaattcatccactgcctgcagaatcatccagaacatatgtgagtggggccagggcccaggccaggccgcttttttaccccagtggagaccagcagaagcctggggtacctagtcaccaggatctccaggactcccagggagcagagtcttctcatcttttcactggaggacaggaggctatggggcccagctacgcacctggagatcctgaactgtcaagccactggcagcctcatgccaccacatttgccagaaatgcagttgccctgtccctctccagatgtggggctttctccatatcctctgggaggggtggaatcaagccccagtgctgcctgcttggtggcgggggtgatgtatgtggagaagggttgggggagaggccggtagggcaggggctgctagtggctgtctcacatacaccagtaatcctgttaaagggctgaagaagtatcttagccacaggagcgatgaggcaaggattgtcagggaggggtctgggcttctgagctgatgcaggccccaaggacccctttgctgacctctgccaggacccacacagcttcgatggatctcagtgtttgttaacaaaatacaaagatctcaaacaaaccccttttagcttctcctagcaacatctgtgtcctcagaaacctctggttctcccccttccccctcccccaggctgccctggcacccaaattgctgccatgctggcatctgtagctcggtggcttgacattctccccagggacttcccggttcctagttctttgccagctcctccccactctgtgcgacctttccaagccttccctcaccctccccgccagcaccctctttggggagcaggaacttaatctgctgacagagctacacctttcataacaggctcagatcactcagctccctgtgacctttgtattcacccagggcttccttctcagtagctctagctgggggaggtgtcagctgggcccctcctgtgctatctccccagaggacatccctgactccacccctttcttcctcccaaactctgcacctcttcctcagctgctccagaccggccagggtaaccagctaaccatgcctggcatctggaagccagcaggccagagggtggcccaaaggctgatgaacggtagggaaggaaacaagaagagttgggagagggagcttcagtgcatgtggcagtgcgtgtgctggcgcgtatcattgcaccgccccctcccgccctcgccgcaagctggccccggccttgccggcccttcttaggggctttatcatgcctcctgcaagaatagagatcacacacgggacggaaacgttagactctcatcccttgtgcccattcc

SEQ ID NO: 65401 - DNA, 1996 bp, Homo sapiens
cggcagaggagctagggagtgtggcactgagccggctcaggcagagacgcggcaccatggctagcaagaaagtctgcattgtaggctccgggaactggggctcagccatcgccaagatcgtgggtggcaatgcagcccagctggcacagtttgacccacgggtgaccatgtgggtatttgaggaagacattggaggcaaaaagctgactgagatcatcaacacgcagcatgagaatgtcaaatacctgccagggcacaagttgcccccaaatgtggtggctgtcccagatgtggtccaggctgcagaggatgctgacatcctgatctttgtggtgccccatcagttcatcggcaagatctgtgaccagctcaagggccatctgaaggcaaacgccactggcatatctcttattaagggggtagacgagggccccaatgggctgaagctcatctcggaagtgattggggagcgcctcggcatccccatgagtgtgctgatgggggccaacattgccagcgaggtggctgatgagaagttctgtgagacaaccattggctgcaaggacccggcccagggacaactcctgaaagagctgatgcagacaccaaacttccgtatcacagtggtgcaagaggtggacacagtagagatctgtggagccttaaagaatgtagtggccgtgggggctggcttctgtgatggcctgggctttggcgacaacaccaaggcggcagtgatccggctgggactcatggagatgatagccttcgccaagctcttctgcagtggccctgtgtcctctgccaccttcttggagagctgtggtgttgctgacctgatcactacctgctatggagggcggaaccggaaagtggctgaggcctttgcgcgtacaggaaagtccattgagcagctggagaaagagttgctgaatgggcagaaactgcaggggcccgagacagcccgggagctatacagcatcctccagcacaagggcctggtagacaagtaagtattggccacagccccactgattaagggagccacagccagaagtgctcgccctgttcatcatcttcctaaacctgccacaaatctgtgaagtggacagaaaggggagtattaccttacatttcagacagagtccagagcttgcagagtctggcatgcccattgtccgccagctagttcatggtctttgaactccttccagtctagtgctcttcacactacattacctggatccctttgtgcccctccttccttgtcctctgctctggggttggagctctggggcagcaggaataagctcatcccacttctgtccatcacccctagtttgagtctcttccccaaggccaacccatctgttccctgaatcctgttctgggtgctgaggtgtaaggagaaggatgggcttcaaggtgctcgttttcagaaagacagcgggggtgattgggctgatcagagcagagctgtgctggtctgagaaagactcctagaagaagacagtatgaaacaggttcagaatatccactcatgactggtcagggtaaagcttggaaaagggagcagctgggcaaaaggacagtaagaaggaaatgagtatttattaagcactttcacatcatacctaattacatcttcacatacacaatcattcctttgttatattggccccattttacagttggtgacactgaggctcagagaggttaagtgggttgctcaaggctgggtgtggtgtctcacacctgtaatcccagcactttgggaggccaaggtgggtggatcacgaggtcaggagtttgagctcagcctgaccaacatggtgaaaccccatctctactaaaaatacaaaaattagtcaggcatggtggtgtgtgcctgtaatcccagctactcaggaggctgatgcaggagaatcgcttgaacctgggaggcggaggttgcagtgagccaagattgcaccactgcgctccagcctaggcgaca

SEQ ID NO: 65402 - DNA, 550 bp, Homo sapiens
ccaaagggcacctggcctgagctccatcctgtgctcagggggtagacgagggccccaatgggctgaagctcatctcggaagtgattggggagcgcctcggcatccccatgagtgtgctgatgggggccaacattgccagcgaggtggctgatgagaagttctgtgagacaaccattggtgagagccccctggcacctgcatacacagtgcatctagttgcatcccctccccaaactgccccaaccccacttagccatctctttcccataaggcagagaaaggaaaatacaagcatcagaggtgaaggaggctgggacacccccagggaaggggcttcagggcctgcttagggaaacacagtgatgagccctccctcagagttggtgcagtggcacacctgtggtcccagctacttaagaggctgaggtgggaggatcgcttaagcccaggagtttgagtccagcctgggcaacagagagagactcccatctctataaaataaatattttttaaaaagagtccttccctcaaagccttgccccctcctcac

SEQ ID NO: 65403 - DNA, 2898 bp, Homo sapiens
cggcagaggagctagggagtgtggcactgagccggctcaggcagagacgcggcaccatggctagcaagaaagtctgcattgtaggctccgggaactggggctcagccatcgccaagatcgtgggtggcaatgcagcccagctggcacagtttgacccacgggtgaccatgtgggtatttgaggaagacattggaggcaaaaagctgactgagatcatcaacacgcagcatgagaatgtcaaatacctgccagggcacaagttgcccccaaatgtggtggctgtcccagatgtggtccaggctgcagaggatgctgacatcctgatctttgtggtgccccatcagttcatcggcaagatctgtgaccagctcaagggccatctgaaggcaaacgccactggcatatctcttattaagggggtagacgagggccccaatgggctgaagctcatctcggaagtgattggggagcgcctcggcatccccatgagtgtgctgatgggggccaacattgccagcgaggtggctgatgagaagttctgtgagacaaccattggctgcaaggacccggcccagggacaactcctgaaagagctgatgcagacaccaaacttccgtatcacagtggtgcaagaggtggacacagtagagatctgtggagccttaaagaatgtagtggccgtgggggctggcttctgtgatggcctgggctttggcgacaacaccaaggcggcagtgatccggctgggactcatggagatgatagccttcgccaagctcttctgcagtggccctgtgtcctctgccaccttcttggagagctgtggtgttgctgacctgatcactacctgctatggagggcggaaccggaaagtggctgaggcctttgcgcgtacaggaaagtccattgagcagctggagaaagagttgctgaatgggcagaaactgcaggggcccgagacagcccgggagctatacagcatcctccagcacaagggcctggtagacaagtttcccttgttcatggctgtgtacaaggtgtgctacgagggccagccagtgggtgaattcatccactgcctgcagaatcatccagaacatatgtgagtggggccagggcccaggccaggccgcttttttaccccagtggagaccagcagaagcctggggtacctagtcaccaggatctccaggactcccagggagcagagtcttctcatcttttcactggaggacaggaggctatggggcccagctacgcacctggagatcctgaactgtcaagccactggcagcctcatgccaccacatttgccagaaatgcagttgccctgtccctctccagatgtggggctttctccatatcctctgggaggggtggaatcaagccccagtgctgcctgcttggtggcgggggtgatgtatgtggagaagggttgggggagaggccggtagggcaggggctgctagtggctgtctcacatacaccagtaatcctgttaaagggctgaagaagtatcttagccacaggagcgatgaggcaaggattgtcagggaggggtctgggcttctgagctgatgcaggccccaaggacccctttgctgacctctgccaggacccacacagcttcgatggatctcagtgtttgttaacaaaatacaaagatctcaaacaaaccccttttagcttctcctagcaacatctgtgtcctcagaaacctctggttctcccccttccccctcccccaggctgccctggcacccaaattgctgccatgctggcatctgtagctcggtggcttgacattctccccagggacttcccggttcctagttctttgccagctcctccccactctgtgcgacctttccaagccttccctcaccctccccgccagcaccctctttggggagcaggaacttaatctgctgacagagctacacctttcataacaggctcagatcactcagctccctgtgacctttgtattcacccagggcttccttctcagtagctctagctgggggaggtgtcagctgggcccctcctgtgctatctccccagaggacatccctgactccacccctttcttcctcccaaactctgcacctcttcctcagctgctccagaccggccagggtaaccagctaaccatgcctggcatctggaagccagcaggccagagggtggcccaaaggctgatgaacggtagggaagggtgagcagattcctatgttggtgggcaccaatattccaagggcagctctctttgctgaatgagggccttctcgtgaggtactgacaacaccagcaactcgagagctgggaaactcaaggaggaggaagaaaatcaaaaccaccctactccctggggtgaggaaagaacaggaggggaggaggaggagtgtgctctgcacttgccttgctccaggatggggtggcagcagaggaatgtcacaggtcagcagcctaggcctccagctataaatagtccggagggcccgagaggctcccgcccgtccagcagggctgtcagcttcctgtgtggcagcacctggcacactggctctggccagcattatgctaaaaccctgttactctccaatgaaccagggaggcgggctcctctctgcgcctatcccttgagaattctgtcttaccagtgaagggtggggctgcccagatcaggcagcaggagtgaggggcacagtcaccccaggccttgctgagcccaggtctgggtactgagtgtccagagctgcctccccaggaggttaaggtgggggcaaaggggaagcttcaagcactttgcctacttttgttcactccccagtgcactgtgactcaggccttcccatcaggcctatttgtctacccaataaagcgtgttttttccag

SEQ ID NO: 65404 - DNA, 2664 bp, Homo sapiens
cggcagaggagctagggagtgtggcactgagccggctcaggcagagacgcggcaccatggctagcaagaaagtctgcattgtaggctccgggaactggggctcagccatcgccaagatcgtgggtggcaatgcagcccagctggcacagtttgacccacgggtgaccatgtgggtatttgaggaagacattggaggcaaaaagctgactgagatcatcaacacgcagcatgagaatgtcaaatacctgccagggcacaagttgcccccaaatgtggtggctgtcccagatgtggtccaggctgcagaggatgctgacatcctgatctttgtggtgccccatcagttcatcggcaagatctgtgaccagctcaagggccatctgaaggcaaacgccactggcatatctcttattaagggggtagacgagggccccaatgggctgaagctcatctcggaagtgattggggagcgcctcggcatccccatgagtgtgctgatgggggccaacattgccagcgaggtggctgatgagaagttctgtgagacaaccattggctgcaaggacccggcccagggacaactcctgaaagagctgatgcagacaccaaacttccgtatcacagtggtgcaagaggtggacacagtagagatctgtggagccttaaagtccattgagcagctggagaaagagttgctgaatgggcagaaactgcaggggcccgagacagcccgggagctatacagcatcctccagcacaagggcctggtagacaagtttcccttgttcatggctgtgtacaaggtgtgctacgagggccagccagtgggtgaattcatccactgcctgcagaatcatccagaacatatgtgagtggggccagggcccaggccaggccgcttttttaccccagtggagaccagcagaagcctggggtacctagtcaccaggatctccaggactcccagggagcagagtcttctcatcttttcactggaggacaggaggctatggggcccagctacgcacctggagatcctgaactgtcaagccactggcagcctcatgccaccacatttgccagaaatgcagttgccctgtccctctccagatgtggggctttctccatatcctctgggaggggtggaatcaagccccagtgctgcctgcttggtggcgggggtgatgtatgtggagaagggttgggggagaggccggtagggcaggggctgctagtggctgtctcacatacaccagtaatcctgttaaagggctgaagaagtatcttagccacaggagcgatgaggcaaggattgtcagggaggggtctgggcttctgagctgatgcaggccccaaggacccctttgctgacctctgccaggacccacacagcttcgatggatctcagtgtttgttaacaaaatacaaagatctcaaacaaaccccttttagcttctcctagcaacatctgtgtcctcagaaacctctggttctcccccttccccctcccccaggctgccctggcacccaaattgctgccatgctggcatctgtagctcggtggcttgacattctccccagggacttcccggttcctagttctttgccagctcctccccactctgtgcgacctttccaagccttccctcaccctccccgccagcaccctctttggggagcaggaacttaatctgctgacagagctacacctttcataacaggctcagatcactcagctccctgtgacctttgtattcacccagggcttccttctcagtagctctagctgggggaggtgtcagctgggcccctcctgtgctatctccccagaggacatccctgactccacccctttcttcctcccaaactctgcacctcttcctcagctgctccagaccggccagggtaaccagctaaccatgcctggcatctggaagccagcaggccagagggtggcccaaaggctgatgaacggtagggaagggtgagcagattcctatgttggtgggcaccaatattccaagggcagctctctttgctgaatgagggccttctcgtgaggtactgacaacaccagcaactcgagagctgggaaactcaaggaggaggaagaaaatcaaaaccaccctactccctggggtgaggaaagaacaggaggggaggaggaggagtgtgctctgcacttgccttgctccaggatggggtggcagcagaggaatgtcacaggtcagcagcctaggcctccagctataaatagtccggagggcccgagaggctcccgcccgtccagcagggctgtcagcttcctgtgtggcagcacctggcacactggctctggccagcattatgctaaaaccctgttactctccaatgaaccagggaggcgggctcctctctgcgcctatcccttgagaattctgtcttaccagtgaagggtggggctgcccagatcaggcagcaggagtgaggggcacagtcaccccaggccttgctgagcccaggtctgggtactgagtgtccagagctgcctccccaggaggttaaggtgggggcaaaggggaagcttcaagcactttgcctacttttgttcactccccagtgcactgtgactcaggccttcccatcaggcctatttgtctacccaataaagcgtgttttttccag

SEQ ID NO: 65405 - DNA, 472 bp, Homo sapiens
tactgaagctaaatacaatttatttcatgctgggggacagaaaggagcaagggagagcagtcacctgctccttatctgggctattttcttagcagacctcaaaatgagaccatggtgggaagctgggctggggccaagggaagaagcttgccagcactgtcagccgatgagcccaggagaaaaagctgggcctagtctctgccccattcctgttccacacctgtctgtacccctgtctctcctttccctggctctgccagactctctatctccctgggcgccagcctccccacccacccctggagggcggggcttggctgcacccacgtgtggtggagttaaatgctcctagccggcagaggagctagggagtgtggcactgagccggctcaggcagagacgcggcaccatggctagcaagaaagtctgcattgtaggctccgggaactggtaagcagctctgtcaagtgat

SEQ ID NO: 65406 - DNA, 163 bp, Homo sapiens
gaacaccacagacccatccactacccattcagaatttatatagaatatgtgcccatgattatctaggtgaatcaatgcaacagtagctctgatgtccagatttcctagtctattattttgtgtacagatcctctaaccacttagaaataatttttaaaatata

SEQ ID NO: 65407 - DNA, 457 bp, Homo sapiens
agataggatagaatagatgaaataaatcttactttcattgggcctgaaaggatagagaaaatttggatcatttagaatgaaggaaacatcccagcaaatggaagcagagacaaggggagtataaactgcattctaggtccaagaggagacaggaccaaccgaagtgaaggattttataggccagctctacgtaagactggaaagttaagcctatagtccatcctggcagttaaaaatgcagcaaagtgctgggattacaggtgtgagccaataaatgctttttactagaaaaggcaagaacctggataagacctctctggataaatcatcaaaccttttgcaagtggctactcttaccttgttgaagtatttccatcccttctccaggtgagcagaaatccccggatgccatttgattttcttgggattctaatctgtggaaccaagaagtgaaaga

SEQ ID NO: 65408 - DNA, 456 bp, Homo sapiens
cgtgtctttaatagtttgctaattagactagctggttagaaagagggatcactagattggagagagagatccagtttccactggaggcagtaggtctgctcatttccatggtgacaatcctaatggcagagggagtgagtttcccttagtggcacaggctgggggttttgagcttttaagttttgttttatagaaatctggagaattttacattttacttcactatatatctatgtttaaaataattcatttttgatgtcccaaaattgatgtgggttgccttatttccaggcaccaggttgctcactgcaaggtgacattttgagaagcagaaatctctaggtatatcttaagtgtgaaaagcttgttagatttccatggcctattccaggtgggttgttgggtttatgttgtaagcatcaaacttttgtggaaataaatacctaatacaaggta

SEQ ID NO: 65409 - DNA, 456 bp, Homo sapiens
cccatccagagcctttgctgctgtgtcactcttctaagcctggttcttgcccagtggaacccaaccatggaaccaaaagaagcatgtgtctggggtcaccggagccgttgttctctacctgcccagtgcgctattcagaagcagaggggctggggcagaaggtctggagggagtgggttatgaagcccctcagtgagccttgggattgtttgagttctcaaagacaagtgctggaacagtgattgtgtcaccccagtgctgctgtggcccacagaacatctgtgacacagaaacatcagccagagtgcagcatgaatacagatggcacctctgggggtcaggaccacgtaagtgacaatttgctgaacctctctttctatgcaggttagaggacggaggctggataactttgtggaaagttcctctgtggaacatttttatcttggccaagttgca

SEQ ID NO: 65410 - DNA, 522 bp, Homo sapiens
tgagggtggagggagttgtaagccctttacaatcccattagtgacctggtgcacaggcaaaacatcttgtttggagaaaatggcttcatcttgatgccttgcaaagctttaggttacctcctctgccataggcaggcgtccaacaaggtagttacataagaagaagatatatcaactgattaagagagcctactgtctgtgttccactttctaatacgtatgcaacctaaaatttaatctgatctctctcccagtataactgtaggtattattttgccaaagctaaaatcacattagataaatgaattttctttcatatatcattttcaatcattgttatctacatgtataaaaagtaaatccagggatgtatagttttggcaacatgtcaagagtatggaagacagccaggtgcagtggctcatgcctgtaatcctagcacttcgggaggcctaggtgggaggatcacttgaggccaggagttcgaaaccagcatggccaacatggtgaaacactgtctct

SEQ ID NO: 65411 - DNA, 718 bp, Homo sapiens
caaaaataaatttgtaatatttgctaatttccatggtgtaaatactcccacggtggccaattttaagctaacaatgtgacatcacctaacatggtgcactgtagcactgttacatagtatttgtaccataaagatacaataaatctcaagatcataaatggtagtacaacatagtaaaataatcaggaagtgatgagtttttagtaattattacctgtatctttattataacttcattgtaatattgatttaaattacgactgtgtttaacaaatggcttgcaaattttaatgatcacctctcaccattacctgaaaacattcttgaaaaagacacacatccctcctttggcctgtggactaatcagagcacatgagcaatctcagagaacctgccatgtgtcaagtgaggaaggagaagtgttaggggaggcattgtttacggatggatttggccagtaatcaacaatcaggaagagctattattgtgttcattccctggggcctatgtggccacacagaaccaagtaggcaacttagcctcctcattcagaggcttgccctagagcctgagctaagaaaaaagaccacggggaatgcactgcagcccacaggcaaactgccttctgcatcttatacatactctagcccaggatttcttcagcacagacgacctgcatgaagttgtgcttaaaatgtaatgtcttggccagacgtgg

SEQ ID NO: 65412 - DNA, 257 bp, Homo sapiens
gctggctttcttgtgcgcatgcagactctgagctgatcatgtcacttctgtgggcatggttgttctccgtatggcataggggcaaatgcacagtggatttttgaagatgaaattaggtttaatgaaggcggaagtgttttgtaggccggcaagtgtgaaacaactgtgtgtgttttgtatgctttcatgtgatggccagtcaggtgtggccacagaagagacacaatttattatagtcataggtcgtagagacagga

SEQ ID NO: 65413 - DNA, 258 bp, Homo sapiens
gtcttggtatgttgtccaggctgatctggaacttccggcctcaagtactcttcccgtgtcagcctcttaaagccttgggattacaggcatgagccactgcacccatccaggacctggatattttcggaggctattattcatcccaccataatggccaatgattatctttaagggaagacactgcaaatgaagattccaaaagaactggaatcctgggtaaagaatcttctagaacatctgaactcatatgtgttcaat

SEQ ID NO: 65414 - DNA, 392 bp, Homo sapiens
tgagccaccgtgcccagcctgagactactttttgatggagcccactcaaggggatgaggaggtttgaaccacaagtggctggctaaataaaagcttagtcagagctgggcacggtggctcacacctgtaatctcatcctccctagtagtggggattacaggcgcccgtcaccacatctagctaatttttgtatttttagtagagatggggtttcaccatgttggccagtctggtgtcgaactcctgagctcaggtgattcacttgccttggcctcccaaagtcctgggattacaggcgtgagccaccgtgcccaggtgcccccaccttttttttttttttgaggcagagtctcactccagcctggacaacaagagcaaaactccatttcaaa

SEQ ID NO: 65415 - DNA, 287 bp, Homo sapiens
cttccgacactttgagtaccttttaatatgtttactccataaaacttactattaataataatatccactatatatttgtgaaattgtttagagtattaactctatctacacaacccaatgaggtagaacaatacagatcacatgttacagaaaaggcaaccacatctcaaagaaataaagggcttcttcgcagccattcagatagtaacagtgtcagaacaagagagctgagggcttctggctctcaggttcatggtctttccattcaacctgcaatctctctattg

SEQ ID NO: 65416 - DNA, 6746 bp, Homo sapiens
  misc_feature (3308)..(3308): n is a, c, g, or t
  misc_feature (3314)..(3314): n is a, c, g, or t
gattgattgcgtcgtggagagacagtgtgtggatgagggagggtcacagcacatgctcagtcctgtcagagtgaggggaagtttctgcgttctgcgtgaaggcttaggtcatagcacaagctcagtgaaagctctatgaggtctctgagactgcatgtgcctccattttgagttgttagtgtagaaaagggcagagttttagcagaaagtaaaggttcaggaatccagctagactcaccagagcccgtgttagtcatggatgatccattcagcccctgcaggaggctgaacagtacccagggggagattcgtgtcggtcctagtcatcaggccaaacttccagatctgcaaccatttccttctccagatggtgatacagtgacccaacatgaggaactggtctggatgcctggagttaacgactgtgacctccttatgtacttgagggcagcaaggagcatggcggcatttgcaggaatgtgtgatggaggctctacagaggacggctgtgtcgcagcctctcgggatgacaccactctgaatgcactgaacacactgcatgaaagcggttacgatgctggcaaagccctgcagcgcctggtgaagaagcctgtgcccaagctcatcgagaagtgctggaccgaggacgaagtgaaacgcttcgttaagggactcaggcagtacgggaagaacttcttcagaattagaaaggagctgcttcccaataaggaaacaggggagctgatcaccttctattactattggaagaagacccccgaagcagccagctcccgagcccatcgtaggcaccgcaggcaggccgtgttcaggaggattaagactcgcaccgcgtccacacccgtcaacacaccctccagacccccgtccagtgaattcttggacctaagttcagccagtgaagatgacttcgacagtgaggacagtgagcaggagctgaaggggtacgcctgccgccactgcttcaccaccacctccaaagattggcaccacggaggccgggagaacatcctgctttgcaccgactgtcgcatccacttcaagaaatacggtgagctcccgcccattgagaagcccgtggacccgccaccgtttatgttcaaacccgtcaaggaagaggatgatgggctcagtgggaagcatagcatgaggacacggcggagtcggggctcgatgtcgacactacgcagtggtcggaagaagcagccagccagccctgatggtcgcacctcacccatcaatgaagacatccgctccagcggccggaactcccccagcgctgccagtacctccagcaatgacagtaaagcagagacagtgaagaagtcggccaagaaggtgaaggaggaagcctcttcccctcttaagagtaacaaacgccagcgggagaaggtggcctctgatacggaggaggctgacaggaccagctccaagaagacaaaaacgcaggagatcagcaggcccaactcgccatctgaaggtgagggagagagttcagacagtcgcagcgtcaacgatgagggtagcagtgaccccaaagacatcgaccaggacaatcgcagcacgtccccgagcatccccagcccccaggacaatgagagtgactcggactcgtcagcccagcagcagatgctgcaggcccagcccccagccttgcaggctcccactggggtcaccccagctccctcctcagctcctccagggacccctcagctgcccacgccagggcccacgccctctgccactgcagttcccccacagggctcccccacggcctcccaggcccctaaccagccgcaggctcccacagcgcctgttccccacacccacatccaacaggcaccggccttgcacccccagcggccgccctcaccgcatcccccgccgcatccctcgccacatcccccactgcagcctctgactgggtcggcgggccagccttctgcaccctctcatgcccagcccccactgcacggtcagggcccacccggccctcacagcctgcaggctgggcccctgctgcagcacccaggccccccacagccctttggcctccctccccaggcctcccaaggccaggcccctctggggacctccccagcagcagcgtaccctcacacctccctgcagctgccagcctctcagtcagcgctgcagtcccaacagcctccacgggagcagcccctgccaccagcgcccttggccatgccccacatcaagcccccgcctaccactcccatcccccagctgccggcgccacaggcccacaagcaccctccccacctctcggggccctcacccttctccatgaatgccaacctgcctccccctccagccctgaagcccctgagctccctgtccacacatcaccccccgtcggctcaccccccacccctgcctcccacccccctacaggcctccaccaggtggccccccaacccccgtttgctcagcacccctttgtccctggaggccctcctcccatcacccctccgacctgcccctccacctctaccccaccggcgggacctggcacctcggcccagccaccctgctctggtgcggcggcttcaggaggcagcatagcgggggggtcgtcctgcccactccccaccgtccagatcaaggaggaggctctggacgacgctgaggagcctgagagcccccctcccccaccaaggagcccgtccccggagcccactgtggtggacacccccagtcacgccagccagtcagctaggttctacaaacacctggaccggggctacaactcgtgtgcccggacagacctgtacttcatgcctctggccgggtccaagctggccaagaagagggaggaggccattgagaaggccaagcgcgaggctgagcagaaagcccgagaggagcgagagcgggagaaggagaaggagaaggagcgggagcgggagcgagagcgggagcgcgaggcagagcgggcggctaaggcgtccagctcagcgcatgaaggtcgcctcagtgacccacagctcagtggtcctggccacatgcggccatccttcgagccaccaccaaccaccattgctgctgtgcccccctacatcgggcccgacacacctgcccttcggactctgagcgagtacgcccggccccacgtcatgtcgcccaccaaccgcaaccaccccttctacatgccccttaaccccacggaccccctgctggcctaccacatgcctggcctctacaacgtcgaccccaccatccgcgagcgggagctccgggagcgggagatccgagagcgggagatccgngagcgngagctgcgggagaggatgaagccgggcttcgaggtgaagcccccagagctggaccccctgcacccagccgccaaccccatggagcactttgcccggcacagcgccctcaccatccccccgaccgccgggccccacccttttgcttctttccacccgggcctgaaccccttggagagggagagactggccctggcgggcccccagctgcggcccgagatgagctaccctgacagactggcagccgagcgtatccacgcagagcgcatggcatcgctgaccagcgatcccctggcccgactgcagatgttcaacgtgactccgcaccatcaccagcactctcacattcactcccacctccacctccaccagcaggaccccctccaccaaggttcagcaggccccgttcacccgctggtcgaccccctgactgccggtccccacctggctcgcttcccctacccgcctggcactctccccaaccctctgcttggacagcccccacacgagcacgagatgcttcgccacccagttttcggcaccccctacccccgtgacctgcctggggccatcccaccccccatgtcagcagcccaccagctgcaggccatgcatgcccagtcggccgagctgcagagactggccatggagcagcagtggctgcatggacacccccacatgcatggtggccacctaccaagtcaggaagattattacagtcgactgaagaaagaaggtgacaagcagttataagttatttatttgttaacgctggctgtggaaaccccagttcttggggggagaaacaggactttttacataaaataggagctgcaaaagcaaaaagaatatcttctaaagatttctttatatatttaaaaacccacaactaaaaatgtatccacatagtagtgttcgtttgtcgagaggatttcctgagactggtttggatctccctgcatgacagtcccccagaaacttagtgagtcctggactggactgaacatccagaaagcttccctgcaatcttggggtttggctttagttttcttttccttgatttctcagtaggtgctagaatccagttcacacccttcactgtgcgtgcagacacactgacacactccgccacgagtgctccagagcccacgaggcttgcagatcgggggcataggaatttggaatccaagagctataatttttaaaaaaaaaaatcttttattttaatacattgtaggaaatcttcataattggagaaagttctgcagcatggctttttacgtctgtaaataaataattttagaacagcctttttttcttccataaactactattgtgatctattttttccagccatgtcactaattgtgaattcctaccaactattgacagaatacagagttgattttttaataaaaagttatatataattatccctttaattaaagggagcaaaggggcgttccacatggacagaggcttggaccgaggcctggtcacagcagcgagcatccagggtttgcagggacgatgttacagactctgttttctgcctggcgtttcacttgtgtctgctcctagcctgtgctctgccagcagcacagacatctgctccatcagacctcttccattttgcacagggagtgcaggaggtgaatgttcactttctgttctccagtgtcactgttctgtttccacgggatggaaagcgcatgggcctgtgtccattgtagatttccttctagatttctgtgtacacacacttgattgttctggatgaatgtcttttttaatactccgaaaatttcatcatctaagaaaatgattccatacaaataactcagcacacaagtgacccaggacatatgcctgccaaagggatgtgttagaaggctgccttctcatgcgcattgtcacttggatcttgtggtgaggacggccccatctttcttgccacagattgaggccacttttgagcaagggagatcctggagttaagacaggtgttgggggcagcctgtattttaccctaggggcaggtctgcatggtgaccccacattgcactggtaaaccatttgagtcccactcttcatcctggaagtgggaactggagtcccacccacagtgcattcagaaagcatgctgtgtgggggctgcttctcaggaggccaggcccttctgagcggaaccgtcctggagagagcctgccctcgtttccaggctgcagccgtaacgcactttctcccaggctgagggcgggtgttctggggtgtctgccctctgtcggccctgcttcctgccaggacgtggcctcttccgatccttttctctcagacactggaggtctcttctgccattgtgctggtcccatcccaagaattgtaggacagagaccacactgggtcggcggacacaaagtccatccaggacccaggccgcagagggagcaggaagagatgctgatagtttgatctagaaaccagcagctactggctcaaattcaggttctggcgtcaaatagcgacatttccagtttctcttaaaaaccgtgtttggtttcagttgggataggcttgttttgtctgttgaaaatgtttctagttttttttctttcatttttctctcattccatttctgccttaactttagtttgttcacagggaggcaaagctgacatgaaccttttgtcgtgggacttcaggccacattggcttgaaggcattcgtttccttctggggtggggacaggccctcatggcaggcttgttcccgtggctctgagcgaggcctcttcctgctgggctcccagactcctgcatccaggcccccaccttctcggcttctggtttttctttctttttggtagaacacaacatctaccattcagttaaaccttctttatctcctcctctggcatccatttttccaaagaagagtcgagtcctctgaggtctgtgcttgaaagccgtccgaaggcattcttgttagctttgcttttctccccatatcccaaggcgaagcgctgagattcttccatctaaaaaaccctcgacccgaaaccctcaccagataaactacagtttgtttaggaggccctgaccttcatggtgtctttgaagcccaaccactcggtttccttcggattttcctccctttgttcggggtttggtttggctcctctgtgtgtgtccgtatcttgttcggtgtcctcgaggttgagcttcactccactgcggcagaggcagcgtgcacactcggatttgctacgtttctatatatcttgaagctaaatgtatatatgagtagtttgccatgagataacacagtgtaaacagtagacacccagaaatcgtgacttctgtgttctctccatttgagtattttgtaatttttttgaaatatttgtggacataaataaaaccaagctacactaca

SEQ ID NO: 65417 - DNA, 720 bp, Homo sapiens
ggaacaaggggcccttcaatgggcaaggggcttgttttccccgtggggcttcttgaaagggaggggcttctttccctggttggggctccccaagaacttcctgcaataccagggcccttctcggcttctggtttttctttctttttggtagaacacaacatctaccattcagttaaaccttctttatctcctcctctggcatccatttttccaaagaagagtcgagtcctctgaggtctgtgcttgaaagccgtccgaaggcattcttgttagctttgcttttctccccatatcccaaggcgaagcgctgagattcttccatctaaaaaaccctcgacccgaaaccctcaccagataaactacagtttgtttaggaggccctgaccttcatggtgtctttgaagcccaaccactcggtttccttcggattttcctccctttgttcggggtttggtttggctcctctgtgtgtgtccgtatcttgttcggtgtcctcgaggttgagcttcactccactgcggcagaggcagcgtgcacactcggatttgctacgtttctatatatcttgaagctaaatgtatatatgagtagtttgccatgagataacacagtgtaaacagtagacacccagaaatcgtgacttctgtgttctctccatttgagtattttgtaatttttttgaaatatttgtggacataaataaaaccaagctacactaca

SEQ ID NO: 65418 - DNA, 457 bp, Homo sapiens
cggccgctcaggcctccttttgttttagcaagtgcacttcactccccgggcccccacctgcccgcctgcgccgcccctttccgcgggtccggagttggcggggccctgcgccggaggaggaggaccaggcccgcgggctcagctctcgccgccagcgggccgcagcatttttgaaacgttggggttgttggagtggttggattttccctggaattgagtgagaaattcagaagactgaagcccaggcttactgtctacctttcacggaggcctagccgtgagaggacagaagaaggcacgtggcgaatcatgacagcggacaaagacaaagacaaagacttgggaaggacaaagaagagaaaagaatcagtgtaacatttaaacaacagtgcaaccgtgctgtgagagccatctcaacctgatgtcctaagtagccagtgtttccttccctcgtgcc

SEQ ID NO: 65419 - DNA, 544 bp, Homo sapiens
gattgattgcgtcgtggagagacagtgtgtggatgagggagggtcacagcacatgctcagtcctgtcagagtgaggggaagtttctgcgttctgcgtgaaggcttaggtcatagcacaagctcagtgaaagctctatgaggtctctgagactgcatgtgcctccattttgagttgttagtgtagaaaagggcagagttttagcagaaagtaaaggttcaggaatccagctagactcaccagagcccgtgttagtcatggatgatccattcagcccctgcaggccaaacttccagatctgcaaccatttccttctccagatggtgatacagtgacccaacatgaggaactggtctggatgcctggagttaacgactgtgacctccttatgtacttgagggcagcaaggtaataggaatctacccccatcctgctttctgaattagaccatctgaactgattataggcagtaaactttgcatttcccctgagattttatttctatattgggcgttctctgactttaagtttggttacaccctctgt

SEQ ID NO: 65420 - DNA, 6286 bp, Homo sapiens
  misc_feature (2848)..(2848): n is a, c, g, or t
  misc_feature (2854)..(2854): n is a, c, g, or t
gagccggagcccagtgacaggcgacggcctcttgccgccccggaccccgggcgcttacctgtggctgctggggtcggccgcccgggaccaggctgggagccccgagaaacgcttcgttaagggactcaggcagtacgggaagaacttcttcagaattagaaaggagctgcttcccaataaggaaacaggggagctgatcaccttctattactattggaagaagacccccgaagcagccagctcccgagcccatcgtaggcaccgcaggcaggccgtgttcaggaggattaagactcgcaccgcgtccacacccgtcaacacaccctccagacccccgtccagtgaattcttggacctaagttcagccagtgaagatgacttcgacagtgaggacagtgagcaggagctgaaggggtacgcctgccgccactgcttcaccaccacctccaaagattggcaccacggaggccgggagaacatcctgctttgcaccgactgtcgcatccacttcaagaaatacggtgagctcccgcccattgagaagcccgtggacccgccaccgtttatgttcaaacccgtcaaggaagaggatgatgggctcagtgggaagcatagcatgaggacacggcggagtcggggctcgatgtcgacactacgcagtggtcggaagaagcagccagccagccctgatggtcgcacctcacccatcaatgaagacatccgctccagcggccggaactcccccagcgctgccagtacctccagcaatgacagtaaagcagagacagtgaagaagtcggccaagaaggtgaaggaggaagcctcttcccctcttaagagtaacaaacgccagcgggagaaggtggcctctgatacggaggaggctgacaggaccagctccaagaagacaaaaacgcaggagatcagcaggcccaactcgccatctgaaggtgagggagagagttcagacagtcgcagcgtcaacgatgagggtagcagtgaccccaaagacatcgaccaggacaatcgcagcacgtccccgagcatccccagcccccaggacaatgagagtgactcggactcgtcagcccagcagcagatgctgcaggcccagcccccagccttgcaggctcccactggggtcaccccagctccctcctcagctcctccagggacccctcagctgcccacgccagggcccacgccctctgccactgcagttcccccacagggctcccccacggcctcccaggcccctaaccagccgcaggctcccacagcgcctgttccccacacccacatccaacaggcaccggccttgcacccccagcggccgccctcaccgcatcccccgccgcatccctcgccacatcccccactgcagcctctgactgggtcggcgggccagccttctgcaccctctcatgcccagcccccactgcacggtcagggcccacccggccctcacagcctgcaggctgggcccctgctgcagcacccaggccccccacagccctttggcctccctccccaggcctcccaaggccaggcccctctggggacctccccagcagcagcgtaccctcacacctccctgcagctgccagcctctcagtcagcgctgcagtcccaacagcctccacgggagcagcccctgccaccagcgcccttggccatgccccacatcaagcccccgcctaccactcccatcccccagctgccggcgccacaggcccacaagcaccctccccacctctcggggccctcacccttctccatgaatgccaacctgcctccccctccagccctgaagcccctgagctccctgtccacacatcaccccccgtcggctcaccccccacccctgcaactcatgcctcagagccagccattgccctcctcgcccgcccagccccccgggctgacccagagccagaacctgcccccgccccctgcctcccacccccctacaggcctccaccaggtggccccccaacccccgtttgctcagcacccctttgtccctggaggccctcctcccatcacccctccgacctgcccctccacctctaccccaccggcgggacctggcacctcggcccagccaccctgctctggtgcggcggcttcaggaggcagcatagcgggggggtcgtcctgcccactccccaccgtccagatcaaggaggaggctctggacgacgctgaggagcctgagagcccccctcccccaccaaggagcccgtccccggagcccactgtggtggacacccccagtcacgccagccagtcagctaggttctacaaacacctggaccggggctacaactcgtgtgcccggacagacctgtacttcatgcctctggccgggtccaagctggccaagaagagggaggaggccattgagaaggccaagcgcgaggctgagcagaaagcccgagaggagcgagagcgggagaaggagaaggagaaggagcgggagcgggagcgagagcgggagcgcgaggcagagcgggcggctaaggcgtccagctcagcgcatgaaggtcgcctcagtgacccacagctcagtggtcctggccacatgcggccatccttcgagccaccaccaaccaccattgctgctgtgcccccctacatcgggcccgacacacctgcccttcggactctgagcgagtacgcccggccccacgtcatgtcgcccaccaaccgcaaccaccccttctacatgccccttaaccccacggaccccctgctggcctaccacatgcctggcctctacaacgtcgaccccaccatccgcgagcgggagctccgggagcgggagatccgagagcgggagatccgngagcgngagctgcgggagaggatgaagccgggcttcgaggtgaagcccccagagctggaccccctgcacccagccgccaaccccatggagcactttgcccggcacagcgccctcaccatccccccgaccgccgggccccacccttttgcttctttccacccgggcctgaaccccttggagagggagagactggccctggcgggcccccagctgcggcccgagatgagctaccctgacagactggcagccgagcgtatccacgcagagcgcatggcatcgctgaccagcgatcccctggcccgactgcagatgttcaacgtgactccgcaccatcaccagcactctcacattcactcccacctccacctccaccagcaggaccccctccaccaaggttcagcaggccccgttcacccgctggtcgaccccctgactgccggtccccacctggctcgcttcccctacccgcctggcactctccccaaccctctgcttggacagcccccacacgagcacgagatgcttcgccacccagttttcggcaccccctacccccgtgacctgcctggggccatcccaccccccatgtcagcagcccaccagctgcaggccatgcatgcccagtcggccgagctgcagagactggccatggagcagcagtggctgcatggacacccccacatgcatggtggccacctaccaagtcaggaagattattacagtcgactgaagaaagaaggtgacaagcagttataagttatttatttgttaacgctggctgtggaaaccccagttcttggggggagaaacaggactttttacataaaataggagctgcaaaagcaaaaagaatatcttctaaagatttctttatatatttaaaaacccacaactaaaaatgtatccacatagtagtgttcgtttgtcgagaggatttcctgagactggtttggatctccctgcatgacagtcccccagaaacttagtgagtcctggactggactgaacatccagaaagcttccctgcaatcttggggtttggctttagttttcttttccttgatttctcagtaggtgctagaatccagttcacacccttcactgtgcgtgcagacacactgacacactccgccacgagtgctccagagcccacgaggcttgcagatcgggggcataggaatttggaatccaagagctataatttttaaaaaaaaaaatcttttattttaatacattgtaggaaatcttcataattggagaaagttctgcagcatggctttttacgtctgtaaataaataattttagaacagcctttttttcttccataaactactattgtgatctattttttccagccatgtcactaattgtgaattcctaccaactattgacagaatacagagttgattttttaataaaaagttatatataattatccctttaattaaagggagcaaaggggcgttccacatggacagaggcttggaccgaggcctggtcacagcagcgagcatccagggtttgcagggacgatgttacagactctgttttctgcctggcgtttcacttgtgtctgctcctagcctgtgctctgccagcagcacagacatctgctccatcagacctcttccattttgcacagggagtgcaggaggtgaatgttcactttctgttctccagtgtcactgttctgtttccacgggatggaaagcgcatgggcctgtgtccattgtagatttccttctagatttctgtgtacacacacttgattgttctggatgaatgtcttttttaatactccgaaaatttcatcatctaagaaaatgattccatacaaataactcagcacacaagtgacccaggacatatgcctgccaaagggatgtgttagaaggctgccttctcatgcgcattgtcacttggatcttgtggtgaggacggccccatctttcttgccacagattgaggccacttttgagcaagggagatcctggagttaagacaggtgttgggggcagcctgtattttaccctaggggcaggtctgcatggtgaccccacattgcactggtaaaccatttgagtcccactcttcatcctggaagtgggaactggagtcccacccacagtgcattcagaaagcatgctgtgtgggggctgcttctcaggaggccaggcccttctgagcggaaccgtcctggagagagcctgccctcgtttccaggctgcagccgtaacgcactttctcccaggctgagggcgggtgttctggggtgtctgccctctgtcggccctgcttcctgccaggacgtggcctcttccgatccttttctctcagacactggaggtctcttctgccattgtgctggtcccatcccaagaattgtaggacagagaccacactgggtcggcggacacaaagtccatccaggacccaggccgcagagggagcaggaagagatgctgatagtttgatctagaaaccagcagctactggctcaaattcaggttctggcgtcaaatagcgacatttccagtttctcttaaaaaccgtgtttggtttcagttgggataggcttgttttgtctgttgaaaatgtttctagttttttttctttcatttttctctcattccatttctgccttaactttagtttgttcacagggaggcaaagctgacatgaaccttttgtcgtgggacttcaggccacattggcttgaaggcattcgtttccttctggggtggggacaggccctcatggcaggcttgttcccgtggctctgagcgaggcctcttcctgctgggctcccagactcctgcatccaggcccccaccttctcggcttctggtttttctttctttttggtagaacacaacatctaccattcagttaaaccttctttatctcctcctctggcatccatttttccaaagaagagtcgagtcctctgaggtctgtgcttgaaagccgtccgaaggcattcttgttagctttgcttttctccccatatcccaaggcgaagcgctgagattcttccatctaaaaaaccctcgacccgaaaccctcaccagataaactacagtttgtttaggaggccctgaccttcatggtgtctttgaagcccaaccactcggtttccttcggattttcctccctttgttcggggtttggtttggctcctctgtgtgtgtccgtatcttgttcggtgtcctcgaggttgagcttcactccactgcggcagaggcagcgtgcacactcggatttgctacgtttctatatatcttgaagctaaatgtatatatgagtagtttgccatgagataacacagtgtaaacagtagacacccagaaatcgtgacttctgtgttctctccatttgagtattttgtaatttttttgaaatatttgtggacataaataaaaccaagctacactaca

SEQ ID NO: 65421 - DNA, 7870 bp, Homo sapiens
  misc_feature (4432)..(4432): n is a, c, g, or t
  misc_feature (4438)..(4438): n is a, c, g, or t
gcaaccctccgcgctccggagcctcctcagcctcccgcacaccccgagacgctcgccccgctgggcctcggtccccgcctcctcccccgtccttttcccctctctcgctccccacattgtctctgcctcattttctctcctagttgaggattaaaaaaaaaaaaaaatcaccatcatcctcagggagccccctcgccctcggaaaacaaaaccagacatgatcctgggctcctgcttctgaaagatctgcccgaccgaggaggagggagcctaggttcaagtcgcaggaaaggtcacggcagggaagccccctcagcccctccgcgtcgcctccccgcgggccgcccctctcggccctgcgccccgcggccccgcagcctccgcgcggcctcccgccccatccccgccactttccccggagctgggccgcgaacacctcactattgatggtgtagcgctttaggggaagcatttttgaaacgttggggttgttggagtggttggattttccctggaattgagtgagaaattcagaagactgaagcccaggcttactgtctacctttcacggaggcctagccgtgagaggacagaagaaggcacgtggcgaatcatgacagcggacaaagacaaagacaaagacaaagagaaggaccgggaccgagaccgggaccgagagagagagaaaagagacaaagcaagagagagtgagaattcaaggccacgccggagctgtaccttggaaggaggagccaaaaattatgctgagagtgatcacagtgaagacgaggacaatgacaacaatagtgccaccgcagaggagtccacgaagaagaataagaagaaaccaccgaaaaaaaagtctcgttatgaaaggacagataccggtgagataacatcctacatcactgaagatgatgtggtctacagaccaggagactgtgtgtatatcgagagtcggaggccaaacacaccgtatttcatctgtagcattcaagacttcaaactgagtaagagggaccatctcctcatgaacgtcaaatggtactaccgtcaatctgaggttccagattctgtgtatcagcatttggttcaggatcgacataatgaaaatgactctggaagagaacttgtcattacagacccagttatcaagaaccgagagctcttcatttctgattacgttgacacttaccatgctgctgcccttagagggaagtgtaacatctcccatttttctgacatatttgctgctagagagtttaaagcccgagtggattcatttttctacatattaggatataaccctgagacaaggaggctgaacagtacccagggggagattcgtgtcggtcctagtcatcaggccaaacttccagatctgcaaccatttccttctccagatggtgatacagtgacccaacatgaggaactggtctggatgcctggagttaacgactgtgacctccttatgtacttgagggcagcaaggagcatggcggcatttgcaggaatgtgtgatggaggctctacagaggacggctgtgtcgcagcctctcgggatgacaccactctgaatgcactgaacacactgcatgaaagcggttacgatgctggcaaagccctgcagcgcctggtgaagaagcctgtgcccaagctcatcgagaagtgctggaccgaggacgaagtgaaacgcttcgttaagggactcaggcagtacgggaagaacttcttcagaattagaaaggagctgcttcccaataaggaaacaggggagctgatcaccttctattactattggaagaagacccccgaagcagccagctcccgagcccatcgtaggcaccgcaggcaggccgtgttcaggaggattaagactcgcaccgcgtccacacccgtcaacacaccctccagacccccgtccagtgaattcttggacctaagttcagccagtgaagatgacttcgacagtgaggacagtgagcaggagctgaaggggtacgcctgccgccactgcttcaccaccacctccaaagattggcaccacggaggccgggagaacatcctgctttgcaccgactgtcgcatccacttcaagaaatacggtgagctcccgcccattgagaagcccgtggacccgccaccgtttatgttcaaacccgtcaaggaagaggatgatgggctcagtgggaagcatagcatgaggacacggcggagtcggggctcgatgtcgacactacgcagtggtcggaagaagcagccagccagccctgatggtcgcacctcacccatcaatgaagacatccgctccagcggccggaactcccccagcgctgccagtacctccagcaatgacagtaaagcagagacagtgaagaagtcggccaagaaggtgaaggaggaagcctcttcccctcttaagagtaacaaacgccagcgggagaaggtggcctctgatacggaggaggctgacaggaccagctccaagaagacaaaaacgcaggagatcagcaggcccaactcgccatctgaaggtgagggagagagttcagacagtcgcagcgtcaacgatgagggtagcagtgaccccaaagacatcgaccaggacaatcgcagcacgtccccgagcatccccagcccccaggacaatgagagtgactcggactcgtcagcccagcagcagatgctgcaggcccagcccccagccttgcaggctcccactggggtcaccccagctccctcctcagctcctccagggacccctcagctgcccacgccagggcccacgccctctgccactgcagttcccccacagggctcccccacggcctcccaggcccctaaccagccgcaggctcccacagcgcctgttccccacacccacatccaacaggcaccggccttgcacccccagcggccgccctcaccgcatcccccgccgcatccctcgccacatcccccactgcagcctctgactgggtcggcgggccagccttctgcaccctctcatgcccagcccccactgcacggtcagggcccacccggccctcacagcctgcaggctgggcccctgctgcagcacccaggccccccacagccctttggcctccctccccaggcctcccaaggccaggcccctctggggacctccccagcagcagcgtaccctcacacctccctgcagctgccagcctctcagtcagcgctgcagtcccaacagcctccacgggagcagcccctgccaccagcgcccttggccatgccccacatcaagcccccgcctaccactcccatcccccagctgccggcgccacaggcccacaagcaccctccccacctctcggggccctcacccttctccatgaatgccaacctgcctccccctccagccctgaagcccctgagctccctgtccacacatcaccccccgtcggctcaccccccacccctgcaactcatgcctcagagccagccattgccctcctcgcccgcccagccccccgggctgacccagagccagaacctgcccccgccccctgcctcccacccccctacaggcctccaccaggtggccccccaacccccgtttgctcagcacccctttgtccctggaggccctcctcccatcacccctccgacctgcccctccacctctaccccaccggcgggacctggcacctcggcccagccaccctgctctggtgcggcggcttcaggaggcagcatagcgggggggtcgtcctgcccactccccaccgtccagatcaaggaggaggctctggacgacgctgaggagcctgagagcccccctcccccaccaaggagcccgtccccggagcccactgtggtggacacccccagtcacgccagccagtcagctaggttctacaaacacctggaccggggctacaactcgtgtgcccggacagacctgtacttcatgcctctggccgggtccaagctggccaagaagagggaggaggccattgagaaggccaagcgcgaggctgagcagaaagcccgagaggagcgagagcgggagaaggagaaggagaaggagcgggagcgggagcgagagcgggagcgcgaggcagagcgggcggctaaggcgtccagctcagcgcatgaaggtcgcctcagtgacccacagctcagtggtcctggccacatgcggccatccttcgagccaccaccaaccaccattgctgctgtgcccccctacatcgggcccgacacacctgcccttcggactctgagcgagtacgcccggccccacgtcatgtcgcccaccaaccgcaaccaccccttctacatgccccttaaccccacggaccccctgctggcctaccacatgcctggcctctacaacgtcgaccccaccatccgcgagcgggagctccgggagcgggagatccgagagcgggagatccgngagcgngagctgcgggagaggatgaagccgggcttcgaggtgaagcccccagagctggaccccctgcacccagccgccaaccccatggagcactttgcccggcacagcgccctcaccatccccccgaccgccgggccccacccttttgcttctttccacccgggcctgaaccccttggagagggagagactggccctggcgggcccccagctgcggcccgagatgagctaccctgacagactggcagccgagcgtatccacgcagagcgcatggcatcgctgaccagcgatcccctggcccgactgcagatgttcaacgtgactccgcaccatcaccagcactctcacattcactcccacctccacctccaccagcaggaccccctccaccaaggttcagcaggccccgttcacccgctggtcgaccccctgactgccggtccccacctggctcgcttcccctacccgcctggcactctccccaaccctctgcttggacagcccccacacgagcacgagatgcttcgccacccagttttcggcaccccctacccccgtgacctgcctggggccatcccaccccccatgtcagcagcccaccagctgcaggccatgcatgcccagtcggccgagctgcagagactggccatggagcagcagtggctgcatggacacccccacatgcatggtggccacctaccaagtcaggaagattattacagtcgactgaagaaagaaggtgacaagcagttataagttatttatttgttaacgctggctgtggaaaccccagttcttggggggagaaacaggactttttacataaaataggagctgcaaaagcaaaaagaatatcttctaaagatttctttatatatttaaaaacccacaactaaaaatgtatccacatagtagtgttcgtttgtcgagaggatttcctgagactggtttggatctccctgcatgacagtcccccagaaacttagtgagtcctggactggactgaacatccagaaagcttccctgcaatcttggggtttggctttagttttcttttccttgatttctcagtaggtgctagaatccagttcacacccttcactgtgcgtgcagacacactgacacactccgccacgagtgctccagagcccacgaggcttgcagatcgggggcataggaatttggaatccaagagctataatttttaaaaaaaaaaatcttttattttaatacattgtaggaaatcttcataattggagaaagttctgcagcatggctttttacgtctgtaaataaataattttagaacagcctttttttcttccataaactactattgtgatctattttttccagccatgtcactaattgtgaattcctaccaactattgacagaatacagagttgattttttaataaaaagttatatataattatccctttaattaaagggagcaaaggggcgttccacatggacagaggcttggaccgaggcctggtcacagcagcgagcatccagggtttgcagggacgatgttacagactctgttttctgcctggcgtttcacttgtgtctgctcctagcctgtgctctgccagcagcacagacatctgctccatcagacctcttccattttgcacagggagtgcaggaggtgaatgttcactttctgttctccagtgtcactgttctgtttccacgggatggaaagcgcatgggcctgtgtccattgtagatttccttctagatttctgtgtacacacacttgattgttctggatgaatgtcttttttaatactccgaaaatttcatcatctaagaaaatgattccatacaaataactcagcacacaagtgacccaggacatatgcctgccaaagggatgtgttagaaggctgccttctcatgcgcattgtcacttggatcttgtggtgaggacggccccatctttcttgccacagattgaggccacttttgagcaagggagatcctggagttaagacaggtgttgggggcagcctgtattttaccctaggggcaggtctgcatggtgaccccacattgcactggtaaaccatttgagtcccactcttcatcctggaagtgggaactggagtcccacccacagtgcattcagaaagcatgctgtgtgggggctgcttctcaggaggccaggcccttctgagcggaaccgtcctggagagagcctgccctcgtttccaggctgcagccgtaacgcactttctcccaggctgagggcgggtgttctggggtgtctgccctctgtcggccctgcttcctgccaggacgtggcctcttccgatccttttctctcagacactggaggtctcttctgccattgtgctggtcccatcccaagaattgtaggacagagaccacactgggtcggcggacacaaagtccatccaggacccaggccgcagagggagcaggaagagatgctgatagtttgatctagaaaccagcagctactggctcaaattcaggttctggcgtcaaatagcgacatttccagtttctcttaaaaaccgtgtttggtttcagttgggataggcttgttttgtctgttgaaaatgtttctagttttttttctttcatttttctctcattccatttctgccttaactttagtttgttcacagggaggcaaagctgacatgaaccttttgtcgtgggacttcaggccacattggcttgaaggcattcgtttccttctggggtggggacaggccctcatggcaggcttgttcccgtggctctgagcgaggcctcttcctgctgggctcccagactcctgcatccaggcccccaccttctcggcttctggtttttctttctttttggtagaacacaacatctaccattcagttaaaccttctttatctcctcctctggcatccatttttccaaagaagagtcgagtcctctgaggtctgtgcttgaaagccgtccgaaggcattcttgttagctttgcttttctccccatatcccaaggcgaagcgctgagattcttccatctaaaaaaccctcgacccgaaaccctcaccagataaactacagtttgtttaggaggccctgaccttcatggtgtctttgaagcccaaccactcggtttccttcggattttcctccctttgttcggggtttggtttggctcctctgtgtgtgtccgtatcttgttcggtgtcctcgaggttgagcttcactccactgcggcagaggcagcgtgcacactcggatttgctacgtttctatatatcttgaagctaaatgtatatatgagtagtttgccatgagataacacagtgtaaacagtagacacccagaaatcgtgacttctgtgttctctccatttgagtattttgtaatttttttgaaatatttgtggacataaataaaaccaagctacactaca

SEQ ID NO: 65422 - DNA, 7692 bp, Homo sapiens
  misc_feature (4254)..(4254): n is a, c, g, or t
  misc_feature (4260)..(4260): n is a, c, g, or t
cggccgctcaggcctccttttgttttagcaagtgcacttcactccccgggcccccacctgcccgcctgcgccgcccctttccgcgggtccggagttggcggggccctgcgccggaggaggaggaccaggcccgcgggctcagctctcgccgccagcgggccgcagcatttttgaaacgttggggttgttggagtggttggattttccctggaattgagtgagaaattcagaagactgaagcccaggcttactgtctacctttcacggaggcctagccgtgagaggacagaagaaggcacgtggcgaatcatgacagcggacaaagacaaagacaaagacaaagagaaggaccgggaccgagaccgggaccgagagagagagaaaagagacaaagcaagagagagtgagaattcaaggccacgccggagctgtaccttggaaggaggagccaaaaattatgctgagagtgatcacagtgaagacgaggacaatgacaacaatagtgccaccgcagaggagtccacgaagaagaataagaagaaaccaccgaaaaaaaagtctcgttatgaaaggacagataccggtgagataacatcctacatcactgaagatgatgtggtctacagaccaggagactgtgtgtatatcgagagtcggaggccaaacacaccgtatttcatctgtagcattcaagacttcaaactggtccacaactcccaggcctgttgcagatctccaactcctgctttgtgtgaccccccagcatgctctctgccggtggcatcacagccaccacagcatctttctgaagccgggagagggcctgtagggagtaagagggaccatctcctcatgaacgtcaaatggtactaccgtcaatctgaggttccagattctgtgtatcagcatttggttcaggatcgacataatgaaaatgactctggaagagaacttgtcattacagacccagttatcaagaaccgagagctcttcatttctgattacgttgacacttaccatgctgctgcccttagagggaagtgtaacatctcccatttttctgacatatttgctgctagagagtttaaagcccgagtggattcatttttctacatattaggatataaccctgagacaaggaggctgaacagtacccagggggagattcgtgtcggtcctagtcatcaggccaaacttccagatctgcaaccatttccttctccagatggtgatacagtgacccaacatgaggaactggtctggatgcctggagttaacgactgtgacctccttatgtacttgagggcagcaaggagcatggcggcatttgcaggaatgtgtgatggaggctctacagaggacggctgtgtcgcagcctctcgggatgacaccactctgaatgcactgaacacactgcatgaaagcggttacgatgctggcaaagccctgcagcgcctggtgaagaagcctgtgcccaagctcatcgagaagtgctggaccgaggacgaagtgaaacgcttcgttaagggactcaggcagtacgggaagaacttcttcagaattagaaaggagctgcttcccaataaggaaacaggggagctgatcaccttctattactattggaagaagacccccgaagcagccagctcccgagcccatcgtaggcaccgcaggcaggccgtgttcaggaggattaagactcgcaccgcgtccacacccgtcaacacaccctccagacccccgtccagtgaattcttggacctaagttcagccagtgaagatgacttcgacagtgaggacagtgagcaggagctgaaggggtacgcctgccgccactgcttcaccaccacctccaaagattggcaccacggaggccgggagaacatcctgctttgcaccgactgtcgcatccacttcaagaaatacggtgagctcccgcccattgagaagcccgtggacccgccaccgtttatgttcaaacccgtcaaggaagaggatgatgggctcagtgggaagcatagcatgaggacacggcggagtcggggctcgatgtcgacactacgcagtggtcggaagaagcagccagccagccctgatggtcgcacctcacccatcaatgaagacatccgctccagcggccggaactcccccagcgctgccagtacctccagcaatgacagtaaagcagagacagtgaagaagtcggccaagaaggtgaaggaggaagcctcttcccctcttaagagtaacaaacgccagcgggagaaggtggcctctgatacggaggaggctgacaggaccagctccaagaagacaaaaacgcaggagatcagcaggcccaactcgccatctgaaggtgagggagagagttcagacagtcgcagcgtcaacgatgagggtagcagtgaccccaaagacatcgaccaggacaatcgcagcacgtccccgagcatccccagcccccaggacaatgagagtgactcggactcgtcagcccagcagcagatgctgcaggcccagcccccagccttgcaggctcccactggggtcaccccagctccctcctcagctcctccagggacccctcagctgcccacgccagggcccacgccctctgccactgcagttcccccacagggctcccccacggcctcccaggcccctaaccagccgcaggctcccacagcgcctgttccccacacccacatccaacaggcaccggccttgcacccccagcggccgccctcaccgcatcccccgccgcatccctcgccacatcccccactgcagcctctgactgggtcggcgggccagccttctgcaccctctcatgcccagcccccactgcacggtcagggcccacccggccctcacagcctgcaggctgggcccctgctgcagcacccaggccccccacagccctttggcctccctccccaggcctcccaaggccaggcccctctggggacctccccagcagcagcgtaccctcacacctccctgcagctgccagcctctcagtcagcgctgcagtcccaacagcctccacgggagcagcccctgccaccagcgcccttggccatgccccacatcaagcccccgcctaccactcccatcccccagctgccggcgccacaggcccacaagcaccctccccacctctcggggccctcacccttctccatgaatgccaacctgcctccccctccagccctgaagcccctgagctccctgtccacacatcaccccccgtcggctcaccccccacccctgcaactcatgcctcagagccagccattgccctcctcgcccgcccagccccccgggctgacccagagccagaacctgcccccgccccctgcctcccacccccctacaggcctccaccaggtggccccccaacccccgtttgctcagcacccctttgtccctggaggccctcctcccatcacccctccgacctgcccctccacctctaccccaccggcgggacctggcacctcggcccagccaccctgctctggtgcggcggcttcaggaggcagcatagcgggggggtcgtcctgcccactccccaccgtccagatcaaggaggaggctctggacgacgctgaggagcctgagagcccccctcccccaccaaggagcccgtccccggagcccactgtggtggacacccccagtcacgccagccagtcagctaggttctacaaacacctggaccggggctacaactcgtgtgcccggacagacctgtacttcatgcctctggccgggtccaagctggccaagaagagggaggaggccattgagaaggccaagcgcgaggctgagcagaaagcccgagaggagcgagagcgggagaaggagaaggagaaggagcgggagcgggagcgagagcgggagcgcgaggcagagcgggcggctaaggcgtccagctcagcgcatgaaggtcgcctcagtgacccacagctcagtggtcctggccacatgcggccatccttcgagccaccaccaaccaccattgctgctgtgcccccctacatcgggcccgacacacctgcccttcggactctgagcgagtacgcccggccccacgtcatgtcgcccaccaaccgcaaccaccccttctacatgccccttaaccccacggaccccctgctggcctaccacatgcctggcctctacaacgtcgaccccaccatccgcgagcgggagctccgggagcgggagatccgagagcgggagatccgngagcgngagctgcgggagaggatgaagccgggcttcgaggtgaagcccccagagctggaccccctgcacccagccgccaaccccatggagcactttgcccggcacagcgccctcaccatccccccgaccgccgggccccacccttttgcttctttccacccgggcctgaaccccttggagagggagagactggccctggcgggcccccagctgcggcccgagatgagctaccctgacagactggcagccgagcgtatccacgcagagcgcatggcatcgctgaccagcgatcccctggcccgactgcagatgttcaacgtgactccgcaccatcaccagcactctcacattcactcccacctccacctccaccagcaggaccccctccaccaaggttcagcaggccccgttcacccgctggtcgaccccctgactgccggtccccacctggctcgcttcccctacccgcctggcactctccccaaccctctgcttggacagcccccacacgagcacgagatgcttcgccacccagttttcggcaccccctacccccgtgacctgcctggggccatcccaccccccatgtcagcagcccaccagctgcaggccatgcatgcccagtcggccgagctgcagagactggccatggagcagcagtggctgcatggacacccccacatgcatggtggccacctaccaagtcaggaagattattacagtcgactgaagaaagaaggtgacaagcagttataagttatttatttgttaacgctggctgtggaaaccccagttcttggggggagaaacaggactttttacataaaataggagctgcaaaagcaaaaagaatatcttctaaagatttctttatatatttaaaaacccacaactaaaaatgtatccacatagtagtgttcgtttgtcgagaggatttcctgagactggtttggatctccctgcatgacagtcccccagaaacttagtgagtcctggactggactgaacatccagaaagcttccctgcaatcttggggtttggctttagttttcttttccttgatttctcagtaggtgctagaatccagttcacacccttcactgtgcgtgcagacacactgacacactccgccacgagtgctccagagcccacgaggcttgcagatcgggggcataggaatttggaatccaagagctataatttttaaaaaaaaaaatcttttattttaatacattgtaggaaatcttcataattggagaaagttctgcagcatggctttttacgtctgtaaataaataattttagaacagcctttttttcttccataaactactattgtgatctattttttccagccatgtcactaattgtgaattcctaccaactattgacagaatacagagttgattttttaataaaaagttatatataattatccctttaattaaagggagcaaaggggcgttccacatggacagaggcttggaccgaggcctggtcacagcagcgagcatccagggtttgcagggacgatgttacagactctgttttctgcctggcgtttcacttgtgtctgctcctagcctgtgctctgccagcagcacagacatctgctccatcagacctcttccattttgcacagggagtgcaggaggtgaatgttcactttctgttctccagtgtcactgttctgtttccacgggatggaaagcgcatgggcctgtgtccattgtagatttccttctagatttctgtgtacacacacttgattgttctggatgaatgtcttttttaatactccgaaaatttcatcatctaagaaaatgattccatacaaataactcagcacacaagtgacccaggacatatgcctgccaaagggatgtgttagaaggctgccttctcatgcgcattgtcacttggatcttgtggtgaggacggccccatctttcttgccacagattgaggccacttttgagcaagggagatcctggagttaagacaggtgttgggggcagcctgtattttaccctaggggcaggtctgcatggtgaccccacattgcactggtaaaccatttgagtcccactcttcatcctggaagtgggaactggagtcccacccacagtgcattcagaaagcatgctgtgtgggggctgcttctcaggaggccaggcccttctgagcggaaccgtcctggagagagcctgccctcgtttccaggctgcagccgtaacgcactttctcccaggctgagggcgggtgttctggggtgtctgccctctgtcggccctgcttcctgccaggacgtggcctcttccgatccttttctctcagacactggaggtctcttctgccattgtgctggtcccatcccaagaattgtaggacagagaccacactgggtcggcggacacaaagtccatccaggacccaggccgcagagggagcaggaagagatgctgatagtttgatctagaaaccagcagctactggctcaaattcaggttctggcgtcaaatagcgacatttccagtttctcttaaaaaccgtgtttggtttcagttgggataggcttgttttgtctgttgaaaatgtttctagttttttttctttcatttttctctcattccatttctgccttaactttagtttgttcacagggaggcaaagctgacatgaaccttttgtcgtgggacttcaggccacattggcttgaaggcattcgtttccttctggggtggggacaggccctcatggcaggcttgttcccgtggctctgagcgaggcctcttcctgctgggctcccagactcctgcatccaggcccccaccttctcggcttctggtttttctttctttttggtagaacacaacatctaccattcagttaaaccttctttatctcctcctctggcatccatttttccaaagaagagtcgagtcctctgaggtctgtgcttgaaagccgtccgaaggcattcttgttagctttgcttttctccccatatcccaaggcgaagcgctgagattcttccatctaaaaaaccctcgacccgaaaccctcaccagataaactacagtttgtttaggaggccctgaccttcatggtgtctttgaagcccaaccactcggtttccttcggattttcctccctttgttcggggtttggtttggctcctctgtgtgtgtccgtatcttgttcggtgtcctcgaggttgagcttcactccactgcggcagaggcagcgtgcacactcggatttgctacgtttctatatatcttgaagctaaatgtatatatgagtagtttgccatgagataacacagtgtaaacagtagacacccagaaatcgtgacttctgtgttctctccatttgagtattttgtaatttttttgaaatatttgtggacataaataaaaccaagctacactaca

SEQ ID NO: 65423 - DNA, 6917 bp, Homo sapiens
  misc_feature (3479)..(3479): n is a, c, g, or t
  misc_feature (3485)..(3485): n is a, c, g, or t
gattgattgcgtcgtggagagacagtgtgtggatgagggagggtcacagcacatgctcagtcctgtcagagtgaggggaagtttctgcgttctgcgtgaaggcttaggtcatagcacaagctcagtgaaagctctatgaggtctctgagactgcatgtgcctccattttgagttgttagtgtagaaaagggcagagttttagcagaaagtaaaggttcaggaatccagctagactcaccagagcccgtgttagtcatggatgatccattcagcccctgcagtctagagggcaagacagccattcaaagaaataactacaaaaaataaatataaaatcctgactgtgatatgggtggaaggagaggaggctgaacagtacccagggggagattcgtgtcggtcctagtcatcaggccaaacttccagatctgcaaccatttccttctccagatggtgatacagtgacccaacatgaggaactggtctggatgcctggagttaacgactgtgacctccttatgtacttgagggcagcaaggagcatggcggcatttgcaggaatgtgtgatggaggctctacagaggacggctgtgtcgcagcctctcgggatgacaccactctgaatgcactgaacacactgcatgaaagcggttacgatgctggcaaagccctgcagcgcctggtgaagaagcctgtgcccaagctcatcgagaagtgctggaccgaggacgaagtgaaacgcttcgttaagggactcaggcagtacgggaagaacttcttcagaattagaaaggagctgcttcccaataaggaaacaggggagctgatcaccttctattactattggaagaagacccccgaagcagccagctcccgagcccatcgtaggcaccgcaggcaggccgtgttcaggaggattaagactcgcaccgcgtccacacccgtcaacacaccctccagacccccgtccagtgaattcttggacctaagttcagccagtgaagatgacttcgacagtgaggacagtgagcaggagctgaaggggtacgcctgccgccactgcttcaccaccacctccaaagattggcaccacggaggccgggagaacatcctgctttgcaccgactgtcgcatccacttcaagaaatacggtgagctcccgcccattgagaagcccgtggacccgccaccgtttatgttcaaacccgtcaaggaagaggatgatgggctcagtgggaagcatagcatgaggacacggcggagtcggggctcgatgtcgacactacgcagtggtcggaagaagcagccagccagccctgatggtcgcacctcacccatcaatgaagacatccgctccagcggccggaactcccccagcgctgccagtacctccagcaatgacagtaaagcagagacagtgaagaagtcggccaagaaggtgaaggaggaagcctcttcccctcttaagagtaacaaacgccagcgggagaaggtggcctctgatacggaggaggctgacaggaccagctccaagaagacaaaaacgcaggagatcagcaggcccaactcgccatctgaaggtgagggagagagttcagacagtcgcagcgtcaacgatgagggtagcagtgaccccaaagacatcgaccaggacaatcgcagcacgtccccgagcatccccagcccccaggacaatgagagtgactcggactcgtcagcccagcagcagatgctgcaggcccagcccccagccttgcaggctcccactggggtcaccccagctccctcctcagctcctccagggacccctcagctgcccacgccagggcccacgccctctgccactgcagttcccccacagggctcccccacggcctcccaggcccctaaccagccgcaggctcccacagcgcctgttccccacacccacatccaacaggcaccggccttgcacccccagcggccgccctcaccgcatcccccgccgcatccctcgccacatcccccactgcagcctctgactgggtcggcgggccagccttctgcaccctctcatgcccagcccccactgcacggtcagggcccacccggccctcacagcctgcaggctgggcccctgctgcagcacccaggccccccacagccctttggcctccctccccaggcctcccaaggccaggcccctctggggacctccccagcagcagcgtaccctcacacctccctgcagctgccagcctctcagtcagcgctgcagtcccaacagcctccacgggagcagcccctgccaccagcgcccttggccatgccccacatcaagcccccgcctaccactcccatcccccagctgccggcgccacaggcccacaagcaccctccccacctctcggggccctcacccttctccatgaatgccaacctgcctccccctccagccctgaagcccctgagctccctgtccacacatcaccccccgtcggctcaccccccacccctgcaactcatgcctcagagccagccattgccctcctcgcccgcccagccccccgggctgacccagagccagaacctgcccccgccccctgcctcccacccccctacaggcctccaccaggtggccccccaacccccgtttgctcagcacccctttgtccctggaggccctcctcccatcacccctccgacctgcccctccacctctaccccaccggcgggacctggcacctcggcccagccaccctgctctggtgcggcggcttcaggaggcagcatagcgggggggtcgtcctgcccactccccaccgtccagatcaaggaggaggctctggacgacgctgaggagcctgagagcccccctcccccaccaaggagcccgtccccggagcccactgtggtggacacccccagtcacgccagccagtcagctaggttctacaaacacctggaccggggctacaactcgtgtgcccggacagacctgtacttcatgcctctggccgggtccaagctggccaagaagagggaggaggccattgagaaggccaagcgcgaggctgagcagaaagcccgagaggagcgagagcgggagaaggagaaggagaaggagcgggagcgggagcgagagcgggagcgcgaggcagagcgggcggctaaggcgtccagctcagcgcatgaaggtcgcctcagtgacccacagctcagtggtcctggccacatgcggccatccttcgagccaccaccaaccaccattgctgctgtgcccccctacatcgggcccgacacacctgcccttcggactctgagcgagtacgcccggccccacgtcatgtcgcccaccaaccgcaaccaccccttctacatgccccttaaccccacggaccccctgctggcctaccacatgcctggcctctacaacgtcgaccccaccatccgcgagcgggagctccgggagcgggagatccgagagcgggagatccgngagcgngagctgcgggagaggatgaagccgggcttcgaggtgaagcccccagagctggaccccctgcacccagccgccaaccccatggagcactttgcccggcacagcgccctcaccatccccccgaccgccgggccccacccttttgcttctttccacccgggcctgaaccccttggagagggagagactggccctggcgggcccccagctgcggcccgagatgagctaccctgacagactggcagccgagcgtatccacgcagagcgcatggcatcgctgaccagcgatcccctggcccgactgcagatgttcaacgtgactccgcaccatcaccagcactctcacattcactcccacctccacctccaccagcaggaccccctccaccaaggttcagcaggccccgttcacccgctggtcgaccccctgactgccggtccccacctggctcgcttcccctacccgcctggcactctccccaaccctctgcttggacagcccccacacgagcacgagatgcttcgccacccagttttcggcaccccctacccccgtgacctgcctggggccatcccaccccccatgtcagcagcccaccagctgcaggccatgcatgcccagtcggccgagctgcagagactggccatggagcagcagtggctgcatggacacccccacatgcatggtggccacctaccaagtcaggaagattattacagtcgactgaagaaagaaggtgacaagcagttataagttatttatttgttaacgctggctgtggaaaccccagttcttggggggagaaacaggactttttacataaaataggagctgcaaaagcaaaaagaatatcttctaaagatttctttatatatttaaaaacccacaactaaaaatgtatccacatagtagtgttcgtttgtcgagaggatttcctgagactggtttggatctccctgcatgacagtcccccagaaacttagtgagtcctggactggactgaacatccagaaagcttccctgcaatcttggggtttggctttagttttcttttccttgatttctcagtaggtgctagaatccagttcacacccttcactgtgcgtgcagacacactgacacactccgccacgagtgctccagagcccacgaggcttgcagatcgggggcataggaatttggaatccaagagctataatttttaaaaaaaaaaatcttttattttaatacattgtaggaaatcttcataattggagaaagttctgcagcatggctttttacgtctgtaaataaataattttagaacagcctttttttcttccataaactactattgtgatctattttttccagccatgtcactaattgtgaattcctaccaactattgacagaatacagagttgattttttaataaaaagttatatataattatccctttaattaaagggagcaaaggggcgttccacatggacagaggcttggaccgaggcctggtcacagcagcgagcatccagggtttgcagggacgatgttacagactctgttttctgcctggcgtttcacttgtgtctgctcctagcctgtgctctgccagcagcacagacatctgctccatcagacctcttccattttgcacagggagtgcaggaggtgaatgttcactttctgttctccagtgtcactgttctgtttccacgggatggaaagcgcatgggcctgtgtccattgtagatttccttctagatttctgtgtacacacacttgattgttctggatgaatgtcttttttaatactccgaaaatttcatcatctaagaaaatgattccatacaaataactcagcacacaagtgacccaggacatatgcctgccaaagggatgtgttagaaggctgccttctcatgcgcattgtcacttggatcttgtggtgaggacggccccatctttcttgccacagattgaggccacttttgagcaagggagatcctggagttaagacaggtgttgggggcagcctgtattttaccctaggggcaggtctgcatggtgaccccacattgcactggtaaaccatttgagtcccactcttcatcctggaagtgggaactggagtcccacccacagtgcattcagaaagcatgctgtgtgggggctgcttctcaggaggccaggcccttctgagcggaaccgtcctggagagagcctgccctcgtttccaggctgcagccgtaacgcactttctcccaggctgagggcgggtgttctggggtgtctgccctctgtcggccctgcttcctgccaggacgtggcctcttccgatccttttctctcagacactggaggtctcttctgccattgtgctggtcccatcccaagaattgtaggacagagaccacactgggtcggcggacacaaagtccatccaggacccaggccgcagagggagcaggaagagatgctgatagtttgatctagaaaccagcagctactggctcaaattcaggttctggcgtcaaatagcgacatttccagtttctcttaaaaaccgtgtttggtttcagttgggataggcttgttttgtctgttgaaaatgtttctagttttttttctttcatttttctctcattccatttctgccttaactttagtttgttcacagggaggcaaagctgacatgaaccttttgtcgtgggacttcaggccacattggcttgaaggcattcgtttccttctggggtggggacaggccctcatggcaggcttgttcccgtggctctgagcgaggcctcttcctgctgggctcccagactcctgcatccaggcccccaccttctcggcttctggtttttctttctttttggtagaacacaacatctaccattcagttaaaccttctttatctcctcctctggcatccatttttccaaagaagagtcgagtcctctgaggtctgtgcttgaaagccgtccgaaggcattcttgttagctttgcttttctccccatatcccaaggcgaagcgctgagattcttccatctaaaaaaccctcgacccgaaaccctcaccagataaactacagtttgtttaggaggccctgaccttcatggtgtctttgaagcccaaccactcggtttccttcggattttcctccctttgttcggggtttggtttggctcctctgtgtgtgtccgtatcttgttcggtgtcctcgaggttgagcttcactccactgcggcagaggcagcgtgcacactcggatttgctacgtttctatatatcttgaagctaaatgtatatatgagtagtttgccatgagataacacagtgtaaacagtagacacccagaaatcgtgacttctgtgttctctccatttgagtattttgtaatttttttgaaatatttgtggacataaataaaaccaagctacactaca

SEQ ID NO: 65424 - DNA, 6369 bp, Homo sapiens
  misc_feature (2931)..(2931): n is a, c, g, or t
  misc_feature (2937)..(2937): n is a, c, g, or t
caggcccgctggctttcgtgttcccggtgggcttctgtgatactggtgccttccggtgcctcctggcaaattctttggattaaggaaagcggccttttaaccccctagggttcccttctggagaagagtcaccgggtttggttctgtttcccctttctgctcgacacttctgggaagcttggttctcagaaacgcttcgttaagggactcaggcagtacgggaagaacttcttcagaattagaaaggagctgcttcccaataaggaaacaggggagctgatcaccttctattactattggaagaagacccccgaagcagccagctcccgagcccatcgtaggcaccgcaggcaggccgtgttcaggaggattaagactcgcaccgcgtccacacccgtcaacacaccctccagacccccgtccagtgaattcttggacctaagttcagccagtgaagatgacttcgacagtgaggacagtgagcaggagctgaaggggtacgcctgccgccactgcttcaccaccacctccaaagattggcaccacggaggccgggagaacatcctgctttgcaccgactgtcgcatccacttcaagaaatacggtgagctcccgcccattgagaagcccgtggacccgccaccgtttatgttcaaacccgtcaaggaagaggatgatgggctcagtgggaagcatagcatgaggacacggcggagtcggggctcgatgtcgacactacgcagtggtcggaagaagcagccagccagccctgatggtcgcacctcacccatcaatgaagacatccgctccagcggccggaactcccccagcgctgccagtacctccagcaatgacagtaaagcagagacagtgaagaagtcggccaagaaggtgaaggaggaagcctcttcccctcttaagagtaacaaacgccagcgggagaaggtggcctctgatacggaggaggctgacaggaccagctccaagaagacaaaaacgcaggagatcagcaggcccaactcgccatctgaaggtgagggagagagttcagacagtcgcagcgtcaacgatgagggtagcagtgaccccaaagacatcgaccaggacaatcgcagcacgtccccgagcatccccagcccccaggacaatgagagtgactcggactcgtcagcccagcagcagatgctgcaggcccagcccccagccttgcaggctcccactggggtcaccccagctccctcctcagctcctccagggacccctcagctgcccacgccagggcccacgccctctgccactgcagttcccccacagggctcccccacggcctcccaggcccctaaccagccgcaggctcccacagcgcctgttccccacacccacatccaacaggcaccggccttgcacccccagcggccgccctcaccgcatcccccgccgcatccctcgccacatcccccactgcagcctctgactgggtcggcgggccagccttctgcaccctctcatgcccagcccccactgcacggtcagggcccacccggccctcacagcctgcaggctgggcccctgctgcagcacccaggccccccacagccctttggcctccctccccaggcctcccaaggccaggcccctctggggacctccccagcagcagcgtaccctcacacctccctgcagctgccagcctctcagtcagcgctgcagtcccaacagcctccacgggagcagcccctgccaccagcgcccttggccatgccccacatcaagcccccgcctaccactcccatcccccagctgccggcgccacaggcccacaagcaccctccccacctctcggggccctcacccttctccatgaatgccaacctgcctccccctccagccctgaagcccctgagctccctgtccacacatcaccccccgtcggctcaccccccacccctgcaactcatgcctcagagccagccattgccctcctcgcccgcccagccccccgggctgacccagagccagaacctgcccccgccccctgcctcccacccccctacaggcctccaccaggtggccccccaacccccgtttgctcagcacccctttgtccctggaggccctcctcccatcacccctccgacctgcccctccacctctaccccaccggcgggacctggcacctcggcccagccaccctgctctggtgcggcggcttcaggaggcagcatagcgggggggtcgtcctgcccactccccaccgtccagatcaaggaggaggctctggacgacgctgaggagcctgagagcccccctcccccaccaaggagcccgtccccggagcccactgtggtggacacccccagtcacgccagccagtcagctaggttctacaaacacctggaccggggctacaactcgtgtgcccggacagacctgtacttcatgcctctggccgggtccaagctggccaagaagagggaggaggccattgagaaggccaagcgcgaggctgagcagaaagcccgagaggagcgagagcgggagaaggagaaggagaaggagcgggagcgggagcgagagcgggagcgcgaggcagagcgggcggctaaggcgtccagctcagcgcatgaaggtcgcctcagtgacccacagctcagtggtcctggccacatgcggccatccttcgagccaccaccaaccaccattgctgctgtgcccccctacatcgggcccgacacacctgcccttcggactctgagcgagtacgcccggccccacgtcatgtcgcccaccaaccgcaaccaccccttctacatgccccttaaccccacggaccccctgctggcctaccacatgcctggcctctacaacgtcgaccccaccatccgcgagcgggagctccgggagcgggagatccgagagcgggagatccgngagcgngagctgcgggagaggatgaagccgggcttcgaggtgaagcccccagagctggaccccctgcacccagccgccaaccccatggagcactttgcccggcacagcgccctcaccatccccccgaccgccgggccccacccttttgcttctttccacccgggcctgaaccccttggagagggagagactggccctggcgggcccccagctgcggcccgagatgagctaccctgacagactggcagccgagcgtatccacgcagagcgcatggcatcgctgaccagcgatcccctggcccgactgcagatgttcaacgtgactccgcaccatcaccagcactctcacattcactcccacctccacctccaccagcaggaccccctccaccaaggttcagcaggccccgttcacccgctggtcgaccccctgactgccggtccccacctggctcgcttcccctacccgcctggcactctccccaaccctctgcttggacagcccccacacgagcacgagatgcttcgccacccagttttcggcaccccctacccccgtgacctgcctggggccatcccaccccccatgtcagcagcccaccagctgcaggccatgcatgcccagtcggccgagctgcagagactggccatggagcagcagtggctgcatggacacccccacatgcatggtggccacctaccaagtcaggaagattattacagtcgactgaagaaagaaggtgacaagcagttataagttatttatttgttaacgctggctgtggaaaccccagttcttggggggagaaacaggactttttacataaaataggagctgcaaaagcaaaaagaatatcttctaaagatttctttatatatttaaaaacccacaactaaaaatgtatccacatagtagtgttcgtttgtcgagaggatttcctgagactggtttggatctccctgcatgacagtcccccagaaacttagtgagtcctggactggactgaacatccagaaagcttccctgcaatcttggggtttggctttagttttcttttccttgatttctcagtaggtgctagaatccagttcacacccttcactgtgcgtgcagacacactgacacactccgccacgagtgctccagagcccacgaggcttgcagatcgggggcataggaatttggaatccaagagctataatttttaaaaaaaaaaatcttttattttaatacattgtaggaaatcttcataattggagaaagttctgcagcatggctttttacgtctgtaaataaataattttagaacagcctttttttcttccataaactactattgtgatctattttttccagccatgtcactaattgtgaattcctaccaactattgacagaatacagagttgattttttaataaaaagttatatataattatccctttaattaaagggagcaaaggggcgttccacatggacagaggcttggaccgaggcctggtcacagcagcgagcatccagggtttgcagggacgatgttacagactctgttttctgcctggcgtttcacttgtgtctgctcctagcctgtgctctgccagcagcacagacatctgctccatcagacctcttccattttgcacagggagtgcaggaggtgaatgttcactttctgttctccagtgtcactgttctgtttccacgggatggaaagcgcatgggcctgtgtccattgtagatttccttctagatttctgtgtacacacacttgattgttctggatgaatgtcttttttaatactccgaaaatttcatcatctaagaaaatgattccatacaaataactcagcacacaagtgacccaggacatatgcctgccaaagggatgtgttagaaggctgccttctcatgcgcattgtcacttggatcttgtggtgaggacggccccatctttcttgccacagattgaggccacttttgagcaagggagatcctggagttaagacaggtgttgggggcagcctgtattttaccctaggggcaggtctgcatggtgaccccacattgcactggtaaaccatttgagtcccactcttcatcctggaagtgggaactggagtcccacccacagtgcattcagaaagcatgctgtgtgggggctgcttctcaggaggccaggcccttctgagcggaaccgtcctggagagagcctgccctcgtttccaggctgcagccgtaacgcactttctcccaggctgagggcgggtgttctggggtgtctgccctctgtcggccctgcttcctgccaggacgtggcctcttccgatccttttctctcagacactggaggtctcttctgccattgtgctggtcccatcccaagaattgtaggacagagaccacactgggtcggcggacacaaagtccatccaggacccaggccgcagagggagcaggaagagatgctgatagtttgatctagaaaccagcagctactggctcaaattcaggttctggcgtcaaatagcgacatttccagtttctcttaaaaaccgtgtttggtttcagttgggataggcttgttttgtctgttgaaaatgtttctagttttttttctttcatttttctctcattccatttctgccttaactttagtttgttcacagggaggcaaagctgacatgaaccttttgtcgtgggacttcaggccacattggcttgaaggcattcgtttccttctggggtggggacaggccctcatggcaggcttgttcccgtggctctgagcgaggcctcttcctgctgggctcccagactcctgcatccaggcccccaccttctcggcttctggtttttctttctttttggtagaacacaacatctaccattcagttaaaccttctttatctcctcctctggcatccatttttccaaagaagagtcgagtcctctgaggtctgtgcttgaaagccgtccgaaggcattcttgttagctttgcttttctccccatatcccaaggcgaagcgctgagattcttccatctaaaaaaccctcgacccgaaaccctcaccagataaactacagtttgtttaggaggccctgaccttcatggtgtctttgaagcccaaccactcggtttccttcggattttcctccctttgttcggggtttggtttggctcctctgtgtgtgtccgtatcttgttcggtgtcctcgaggttgagcttcactccactgcggcagaggcagcgtgcacactcggatttgctacgtttctatatatcttgaagctaaatgtatatatgagtagtttgccatgagataacacagtgtaaacagtagacacccagaaatcgtgacttctgtgttctctccatttgagtattttgtaatttttttgaaatatttgtggacataaataaaaccaagctacactaca

SEQ ID NO: 65425 - DNA, 6513 bp, Homo sapiens
  misc_feature (3075)..(3075): n is a, c, g, or t
  misc_feature (3081)..(3081): n is a, c, g, or t
tctcaaacacagggagtgggagggaccctctgcccggtgggcaggtgatttattggctgggaagcttccgcggtgatttagttgtgaagcggcggccggggaagtgcaggctaatgcctgggccgccagggagaggccgcccacaatcgcgggccggaagggaccgcggggggcgtcggggccagccccccgtttcgcagctgaggcggggttggggcggagggcgtgcggccggggcgcagccgacttcgtccatccggaacgtgggctggagacccagcagcctgggaagggccccagccctgtgggcgccctctccccacgcttgctgcgaaacgcttcgttaagggactcaggcagtacgggaagaacttcttcagaattagaaaggagctgcttcccaataaggaaacaggggagctgatcaccttctattactattggaagaagacccccgaagcagccagctcccgagcccatcgtaggcaccgcaggcaggccgtgttcaggaggattaagactcgcaccgcgtccacacccgtcaacacaccctccagacccccgtccagtgaattcttggacctaagttcagccagtgaagatgacttcgacagtgaggacagtgagcaggagctgaaggggtacgcctgccgccactgcttcaccaccacctccaaagattggcaccacggaggccgggagaacatcctgctttgcaccgactgtcgcatccacttcaagaaatacggtgagctcccgcccattgagaagcccgtggacccgccaccgtttatgttcaaacccgtcaaggaagaggatgatgggctcagtgggaagcatagcatgaggacacggcggagtcggggctcgatgtcgacactacgcagtggtcggaagaagcagccagccagccctgatggtcgcacctcacccatcaatgaagacatccgctccagcggccggaactcccccagcgctgccagtacctccagcaatgacagtaaagcagagacagtgaagaagtcggccaagaaggtgaaggaggaagcctcttcccctcttaagagtaacaaacgccagcgggagaaggtggcctctgatacggaggaggctgacaggaccagctccaagaagacaaaaacgcaggagatcagcaggcccaactcgccatctgaaggtgagggagagagttcagacagtcgcagcgtcaacgatgagggtagcagtgaccccaaagacatcgaccaggacaatcgcagcacgtccccgagcatccccagcccccaggacaatgagagtgactcggactcgtcagcccagcagcagatgctgcaggcccagcccccagccttgcaggctcccactggggtcaccccagctccctcctcagctcctccagggacccctcagctgcccacgccagggcccacgccctctgccactgcagttcccccacagggctcccccacggcctcccaggcccctaaccagccgcaggctcccacagcgcctgttccccacacccacatccaacaggcaccggccttgcacccccagcggccgccctcaccgcatcccccgccgcatccctcgccacatcccccactgcagcctctgactgggtcggcgggccagccttctgcaccctctcatgcccagcccccactgcacggtcagggcccacccggccctcacagcctgcaggctgggcccctgctgcagcacccaggccccccacagccctttggcctccctccccaggcctcccaaggccaggcccctctggggacctccccagcagcagcgtaccctcacacctccctgcagctgccagcctctcagtcagcgctgcagtcccaacagcctccacgggagcagcccctgccaccagcgcccttggccatgccccacatcaagcccccgcctaccactcccatcccccagctgccggcgccacaggcccacaagcaccctccccacctctcggggccctcacccttctccatgaatgccaacctgcctccccctccagccctgaagcccctgagctccctgtccacacatcaccccccgtcggctcaccccccacccctgcaactcatgcctcagagccagccattgccctcctcgcccgcccagccccccgggctgacccagagccagaacctgcccccgccccctgcctcccacccccctacaggcctccaccaggtggccccccaacccccgtttgctcagcacccctttgtccctggaggccctcctcccatcacccctccgacctgcccctccacctctaccccaccggcgggacctggcacctcggcccagccaccctgctctggtgcggcggcttcaggaggcagcatagcgggggggtcgtcctgcccactccccaccgtccagatcaaggaggaggctctggacgacgctgaggagcctgagagcccccctcccccaccaaggagcccgtccccggagcccactgtggtggacacccccagtcacgccagccagtcagctaggttctacaaacacctggaccggggctacaactcgtgtgcccggacagacctgtacttcatgcctctggccgggtccaagctggccaagaagagggaggaggccattgagaaggccaagcgcgaggctgagcagaaagcccgagaggagcgagagcgggagaaggagaaggagaaggagcgggagcgggagcgagagcgggagcgcgaggcagagcgggcggctaaggcgtccagctcagcgcatgaaggtcgcctcagtgacccacagctcagtggtcctggccacatgcggccatccttcgagccaccaccaaccaccattgctgctgtgcccccctacatcgggcccgacacacctgcccttcggactctgagcgagtacgcccggccccacgtcatgtcgcccaccaaccgcaaccaccccttctacatgccccttaaccccacggaccccctgctggcctaccacatgcctggcctctacaacgtcgaccccaccatccgcgagcgggagctccgggagcgggagatccgagagcgggagatccgngagcgngagctgcgggagaggatgaagccgggcttcgaggtgaagcccccagagctggaccccctgcacccagccgccaaccccatggagcactttgcccggcacagcgccctcaccatccccccgaccgccgggccccacccttttgcttctttccacccgggcctgaaccccttggagagggagagactggccctggcgggcccccagctgcggcccgagatgagctaccctgacagactggcagccgagcgtatccacgcagagcgcatggcatcgctgaccagcgatcccctggcccgactgcagatgttcaacgtgactccgcaccatcaccagcactctcacattcactcccacctccacctccaccagcaggaccccctccaccaaggttcagcaggccccgttcacccgctggtcgaccccctgactgccggtccccacctggctcgcttcccctacccgcctggcactctccccaaccctctgcttggacagcccccacacgagcacgagatgcttcgccacccagttttcggcaccccctacccccgtgacctgcctggggccatcccaccccccatgtcagcagcccaccagctgcaggccatgcatgcccagtcggccgagctgcagagactggccatggagcagcagtggctgcatggacacccccacatgcatggtggccacctaccaagtcaggaagattattacagtcgactgaagaaagaaggtgacaagcagttataagttatttatttgttaacgctggctgtggaaaccccagttcttggggggagaaacaggactttttacataaaataggagctgcaaaagcaaaaagaatatcttctaaagatttctttatatatttaaaaacccacaactaaaaatgtatccacatagtagtgttcgtttgtcgagaggatttcctgagactggtttggatctccctgcatgacagtcccccagaaacttagtgagtcctggactggactgaacatccagaaagcttccctgcaatcttggggtttggctttagttttcttttccttgatttctcagtaggtgctagaatccagttcacacccttcactgtgcgtgcagacacactgacacactccgccacgagtgctccagagcccacgaggcttgcagatcgggggcataggaatttggaatccaagagctataatttttaaaaaaaaaaatcttttattttaatacattgtaggaaatcttcataattggagaaagttctgcagcatggctttttacgtctgtaaataaataattttagaacagcctttttttcttccataaactactattgtgatctattttttccagccatgtcactaattgtgaattcctaccaactattgacagaatacagagttgattttttaataaaaagttatatataattatccctttaattaaagggagcaaaggggcgttccacatggacagaggcttggaccgaggcctggtcacagcagcgagcatccagggtttgcagggacgatgttacagactctgttttctgcctggcgtttcacttgtgtctgctcctagcctgtgctctgccagcagcacagacatctgctccatcagacctcttccattttgcacagggagtgcaggaggtgaatgttcactttctgttctccagtgtcactgttctgtttccacgggatggaaagcgcatgggcctgtgtccattgtagatttccttctagatttctgtgtacacacacttgattgttctggatgaatgtcttttttaatactccgaaaatttcatcatctaagaaaatgattccatacaaataactcagcacacaagtgacccaggacatatgcctgccaaagggatgtgttagaaggctgccttctcatgcgcattgtcacttggatcttgtggtgaggacggccccatctttcttgccacagattgaggccacttttgagcaagggagatcctggagttaagacaggtgttgggggcagcctgtattttaccctaggggcaggtctgcatggtgaccccacattgcactggtaaaccatttgagtcccactcttcatcctggaagtgggaactggagtcccacccacagtgcattcagaaagcatgctgtgtgggggctgcttctcaggaggccaggcccttctgagcggaaccgtcctggagagagcctgccctcgtttccaggctgcagccgtaacgcactttctcccaggctgagggcgggtgttctggggtgtctgccctctgtcggccctgcttcctgccaggacgtggcctcttccgatccttttctctcagacactggaggtctcttctgccattgtgctggtcccatcccaagaattgtaggacagagaccacactgggtcggcggacacaaagtccatccaggacccaggccgcagagggagcaggaagagatgctgatagtttgatctagaaaccagcagctactggctcaaattcaggttctggcgtcaaatagcgacatttccagtttctcttaaaaaccgtgtttggtttcagttgggataggcttgttttgtctgttgaaaatgtttctagttttttttctttcatttttctctcattccatttctgccttaactttagtttgttcacagggaggcaaagctgacatgaaccttttgtcgtgggacttcaggccacattggcttgaaggcattcgtttccttctggggtggggacaggccctcatggcaggcttgttcccgtggctctgagcgaggcctcttcctgctgggctcccagactcctgcatccaggcccccaccttctcggcttctggtttttctttctttttggtagaacacaacatctaccattcagttaaaccttctttatctcctcctctggcatccatttttccaaagaagagtcgagtcctctgaggtctgtgcttgaaagccgtccgaaggcattcttgttagctttgcttttctccccatatcccaaggcgaagcgctgagattcttccatctaaaaaaccctcgacccgaaaccctcaccagataaactacagtttgtttaggaggccctgaccttcatggtgtctttgaagcccaaccactcggtttccttcggattttcctccctttgttcggggtttggtttggctcctctgtgtgtgtccgtatcttgttcggtgtcctcgaggttgagcttcactccactgcggcagaggcagcgtgcacactcggatttgctacgtttctatatatcttgaagctaaatgtatatatgagtagtttgccatgagataacacagtgtaaacagtagacacccagaaatcgtgacttctgtgttctctccatttgagtattttgtaatttttttgaaatatttgtggacataaataaaaccaagctacactaca

SEQ ID NO: 65426 - DNA, 6268 bp, Homo sapiens
  misc_feature (2848)..(2848): n is a, c, g, or t
  misc_feature (2854)..(2854): n is a, c, g, or t
gagccggagcccagtgacaggcgacggcctcttgccgccccggaccccgggcgcttacctgtggctgctggggtcggccgcccgggaccaggctgggagccccgagaaacgcttcgttaagggactcaggcagtacgggaagaacttcttcagaattagaaaggagctgcttcccaataaggaaacaggggagctgatcaccttctattactattggaagaagacccccgaagcagccagctcccgagcccatcgtaggcaccgcaggcaggccgtgttcaggaggattaagactcgcaccgcgtccacacccgtcaacacaccctccagacccccgtccagtgaattcttggacctaagttcagccagtgaagatgacttcgacagtgaggacagtgagcaggagctgaaggggtacgcctgccgccactgcttcaccaccacctccaaagattggcaccacggaggccgggagaacatcctgctttgcaccgactgtcgcatccacttcaagaaatacggtgagctcccgcccattgagaagcccgtggacccgccaccgtttatgttcaaacccgtcaaggaagaggatgatgggctcagtgggaagcatagcatgaggacacggcggagtcggggctcgatgtcgacactacgcagtggtcggaagaagcagccagccagccctgatggtcgcacctcacccatcaatgaagacatccgctccagcggccggaactcccccagcgctgccagtacctccagcaatgacagtaaagcagagacagtgaagaagtcggccaagaaggtgaaggaggaagcctcttcccctcttaagagtaacaaacgccagcgggagaaggtggcctctgatacggaggaggctgacaggaccagctccaagaagacaaaaacgcaggagatcagcaggcccaactcgccatctgaaggtgagggagagagttcagacagtcgcagcgtcaacgatgagggtagcagtgaccccaaagacatcgaccaggacaatcgcagcacgtccccgagcatccccagcccccaggacaatgagagtgactcggactcgtcagcccagcagcagatgctgcaggcccagcccccagccttgcaggctcccactggggtcaccccagctccctcctcagctcctccagggacccctcagctgcccacgccagggcccacgccctctgccactgcagttcccccacagggctcccccacggcctcccaggcccctaaccagccgcaggctcccacagcgcctgttccccacacccacatccaacaggcaccggccttgcacccccagcggccgccctcaccgcatcccccgccgcatccctcgccacatcccccactgcagcctctgactgggtcggcgggccagccttctgcaccctctcatgcccagcccccactgcacggtcagggcccacccggccctcacagcctgcaggctgggcccctgctgcagcacccaggccccccacagccctttggcctccctccccaggcctcccaaggccaggcccctctggggacctccccagcagcagcgtaccctcacacctccctgcagctgccagcctctcagtcagcgctgcagtcccaacagcctccacgggagcagcccctgccaccagcgcccttggccatgccccacatcaagcccccgcctaccactcccatcccccagctgccggcgccacaggcccacaagcaccctccccacctctcggggccctcacccttctccatgaatgccaacctgcctccccctccagccctgaagcccctgagctccctgtccacacatcaccccccgtcggctcaccccccacccctgcaactcatgcctcagagccagccattgccctcctcgcccgcccagccccccgggctgacccagagccagaacctgcccccgccccctgcctcccacccccctacaggcctccaccaggtggccccccaacccccgtttgctcagcacccctttgtccctggaggccctcctcccatcacccctccgacctgcccctccacctctaccccaccggcgggacctggcacctcggcccagccaccctgctctggtgcggcggcttcaggaggcagcatagcgggggggtcgtcctgcccactccccaccgtccagatcaaggaggaggctctggacgacgctgaggagcctgagagcccccctcccccaccaaggagcccgtccccggagcccactgtggtggacacccccagtcacgccagccagtcagctaggttctacaaacacctggaccggggctacaactcgtgtgcccggacagacctgtacttcatgcctctggccgggtccaagctggccaagaagagggaggaggccattgagaaggccaagcgcgaggctgagcagaaagcccgagaggagcgagagcgggagaaggagaaggagaaggagcgggagcgggagcgagagcgggagcgcgaggcagagcgggcggctaaggcgtccagctcagcgcatgaaggtcgcctcagtgacccacagctcagtggtcctggccacatgcggccatccttcgagccaccaccaaccaccattgctgctgtgcccccctacatcgggcccgacacacctgcccttcggactctgagcgagtacgcccggccccacgtcatgtcgcccaccaaccgcaaccaccccttctacatgccccttaaccccacggaccccctgctggcctaccacatgcctggcctctacaacgtcgaccccaccatccgcgagcgggagctccgggagcgggagatccgagagcgggagatccgngagcgngagctgcgggagaggatgaagccgggcttcgaggtgaagcccccagagctggaccccctgcacccagccgccaaccccatggagcactttgcccggcacagcgccctcaccatccccccgaccgccgggccccacccttttgcttctttccacccgggcctgaaccccttggagagggagagactggccctggcgggcccccagctgcggcccgagatgagctaccctgacagactggcagccgagcgtatccacgcagagcgcatggcatcgctgaccagcgatcccctggcccgactgcagatgttcaacgtgactccgcaccatcaccagcactctcacattcactcccacctccacctccaccagcaggaccccctccaccaaggttcagcaggccccgttcacccgctggtcgaccccctgactgccggtccccacctggctcgcttcccctacccgcctggcactctccccaaccctctgcttggacagcccccacacgagcacgagatgcttcgccacccagttttcggcaccccctacccccgtgacctgcctggggccatcccaccccccatgtcagcagcccaccagctgcaggccatgcatgcccagtcggccgagctgcagagactggccatggagcagcagtggctgcatggacacccccacatgcatggtggccacctaccaagtcaggaagattattacagtcgactgaagaaagaaggtgacaagcagttataagttatttatttgttaacgctggctgtggaaaccccagttcttggggggagaaacaggactttttacataaaataggagctgcaaaagcaaaaagaatatcttctaaagatttctttatatatttaaaaacccacaactaaaaatgtatccacatagtagtgttcgtttgtcgagaggatttcctgagactggtttggatctccctgcatgacagtcccccagaaacttagtgagtcctggactggactgaacatccagaaagcttccctgcaatcttggggtttggctttagttttcttttccttgatttctcagtaggtgctagaatccagttcacacccttcactgtgcgtgcagacacactgacacactccgccacgagtgctccagagcccacgaggcttgcagatcgggggcataggaatttggaatccaagagctataatttttaaaaaaaaaaatcttttattttaatacattgtaggaaatcttcataattggagaaagttctgcagcatggctttttacgtctgtaaataaataattttagaacagcctttttttcttccataaactactattgtgatctattttttccagccatgtcactaattgtgaattcctaccaactattgacagaatacagagttgattttttaataaaaagttatatataattatccctttaattaaagggagcaaaggggcgttccacatggacagaggcttggaccgaggcctggtcacagcagcgagcatccagggtttgcagggacgatgttacagactctgttttctgcctggcgtttcacttgtgtctgctcctagcctgtgctctgccagcagcacagacatctgctccatcagacctcttccattttgcacagggagtgcaggaggtgaatgttcactttctgttctccagtgtcactgttctgtttccacgggatggaaagcgcatgggcctgtgtccattgtagatttccttctagatttctgtgtacacacacttgattgttctggatgaatgtcttttttaatactccgaaaatttcatcatctaagaaaatgattccatacaaataactcagcacacaagtgacccaggacatatgcctgccaaagggatgtgttagaaggctgccttctcatgcgcattgtcacttggatcttgtggtgaggacggccccatctttcttgccacagattgaggccacttttgagcaagggagatcctggagttaagacaggtgttgggggcagcctgtattttaccctaggggcaggtctgcatggtgaccccacattgcactggtaaaccatttgagtcccactcttcatcctggaagtgggaactggagtcccacccacagtgcattcagaaagcatgctgtgtgggggctgcttctcaggaggccaggcccttctgagcggaaccgtcctggagagagcctgccctcgtttccaggctgcagccgtaacgcactttctcccaggctgagggcgggtgttctggggtgtctgccctctgtcggccctgcttcctgccaggacgtggcctcttccgatccttttctctcagacactggaggtctcttctgccattgtgctggtcccatcccaagaattgtaggacagagaccacactgggtcggcggacacaaagtccatccaggacccaggccgcagagggagcaggaagagatgctgatagtttgatctagaaaccagcagctactggctcaaattcaggttctggcgtcaaatagcgacatttccagtttctcttaaaaaccgtgtttggtttcagttgggataggcttgttttgtctgttgaaaatgtttctagttttttttctttcatttttctctcattccatttctgccttaactttagtttgttcacagggaggcaaagctgacatgaaccttttgtcgtgggacttcaggccacattggcttgaaggcattcgtttccttctggggtggggacaggccctcatggcaggcttgttcccgtggctctgagcgaggcctcttcctgctgggctcccagactcctgcatccaggcccccaccttctcggcttctggtttttctttctttttggtagaacacaacatctaccattcagttaaaccttctttatctcctcctctggcatccatttttccaaagaagagtcgagtcctctgaggtctgtgcttgaaagccgtccgaaggcattcttgttagctttgcttttctccccatatcccaaggcgaagcgctgagattcttccatctaaaaaaccctcgacccgaaaccctcaccagataaactacagtttgtttaggtgtctttgaagcccaaccactcggtttccttcggattttcctccctttgttcggggtttggtttggctcctctgtgtgtgtccgtatcttgttcggtgtcctcgaggttgagcttcactccactgcggcagaggcagcgtgcacactcggatttgctacgtttctatatatcttgaagctaaatgtatatatgagtagtttgccatgagataacacagtgtaaacagtagacacccagaaatcgtgacttctgtgttctctccatttgagtattttgtaatttttttgaaatatttgtggacataaataaaaccaagctacactaca

SEQ ID NO: 65427 - DNA, 6109 bp, Homo sapiens
  misc_feature (2848)..(2848): n is a, c, g, or t
  misc_feature (2854)..(2854): n is a, c, g, or t
gagccggagcccagtgacaggcgacggcctcttgccgccccggaccccgggcgcttacctgtggctgctggggtcggccgcccgggaccaggctgggagccccgagaaacgcttcgttaagggactcaggcagtacgggaagaacttcttcagaattagaaaggagctgcttcccaataaggaaacaggggagctgatcaccttctattactattggaagaagacccccgaagcagccagctcccgagcccatcgtaggcaccgcaggcaggccgtgttcaggaggattaagactcgcaccgcgtccacacccgtcaacacaccctccagacccccgtccagtgaattcttggacctaagttcagccagtgaagatgacttcgacagtgaggacagtgagcaggagctgaaggggtacgcctgccgccactgcttcaccaccacctccaaagattggcaccacggaggccgggagaacatcctgctttgcaccgactgtcgcatccacttcaagaaatacggtgagctcccgcccattgagaagcccgtggacccgccaccgtttatgttcaaacccgtcaaggaagaggatgatgggctcagtgggaagcatagcatgaggacacggcggagtcggggctcgatgtcgacactacgcagtggtcggaagaagcagccagccagccctgatggtcgcacctcacccatcaatgaagacatccgctccagcggccggaactcccccagcgctgccagtacctccagcaatgacagtaaagcagagacagtgaagaagtcggccaagaaggtgaaggaggaagcctcttcccctcttaagagtaacaaacgccagcgggagaaggtggcctctgatacggaggaggctgacaggaccagctccaagaagacaaaaacgcaggagatcagcaggcccaactcgccatctgaaggtgagggagagagttcagacagtcgcagcgtcaacgatgagggtagcagtgaccccaaagacatcgaccaggacaatcgcagcacgtccccgagcatccccagcccccaggacaatgagagtgactcggactcgtcagcccagcagcagatgctgcaggcccagcccccagccttgcaggctcccactggggtcaccccagctccctcctcagctcctccagggacccctcagctgcccacgccagggcccacgccctctgccactgcagttcccccacagggctcccccacggcctcccaggcccctaaccagccgcaggctcccacagcgcctgttccccacacccacatccaacaggcaccggccttgcacccccagcggccgccctcaccgcatcccccgccgcatccctcgccacatcccccactgcagcctctgactgggtcggcgggccagccttctgcaccctctcatgcccagcccccactgcacggtcagggcccacccggccctcacagcctgcaggctgggcccctgctgcagcacccaggccccccacagccctttggcctccctccccaggcctcccaaggccaggcccctctggggacctccccagcagcagcgtaccctcacacctccctgcagctgccagcctctcagtcagcgctgcagtcccaacagcctccacgggagcagcccctgccaccagcgcccttggccatgccccacatcaagcccccgcctaccactcccatcccccagctgccggcgccacaggcccacaagcaccctccccacctctcggggccctcacccttctccatgaatgccaacctgcctccccctccagccctgaagcccctgagctccctgtccacacatcaccccccgtcggctcaccccccacccctgcaactcatgcctcagagccagccattgccctcctcgcccgcccagccccccgggctgacccagagccagaacctgcccccgccccctgcctcccacccccctacaggcctccaccaggtggccccccaacccccgtttgctcagcacccctttgtccctggaggccctcctcccatcacccctccgacctgcccctccacctctaccccaccggcgggacctggcacctcggcccagccaccctgctctggtgcggcggcttcaggaggcagcatagcgggggggtcgtcctgcccactccccaccgtccagatcaaggaggaggctctggacgacgctgaggagcctgagagcccccctcccccaccaaggagcccgtccccggagcccactgtggtggacacccccagtcacgccagccagtcagctaggttctacaaacacctggaccggggctacaactcgtgtgcccggacagacctgtacttcatgcctctggccgggtccaagctggccaagaagagggaggaggccattgagaaggccaagcgcgaggctgagcagaaagcccgagaggagcgagagcgggagaaggagaaggagaaggagcgggagcgggagcgagagcgggagcgcgaggcagagcgggcggctaaggcgtccagctcagcgcatgaaggtcgcctcagtgacccacagctcagtggtcctggccacatgcggccatccttcgagccaccaccaaccaccattgctgctgtgcccccctacatcgggcccgacacacctgcccttcggactctgagcgagtacgcccggccccacgtcatgtcgcccaccaaccgcaaccaccccttctacatgccccttaaccccacggaccccctgctggcctaccacatgcctggcctctacaacgtcgaccccaccatccgcgagcgggagctccgggagcgggagatccgagagcgggagatccgngagcgngagctgcgggagaggatgaagccgggcttcgaggtgaagcccccagagctggaccccctgcacccagccgccaaccccatggagcactttgcccggcacagcgccctcaccatccccccgaccgccgggccccacccttttgcttctttccacccgggcctgaaccccttggagagggagagactggccctggcgggcccccagctgcggcccgagatgagctaccctgacagactggcagccgagcgtatccacgcagagcgcatggcatcgctgaccagcgatcccctggcccgactgcagatgttcaacgtgactccgcaccatcaccagcactctcacattcactcccacctccacctccaccagcaggaccccctccaccaaggttcagcaggccccgttcacccgctggtcgaccccctgactgccggtccccacctggctcgcttcccctacccgcctggcactctccccaaccctctgcttggacagcccccacacgagcacgagatgcttcgccacccagttttcggcaccccctacccccgtgacctgcctggggccatcccaccccccatgtcagcagcccaccagctgcaggccatgcatgcccagtcggccgagctgcagagactggccatggagcagcagtggctgcatggacacccccacatgcatggtggccacctaccaagtcaggaagattattacagtcgactgaagaaagaaggtgacaagcagttataagttatttatttgttaacgctggctgtggaaaccccagttcttggggggagaaacaggactttttacataaaataggagctgcaaaagcaaaaagaatatcttctaaagatttctttatatatttaaaaacccacaactaaaaatgtatccacatagtagtgttcgtttgtcgagaggatttcctgagactggtttggatctccctgcatgacagtcccccagaaacttagtgagtcctggactggactgaacatccagaaagcttccctgcaatcttggggtttggctttagttttcttttccttgatttctcagtaggtgctagaatccagttcacacccttcactgtgcgtgcagacacactgacacactccgccacgagtgctccagagcccacgaggcttgcagatcgggggcataggaatttggaatccaagagctataatttttaaaaaaaaaaatcttttattttaatacattgtaggaaatcttcataattggagaaagttctgcagcatggctttttacgtctgtaaataaataattttagaacagcctttttttcttccataaactactattgtgatctattttttccagccatgtcactaattgtgaattcctaccaactattgacagaatacagagttgattttttaataaaaagttatatataattatccctttaattaaagggagcaaaggggcgttccacatggacagaggcttggaccgaggcctggtcacagcagcgagcatccagggtttgcagggacgatgttacagactctgttttctgcctggcgtttcacttgtgtctgctcctagcctgtgctctgccagcagcacagacatctgctccatcagacctcttccattttgcacagggagtgcaggaggtgaatgttcactttctgttctccagtgtcactgttctgtttccacgggatggaaagcgcatgggcctgtgtccattgtagatttccttctagatttctgtgtacacacacttgattgttctggatgaatgtcttttttaatactccgaaaatttcatcatctaagaaaatgattccatacaaataactcagcacacaagtgacccaggacatatgcctgccaaagggatgtgttagaaggctgccttctcatgcgcattgtcacttggatcttgtggtgaggacggccccatctttcttgccacagattgaggccacttttgagcaagggagatcctggagttaagacaggtgttgggggcagcctgtattttaccctaggggcaggtctgcatggtgaccccacattgcactggtaaaccatttgagtcccactcttcatcctggaagtgggaactggagtcccacccacagtgcattcagaaagcatgctgtgtgggggctgcttctcaggaggccaggcccttctgagcggaaccgtcctggagagagcctgccctcgtttccaggctgcagccgtaacgcactttctcccaggctgagggcgggtgttctggggtgtctgccctctgtcggccctgcttcctgccaggacgtggcctcttccgatccttttctctcagacactggaggtctcttctgccattgtgctggtcccatcccaagaattgtaggacagagaccacactgggtcggcggacacaaagtccatccaggacccaggccgcagagggagcaggaagagatgctgatagtttgatctagaaaccagcagctactggctcaaattcaggttctggcgtcaaatagcgacatttccagtttctcttaaaaaccgtgtttggtttcagttgggataggcttgttttgtctgttgaaaatgtttctagttttttttctttcatttttctctcattccatttctgccttaactttagtttgttcacagggaggcaaagctgacatgaaccttttgtcgtgggacttcaggccacattggcttgaaggcattcgtttccttctggggtggggacaggccctcatggcaggcttgttcccgtggctctgagcgaggcctcttcctgctgggctcccagactcctgcatccaggcccccaccttctcggcttctggtttttctttctttttggtagaacacaacatctaccattcagttaaaccttctttatctcctcctctggcatccatttttccaaagaagagtcgagtcctctgaggtctgtgcttgaaagccgtccgaaggcattcttgttagctttgcttttctccccatatcccaaggcgaagcgctgagattcttccatctaaaaaaccctcgacccgaaaccctcaccagataaactacagtttgtttaggaggccctgaccttcatggtgtctttgaagcccaaccactcggtttccttcggattttcctccctttgttcggggtttggtttggctcctctgtgtgtgtccgtatcttgtcgagggttttttagatggaacaatctcagcgttcgccttgggatatgggggtctacgc

SEQ ID NO: 65428 - DNA, 5703 bp, Homo sapiens
  misc_feature (2848)..(2848): n is a, c, g, or t
  misc_feature (2854)..(2854): n is a, c, g, or t
gagccggagcccagtgacaggcgacggcctcttgccgccccggaccccgggcgcttacctgtggctgctggggtcggccgcccgggaccaggctgggagccccgagaaacgcttcgttaagggactcaggcagtacgggaagaacttcttcagaattagaaaggagctgcttcccaataaggaaacaggggagctgatcaccttctattactattggaagaagacccccgaagcagccagctcccgagcccatcgtaggcaccgcaggcaggccgtgttcaggaggattaagactcgcaccgcgtccacacccgtcaacacaccctccagacccccgtccagtgaattcttggacctaagttcagccagtgaagatgacttcgacagtgaggacagtgagcaggagctgaaggggtacgcctgccgccactgcttcaccaccacctccaaagattggcaccacggaggccgggagaacatcctgctttgcaccgactgtcgcatccacttcaagaaatacggtgagctcccgcccattgagaagcccgtggacccgccaccgtttatgttcaaacccgtcaaggaagaggatgatgggctcagtgggaagcatagcatgaggacacggcggagtcggggctcgatgtcgacactacgcagtggtcggaagaagcagccagccagccctgatggtcgcacctcacccatcaatgaagacatccgctccagcggccggaactcccccagcgctgccagtacctccagcaatgacagtaaagcagagacagtgaagaagtcggccaagaaggtgaaggaggaagcctcttcccctcttaagagtaacaaacgccagcgggagaaggtggcctctgatacggaggaggctgacaggaccagctccaagaagacaaaaacgcaggagatcagcaggcccaactcgccatctgaaggtgagggagagagttcagacagtcgcagcgtcaacgatgagggtagcagtgaccccaaagacatcgaccaggacaatcgcagcacgtccccgagcatccccagcccccaggacaatgagagtgactcggactcgtcagcccagcagcagatgctgcaggcccagcccccagccttgcaggctcccactggggtcaccccagctccctcctcagctcctccagggacccctcagctgcccacgccagggcccacgccctctgccactgcagttcccccacagggctcccccacggcctcccaggcccctaaccagccgcaggctcccacagcgcctgttccccacacccacatccaacaggcaccggccttgcacccccagcggccgccctcaccgcatcccccgccgcatccctcgccacatcccccactgcagcctctgactgggtcggcgggccagccttctgcaccctctcatgcccagcccccactgcacggtcagggcccacccggccctcacagcctgcaggctgggcccctgctgcagcacccaggccccccacagccctttggcctccctccccaggcctcccaaggccaggcccctctggggacctccccagcagcagcgtaccctcacacctccctgcagctgccagcctctcagtcagcgctgcagtcccaacagcctccacgggagcagcccctgccaccagcgcccttggccatgccccacatcaagcccccgcctaccactcccatcccccagctgccggcgccacaggcccacaagcaccctccccacctctcggggccctcacccttctccatgaatgccaacctgcctccccctccagccctgaagcccctgagctccctgtccacacatcaccccccgtcggctcaccccccacccctgcaactcatgcctcagagccagccattgccctcctcgcccgcccagccccccgggctgacccagagccagaacctgcccccgccccctgcctcccacccccctacaggcctccaccaggtggccccccaacccccgtttgctcagcacccctttgtccctggaggccctcctcccatcacccctccgacctgcccctccacctctaccccaccggcgggacctggcacctcggcccagccaccctgctctggtgcggcggcttcaggaggcagcatagcgggggggtcgtcctgcccactccccaccgtccagatcaaggaggaggctctggacgacgctgaggagcctgagagcccccctcccccaccaaggagcccgtccccggagcccactgtggtggacacccccagtcacgccagccagtcagctaggttctacaaacacctggaccggggctacaactcgtgtgcccggacagacctgtacttcatgcctctggccgggtccaagctggccaagaagagggaggaggccattgagaaggccaagcgcgaggctgagcagaaagcccgagaggagcgagagcgggagaaggagaaggagaaggagcgggagcgggagcgagagcgggagcgcgaggcagagcgggcggctaaggcgtccagctcagcgcatgaaggtcgcctcagtgacccacagctcagtggtcctggccacatgcggccatccttcgagccaccaccaaccaccattgctgctgtgcccccctacatcgggcccgacacacctgcccttcggactctgagcgagtacgcccggccccacgtcatgtcgcccaccaaccgcaaccaccccttctacatgccccttaaccccacggaccccctgctggcctaccacatgcctggcctctacaacgtcgaccccaccatccgcgagcgggagctccgggagcgggagatccgagagcgggagatccgngagcgngagctgcgggagaggatgaagccgggcttcgaggtgaagcccccagagctggaccccctgcacccagccgccaaccccatggagcactttgcccggcacagcgccctcaccatccccccgaccgccgggccccacccttttgcttctttccacccgggcctgaaccccttggagagggagagactggccctggcgggcccccagctgcggcccgagatgagctaccctgacagactggcagccgagcgtatccacgcagagcgcatggcatcgctgaccagcgatcccctggcccgactgcagatgttcaacgtgactccgcaccatcaccagcactctcacattcactcccacctccacctccaccagcaggaccccctccaccaaggttcagcaggccccgttcacccgctggtcgaccccctgactgccggtccccacctggctcgcttcccctacccgcctggcactctccccaaccctctgcttggacagcccccacacgagcacgagatgcttcgccacccagttttcggcaccccctacccccgtgacctgcctggggccatcccaccccccatgtcagcagcccaccagctgcaggccatgcatgcccagtcggccgagctgcagagactggccatggagcagcagtggctgcatggacacccccacatgcatggtggccacctaccaagtcaggaagattattacagtcgactgaagaaagaaggtgacaagcagttataagttatttatttgttaacgctggctgtggaaaccccagttcttggggggagaaacaggactttttacataaaataggagctgcaaaagcaaaaagaatatcttctaaagatttctttatatatttaaaaacccacaactaaaaatgtatccacatagtagtgttcgtttgtcgagaggatttcctgagactggtttggatctccctgcatgacagtcccccagaaacttagtgagtcctggactggactgaacatccagaaagcttccctgcaatcttggggtttggctttagttttcttttccttgatttctcagtaggtgctagaatccagttcacacccttcactgtgcgtgcagacacactgacacactccgccacgagtgctccagagcccacgaggcttgcagatcgggggcataggaatttggaatccaagagctataatttttaaaaaaaaaaatcttttattttaatacattgtaggaaatcttcataattggagaaagttctgcagcatggctttttacgtctgtaaataaataattttagaacagcctttttttcttccataaactactattgtgatctattttttccagccatgtcactaattgtgaattcctaccaactattgacagaatacagagttgattttttaataaaaagttatatataattatccctttaattaaagggagcaaaggggcgttccacatggacagaggcttggaccgaggcctggtcacagcagcgagcatccagggtttgcagggacgatgttacagactctgttttctgcctggcgtttcacttgtgtctgctcctagcctgtgctctgccagcagcacagacatctgctccatcagacctcttccattttgcacagggagtgcaggaggtgaatgttcactttctgttctccagtgtcactgttctgtttccacgggatggaaagcgcatgggcctgtgtccattgtagatttccttctagatttctgtgtacacacacttgattgttctggatgaatgtcttttttaatactccgaaaatttcatcatctaagaaaatgattccatacaaataactcagcacacaagtgacccaggacatatgcctgccaaagggatgtgttagaaggctgccttctcatgcgcattgtcacttggatcttgtggtgaggacggccccatctttcttgccacagattgaggccacttttgagcaagggagatcctggagttaagacaggtgttgggggcagcctgtattttaccctaggggcaggtctgcatggtgaccccacattgcactggtaaaccatttgagtcccactcttcatcctggaagtgggaactggagtcccacccacagtgcattcagaaagcatgctgtgtgggggctgcttctcaggaggccaggcccttctgagcggaaccgtcctggagagagcctgccctcgtttccaggctgcagccgtaacgcactttctcccaggctgagggcgggtgttctggggtgtctgccctctgtcggccctgcttcctgccaggacgtggcctcttccgatccttttctctcagacactggaggtctcttctgccattgtgctggtcccatcccaagaattgtaggacagagaccacactgggtcggcggacacaaagtccatccaggacccaggccgcagagggagcaggaagagatgctgatagtttgatctagaaaccagcagctactggctcaaattcaggttctggcgtcaaatagcgacatttccagtttctcttaaaaaccgtgtttggtttcagttgggataggcttgttttgtctgttgaaaatgtttctagttttttttctttcatttttctctcattccatttctgccttaactttagtttgttcacagggaggcaaagctgacatgaaccttttgtcgtgggacttcaggccacattggcttgaaggcattcgtttccttctggggtggggacaggccctcatggcaggcttgttcccgtggctctgagcgaggcctcttcctgctgggctcccagactcctgcatccaggcccccactctgcctcctccggtaccgac

SEQ ID NO: 65429 - DNA, 6238 bp, Homo sapiens
  misc_feature (4558)..(4558): n is a, c, g, or t
  misc_feature (4564)..(4564): n is a, c, g, or t
gcaaccctccgcgctccggagcctcctcagcctcccgcacaccccgagacgctcgccccgctgggcctcggtccccgcctcctcccccgtccttttcccctctctcgctccccacattgtctctgcctcattttctctcctagttgaggattaaaaaaaaaaaaaaatcaccatcatcctcagggagccccctcgccctcggaaaacaaaaccagacatgatcctgggctcctgcttctgaaagatctgcccgaccgaggaggagggagcctaggttcaagtcgcaggaaaggtcacggcagggaagccccctcagcccctccgcgtcgcctccccgcgggccgcccctctcggccctgcgccccgcggccccgcagcctccgcgcggcctcccgccccatccccgccactttccccggagctgggccgcgaacacctcactattgatggtgtagcgctttaggggaagcatttttgaaacgttggggttgttggagtggttggattttccctggaattgagtgagaaattcagaagactgaagcccaggcttactgtctacctttcacggaggcctagccgtgagaggacagaagaaggcacgtggcgaatcatgacagcggacaaagacaaagacaaagacaaagagaaggaccgggaccgagaccgggaccgagagagagagaaaagagacaaagcaagagagagtgagaattcaaggccacgccggagctgtaccttggaaggaggagccaaaaattatgctgagagtgatcacagtgaagacgaggacaatgacaacaatagtgccaccgcagaggagtccacgaagaagaataagaagaaaccaccgaaaaaaaagtctcgttatgaaaggacagataccggtgagataacatcctacatcactgaagatgatgtggtctacagaccaggagactgtgtgtatatcgagagtcggaggccaaacacaccgtatttcatctgtagcattcaagacttcaaactggtccacaactcccaggcctgttgcagatctccaactcctgctttgtgtgaccccccagcatgctctctgccggtggcatcacagccaccacagcatctttctgaagccgggagagggcctgtagggagtaagagggaccatctcctcatgaacgtcaaatggtactaccgtcaatctgaggttccagattctgtgtatcagcatttggttcaggatcgacataatgaaaatgactctggaagagaacttgtcattacagacccagttatcaagaaccgagagctcttcatttctgattacgttgacacttaccatgctgctgcccttagagggaagtgtaacatctcccatttttctgacatatttgctgctagagagtttaaagcccgagtggattcatttttctacatattaggatataaccctgagacaaggaggctgaacagtacccagggggagattcgtgtcggtcctagtcatcaggccaaacttccagatctgcaaccatttccttctccagatggtgatacagtgacccaacatgaggaactggtctggatgcctggagttaacgactgtgacctccttatgtacttgagggcagcaaggagcatggcggcatttgcaggaatgtgtgatggaggctctacagaggacggctgtgtcgcagcctctcgggatgacaccactctgaatgcactgaacacactgcatgaaagcggttacgatgctggcaaagccctgcagcgcctggtgaagaagcctgtgcccaagctcatcgagaagtgctggaccgaggacgaagtgaaacgcttcgttaagggactcaggcagtacgggaagaacttcttcagaattagaaaggagctgcttcccaataaggaaacaggggagctgatcaccttctattactattggaagaagacccccgaagcagccagctcccgagcccatcgtaggcaccgcaggcaggccgtgttcaggaggattaagactcgcaccgcgtccacacccgtcaacacaccctccagacccccgtccagtgaattcttggacctaagttcagccagtgaagatgacttcgacagtgaggacagtgagcaggagctgaaggggtacgcctgccgccactgcttcaccaccacctccaaagattggcaccacggaggccgggagaacatcctgctttgcaccgactgtcgcatccacttcaagaaatacggtgagctcccgcccattgagaagcccgtggacccgccaccgtttatgttcaaacccgtcaaggaagaggatgatgggctcagtgggaagcatagcatgaggacacggcggagtcggggctcgatgtcgacactacgcagtggtcggaagaagcagccagccagccctgatggtcgcacctcacccatcaatgaagacatccgctccagcggccggaactcccccagcgctgccagtacctccagcaatgacagtaaagcagagacagtgaagaagtcggccaagaaggtgaaggaggaagcctcttcccctcttaagagtaacaaacgccagcgggagaaggtggcctctgatacggaggaggctgacaggaccagctccaagaagacaaaaacgcaggagatcagcaggcccaactcgccatctgaaggtgagggagagagttcagacagtcgcagcgtcaacgatgagggtagcagtgaccccaaagacatcgaccaggacaatcgcagcacgtccccgagcatccccagcccccaggacaatgagagtgactcggactcgtcagcccagcagcagatgctgcaggcccagcccccagccttgcaggctcccactggggtcaccccagctccctcctcagctcctccagggacccctcagctgcccacgccagggcccacgccctctgccactgcagttcccccacagggctcccccacggcctcccaggcccctaaccagccgcaggctcccacagcgcctgttccccacacccacatccaacaggcaccggccttgcacccccagcggccgccctcaccgcatcccccgccgcatccctcgccacatcccccactgcagcctctgactgggtcggcgggccagccttctgcaccctctcatgcccagcccccactgcacggtcagggcccacccggccctcacagcctgcaggctgggcccctgctgcagcacccaggccccccacagccctttggcctccctccccaggcctcccaaggccaggcccctctggggacctccccagcagcagcgtaccctcacacctccctgcagctgccagcctctcagtcagcgctgcagtcccaacagcctccacgggagcagcccctgccaccagcgcccttggccatgccccacatcaagcccccgcctaccactcccatcccccagctgccggcgccacaggcccacaagcaccctccccacctctcggggccctcacccttctccatgaatgccaacctgcctccccctccagccctgaagcccctgagctccctgtccacacatcaccccccgtcggctcaccccccacccctgcaactcatgcctcagagccagccattgccctcctcgcccgcccagccccccgggctgacccagagccagaacctgcccccgccccctgcctcccacccccctacaggcctccaccaggtggccccccaacccccgtttgctcagcacccctttgtccctggaggccctcctcccatcacccctccgacctgcccctccacctctaccccaccggcgggacctggcacctcggcccagccaccctgctctggtgcggcggcttcaggaggcagcatagcgggggggtcgtcctgcccactccccaccgtccagatcaaggaggaggctctggacgacgctgaggagcctgagagcccccctcccccaccaaggagcccgtccccggagcccactgtggtggacacccccagtcacgccagccagtcagctaggttctacaaacacctggaccggggctacaactcgtgtgcccggacagacctgtacttcatgcctctggccgggtccaagctggccaagaagagggaggaggccattgagaaggccaagcgcgaggctgagcagaaagcccgagaggagcgagagcgggagaaggagaaggagaaggagcgggagcgggagcgagagcgggagcgcgaggcagagcgggcggctaaggcgtccagctcagcgcatgaaggtcgcctcagtgacccacagctcagtggtcctggccacatgcggccatccttcgagccaccaccaaccaccattgctgctgtgcccccctacatcgggcccgacacacctgcccttcggactctgagcgagtacgcccggccccacgtcatgtcgcccaccaaccgcaaccaccccttctacatgccccttaaccccacggaccccctgctggcctaccacatgcctggcctctacaacgtcgaccccaccatccgcgagcgggagctccgggagcgggagatccgagagcgggagatccgngagcgngagctgcgggagaggatgaagccgggcttcgaggtgaagcccccagagctggaccccctgcacccagccgccaaccccatggagcactttgcccggcacagcgccctcaccatccccccgaccgccgggccccacccttttgcttctttccacccgggcctgaaccccttggagagggagagactggccctggcgggcccccagctgcggcccgagatgagctaccctgacagactggcagccgagcgtatccacgcagagcgcatggcatcgctgaccagcgatcccctggcccgactgcagatgttcaacgtgactccgcaccatcaccagcactctcacattcactcccacctccacctccaccagcaggaccccctccaccaaggttcagcaggccccgttcacccgctggtcgaccccctgactgccggtccccacctggctcgcttcccctacccgcctggcactctccccaaccctctgcttggacagcccccacacgagcacgagatgcttcgccacccagttttcggcaccccctacccccgtgacctgcctggggccatcccaccccccatgtcagcagcccaccagctgcaggccatgcatgcccagtcggccgagctgcagagactggccatggagcagcagtggctgcatggacacccccacatgcatggtggccacctaccaagtcaggaagattattacagtcgactgaagaaagaaggtgacaagcagttataagttatttatttgttaacgctggctgtggaaaccccagttcttggggggagaaacaggactttttacataaaataggagctgcaaaagcaaaaagaatatcttctaaagatttctttatatatttaaaaacccacaactaaaaattcacagggaggcaaagctgacatgaaccttttgtcgtgggacttcaggccacattggcttgaaggcattcgtttccttctggggtggggacaggccctcatggcaggcttgttcccgtggctctgagcgaggcctcttcctgctgggctcccagactcctgcatccaggcccccaccttctcggcttctggtttttctttctttttggtagaacacaacatctaccattcagttaaaccttctttatctcctcctctggcatccatttttccaaagaagagtcgagtcctctgaggtctgtgcttgaaagccgtccgaaggcattcttgttagctttgcttttctccccatatcccaaggcgaagcgctgagattcttccatctaaaaaaccctcgacccgaaaccctcaccagataaactacagtttgtttaggaggccctgaccttcatggtgtctttgaagcccaaccactcggtttccttcggattttcctccctttgttcggggtttggtttggctcctctgtgtgtgtccgtatcttgttcggtgtcctcgaggttgagcttcactccactgcggcagaggcagcgtgcacactcggatttgctacgtttctatatatcttgaagctaaatgtatatatgagtagtttgccatgagataacacagtgtaaacagtagacacccagaaatcgtgacttctgtgttctctccatttgagtattttgtaatttttttgaaatatttgtggacataaataaaaccaagctacactaca

SEQ ID NO: 65430 - DNA, 2157 bp, Homo sapiens
gcataagaaatgtgtaacgggggatgtagtgaaagagggttgctcgaataggttggcgccgttcagaatctatggatagtttgcccccaggcgtgaggggagtgcgccaatttggcggatccagggtatgtttgagtaaaagttatatataattatccctttaattaaagggagcaaaggggcgttccacatggacagaggcttggaccgaggcctggtcacagcagcgagcatccagggtttgcagggacgatgttacagactctgttttctgcctggcgtttcacttgtgtctgctcctagcctgtgctctgccagcagcacagacatctgctccatcagacctcttccattttgcacagggagtgcaggaggtgaatgttcactttctgttctccagtgtcactgttctgtttccacgggatggaaagcgcatgggcctgtgtccattgtagatttccttctagatttctgtgtacacacacttgattgttctggatgaatgtcttttttaatactccgaaaatttcatcatctaagaaaatgattccatacaaataactcagcacacaagtgacccaggacatatgcctgccaaagggatgtgttagaaggctgccttctcatgcgcattgtcacttggatcttgtggtgaggacggccccatctttcttgccacagattgaggccacttttgagcaagggagatcctggagttaagacaggtgttgggggcagcctgtattttaccctaggggcaggtctgcatggtgaccccacattgcactggtaaaccatttgagtcccactcttcatcctggaagtgggaactggagtcccacccacagtgcattcagaaagcatgctgtgtgggggctgcttctcaggaggccaggcccttctgagcggaaccgtcctggagagagcctgccctcgtttccaggctgcagccgtaacgcactttctcccaggctgagggcgggtgttctggggtgtctgccctctgtcggccctgcttcctgccaggacgtggcctcttccgatccttttctctcagacactggaggtctcttctgccattgtgctggtcccatcccaagaattgtaggacagagaccacactgggtcggcggacacaaagtccatccaggacccaggccgcagagggagcaggaagagatgctgatagtttgatctagaaaccagcagctactggctcaaattcaggttctggcgtcaaatagcgacatttccagtttctcttaaaaaccgtgtttggtttcagttgggataggcttgttttgtctgttgaaaatgtttctagttttttttctttcatttttctctcattccatttctgccttaactttagtttgttcacagggaggcaaagctgacatgaaccttttgtcgtgggacttcaggccacattggcttgaaggcattcgtttccttctggggtggggacaggccctcatggcaggcttgttcccgtggctctgagcgaggcctcttcctgctgggctcccagactcctgcatccaggcccccaccttctcggcttctggtttttctttctttttggtagaacacaacatctaccattcagttaaaccttctttatctcctcctctggcatccatttttccaaagaagagtcgagtcctctgaggtctgtgcttgaaagccgtccgaaggcattcttgttagctttgcttttctccccatatcccaaggcgaagcgctgagattcttccatctaaaaaaccctcgacccgaaaccctcaccagataaactacagtttgtttaggaggccctgaccttcatggtgtctttgaagcccaaccactcggtttccttcggattttcctccctttgttcggggtttggtttggctcctctgtgtgtgtccgtatcttgttcggtgtcctcgaggttgagcttcactccactgcggcagaggcagcgtgcacactcggatttgctacgtttctatatatcttgaagctaaatgtatatatgagtagtttgccatgagataacacagtgtaaacagtagacacccagaaatcgtgacttctgtgttctctccatttgagtattttgtaatttttttgaaatatttgtggacataaataaaaccaagctacactaca

SEQ ID NO: 65431 - DNA, 1713 bp, Homo sapiens
cacgcgtcgccacgcgtcgccacgcgtcggaccacgcgtcgttgattgttctggatgaatgtcttttttaatactccgaaaatttcatcatctaagaaaatgattccatacaaataactcagcacacaagtgacccaggacatatgcctgccaaagggatgtgttagaaggctgccttctcatgcgcattgtcacttggatcttgtggtgaggacggccccatctttcttgccacagattgaggccacttttgagcaagggagatcctggagttaagacaggtgttgggggcagcctgtattttaccctaggggcaggtctgcatggtgaccccacattgcactggtaaaccatttgagtcccactcttcatcctggaagtgggaactggagtcccacccacagtgcattcagaaagcatgctgtgtgggggctgcttctcaggaggccaggcccttctgagcggaaccgtcctggagagagcctgccctcgtttccaggctgcagccgtaacgcactttctcccaggctgagggcgggtgttctggggtgtctgccctctgtcggccctgcttcctgccaggacgtggcctcttccgatccttttctctcagacactggaggtctcttctgccattgtgctggtcccatcccaagaattgtaggacagagaccacactgggtcggcggacacaaagtccatccaggacccaggccgcagagggagcaggaagagatgctgatagtttgatctagaaaccagcagctactggctcaaattcaggttctggcgtcaaatagcgacatttccagtttctcttaaaaaccgtgtttggtttcagttgggataggcttgttttgtctgttgaaaatgtttctagttttttttctttcatttttctctcattccatttctgccttaactttagtttgttcacagggaggcaaagctgacatgaaccttttgtcgtgggacttcaggccacattggcttgaaggcattcgtttccttctggggtggggacaggccctcatggcaggcttgttcccgtggctctgagcgaggcctcttcctgctgggctcccagactcctgcatccaggcccccaccttctcggcttctggtttttctttctttttggtagaacacaacatctaccattcagttaaaccttctttatctcctcctctggcatccatttttccaaagaagagtcgagtcctctgaggtctgtgcttgaaagccgtccgaaggcattcttgttagctttgcttttctccccatatcccaaggcgaagcgctgagattcttccatctaaaaaaccctcgacccgaaaccctcaccagataaactacagtttgtttaggaggccctgaccttcatggtgtctttgaagcccaaccactcggtttccttcggattttcctccctttgttcggggtttggtttggctcctctgtgtgtgtccgtatcttgttcggtgtcctcgaggttgagcttcactccactgcggcagaggcagcgtgcacactcggatttgctacgtttctatatatcttgaagctaaatgtatatatgagtagtttgccatgagataacacagtgtaaacagtagacacccagaaatcgtgacttctgtgttctctccatttgagtattttgtaatttttttgaaatatttgtggacataaataaaaccaagctacactaca

SEQ ID NO: 65432 - DNA, 1749 bp, Homo sapiens
ggatgaatgtcttttttaatactccagaacaatcaagtgtgtgtacacagaaatctagaaggaaatctacaatggacttgattgttctggatgaatgtcttttttaatactccgaaaatttcatcatctaagaaaatgattccatacaaataactcagcacacaagtgacccaggacatatgcctgccaaagggatgtgttagaaggctgccttctcatgcgcattgtcacttggatcttgtggtgaggacggccccatctttcttgccacagattgaggccacttttgagcaagggagatcctggagttaagacaggtgttgggggcagcctgtattttaccctaggggcaggtctgcatggtgaccccacattgcactggtaaaccatttgagtcccactcttcatcctggaagtgggaactggagtcccacccacagtgcattcagaaagcatgctgtgtgggggctgcttctcaggaggccaggcccttctgagcggaaccgtcctggagagagcctgccctcgtttccaggctgcagccgtaacgcactttctcccaggctgagggcgggtgttctggggtgtctgccctctgtcggccctgcttcctgccaggacgtggcctcttccgatccttttctctcagacactggaggtctcttctgccattgtgctggtcccatcccaagaattgtaggacagagaccacactgggtcggcggacacaaagtccatccaggacccaggccgcagagggagcaggaagagatgctgatagtttgatctagaaaccagcagctactggctcaaattcaggttctggcgtcaaatagcgacatttccagtttctcttaaaaaccgtgtttggtttcagttgggataggcttgttttgtctgttgaaaatgtttctagttttttttctttcatttttctctcattccatttctgccttaactttagtttgttcacagggaggcaaagctgacatgaaccttttgtcgtgggacttcaggccacattggcttgaaggcattcgtttccttctggggtggggacaggccctcatggcaggcttgttcccgtggctctgagcgaggcctcttcctgctgggctcccagactcctgcatccaggcccccaccttctcggcttctggtttttctttctttttggtagaacacaacatctaccattcagttaaaccttctttatctcctcctctggcatccatttttccaaagaagagtcgagtcctctgaggtctgtgcttgaaagccgtccgaaggcattcttgttagctttgcttttctccccatatcccaaggcgaagcgctgagattcttccatctaaaaaaccctcgacccgaaaccctcaccagataaactacagtttgtttaggaggccctgaccttcatggtgtctttgaagcccaaccactcggtttccttcggattttcctccctttgttcggggtttggtttggctcctctgtgtgtgtccgtatcttgttcggtgtcctcgaggttgagcttcactccactgcggcagaggcagcgtgcacactcggatttgctacgtttctatatatcttgaagctaaatgtatatatgagtagtttgccatgagataacacagtgtaaacagtagacacccagaaatcgtgacttctgtgttctctccatttgagtattttgtaatttttttgaaatatttgtggacataaataaaaccaagctacactaca

SEQ ID NO: 65433 - DNA, 1211 bp, Homo sapiens
caccacataaaacacccaacagacactcaacagctaggacaggctggtgtaatcggccaggcttgtggccttcctgccaggacgtggcctcttccgatccttttctctcagacactggaggtctcttctgccattgtgctggtcccatcccaagaattgtaggacagagaccacactgggtcggcggacacaaagtccatccaggacccaggccgcagagggagcaggaagagatgctgatagtttgatctagaaaccagcagctactggctcaaattcaggttctggcgtcaaatagcgacatttccagtttctcttaaaaaccgtgtttggtttcagttgggataggcttgttttgtctgttgaaaatgtttctagttttttttctttcatttttctctcattccatttctgccttaactttagtttgttcacagggaggcaaagctgacatgaaccttttgtcgtgggacttcaggccacattggcttgaaggcattcgtttccttctggggtggggacaggccctcatggcaggcttgttcccgtggctctgagcgaggcctcttcctgctgggctcccagactcctgcatccaggcccccaccttctcggcttctggtttttctttctttttggtagaacacaacatctaccattcagttaaaccttctttatctcctcctctggcatccatttttccaaagaagagtcgagtcctctgaggtctgtgcttgaaagccgtccgaaggcattcttgttagctttgcttttctccccatatcccaaggcgaagcgctgagattcttccatctaaaaaaccctcgacccgaaaccctcaccagataaactacagtttgtttaggaggccctgaccttcatggtgtctttgaagcccaaccactcggtttccttcggattttcctccctttgttcggggtttggtttggctcctctgtgtgtgtccgtatcttgttcggtgtcctcgaggttgagcttcactccactgcggcagaggcagcgtgcacactcggatttgctacgtttctatatatcttgaagctaaatgtatatatgagtagtttgccatgagataacacagtgtaaacagtagacacccagaaatcgtgacttctgtgttctctccatttgagtattttgtaatttttttgaaatatttgtggacataaataaaaccaagctacactaca

SEQ ID NO: 65434 - DNA, 470 bp, Homo sapiens
ctgcgcggtgatctagaggatccctcacgttttctccccatatcccaaggcgaagcgctgagattcttccatctaaaaaaccctcgacccgaaaccctcaccagataaactacagtttgtttaggaggccctgaccttcatggtgtctttgaagcccaaccactcggtttccttcggattttcctccctttgttcggggtttggtttggctcctctgtgtgtgtccgtatcttgttcggtgtcctcgaggttgagcttcactccactgcggcagaggcagcgtgcacactcggatttgctacgtttctatatatcttgaagctaaatgtatatatgagtagtttgccatgagataacacagtgtaaacagtagacacccagaaatcgtgacttctgtgttctctccatttgagtattttgtaatttttttgaaatatttgtggacataaataaaaccaagctacactaca

SEQ ID NO: 65435 - DNA, 2630 bp, Homo sapiens
gcaaccctccgcgctccggagcctcctcagcctcccgcacaccccgagacgctcgccccgctgggcctcggtccccgcctcctcccccgtccttttcccctctctcgctccccacattgtctctgcctcattttctctcctagttgaggattaaaaaaaaaaaaaaatcaccatcatcctcagggagccccctcgccctcggaaaacaaaaccagacatgatcctgggctcctgcttctgaaagatctgcccgaccgaggaggagggagcctaggttcaagtcgcaggaaaggtcacggcagggaagccccctcagcccctccgcgtcgcctccccgcgggccgcccctctcggccctgcgccccgcggccccgcagcctccgcgcggcctcccgccccatccccgccactttccccggagctgggccgcgaacacctcactattgatggtgtagcgctttaggggaagcatttttgaaacgttggggttgttggagtggttggattttccctggaattgagtgagaaattcagaagactgaagcccaggcttactgtctacctttcacggaggcctagccgtgagaggacagaagaaggcacgtggcgaatcatgacagcggacaaagacaaagacaaagacaaagagaaggaccgggaccgagaccgggaccgagagagagagaaaagagacaaagcaagagagagtgagaattcaaggccacgccggagctgtaccttggaaggaggagccaaaaattatgctgagagtgatcacagtgaagacgaggacaatgacaacaatagtgccaccgcagaggagtccacgaagaagaataagaagaaaccaccgaaaaaaaagtctcgttatgaaaggacagataccggtgagataacatcctacatcactgaagatgatgtggtctacagaccaggagactgtgtgtatatcgagagtcggaggccaaacacaccgtatttcatctgtagcattcaagacttcaaactggtccacaactcccaggcctgttgcagatctccaactcctgctttgtgtgaccccccagcatgctctctgccggtggcatcacagccaccacagcatctttctgaagccgggagagggcctgtagggagtaagagggaccatctcctcatgaacgtcaaatggtactaccgtcaatctgaggttccagattctgtgtatcagcatttggttcaggatcgacataatgaaaatgactctggaagagaacttgtcattacagacccagttatcaagaaccgagagctcttcatttctgattacgttgacacttaccatgctgctgcccttagagggaagtgtaacatctcccatttttctgacatatttgctgctagagagtttaaagcccgagtggattcatttttctacatattaggatataaccctgagacaaggaggctgaacagtacccagggggagattcgtgtcggtcctagtcatcaggccaaacttccagatctgcaaccatttccttctccagatggtgatacagtgacccaacatgaggaactggtctggatgcctggagttaacgactgtgacctccttatgtacttgagggcagcaaggagcatggcggcatttgcaggaatgtgtgatggaggctctacagaggacggctgtgtcgcagcctctcgggatgacaccactctgaatgcactgaacacactgcatgaaagcggttacgatgctggcaaagccctgcagcgcctggtgaagaagcctgtgcccaagctcatcgagaagtgctggaccgaggacgaagtgaaacgcttcgttaagggactcaggcagtacgggaagaacttcttcagaattagaaaggagctgcttcccaataaggaaacaggggagctgatcaccttctattactattggaagaagacccccgaagcagccagctcccgagcccatcgtaggcaccgcaggcaggccgtgttcaggaggattaagactcgcaccgcgtccacacccgtcaacacaccctccagacccccgtccagtgaattcttggacctaagttcagccagtgaagatgacttcgacagtgaggacagtgagcaggagctgaaggggtacgcctgccgccactgcttcaccaccacctccaaagattggcaccacggaggccgggagaacatcctgctttgcaccgactgtcgcatccacttcaagaaatacggtgagctcccgcccattgagaagcccgtggacccgccaccgtttatgttcaaacccgtcaaggaagaggatgatgggctcagtgggaagcatagcatgaggacacggcggagtcggggctcgatgtcgacactacgcagtggtcggaagaagcagccagccagccctgatggtcgcacctcacccatcaatgaagacatccgctccagcggccggaactcccccagcgctgccagtacctccagcaatgacagtaaagcagagacagtgaagaagtcggccaaggtcaggtgctggggggatagtagggcctactctgtccctccctcacattaaaactggtttgctggtattcgtgatcagctccctcagacacgaggatgcagctcattcatggagc

SEQ ID NO: 65436 - DNA, 2176 bp, Homo sapiens
gcaaccctccgcgctccggagcctcctcagcctcccgcacaccccgagacgctcgccccgctgggcctcggtccccgcctcctcccccgtccttttcccctctctcgctccccacattgtctctgcctcattttctctcctagttgaggattaaaaaaaaaaaaaaatcaccatcatcctcagggagccccctcgccctcggaaaacaaaaccagacatgatcctgggctcctgcttctgaaagatctgcccgaccgaggaggagggagcctaggttcaagtcgcaggaaaggtcacggcagggaagccccctcagcccctccgcgtcgcctccccgcgggccgcccctctcggccctgcgccccgcggccccgcagcctccgcgcggcctcccgccccatccccgccactttccccggagctgggccgcgaacacctcactattgatggtgtagcgctttaggggaagcatttttgaaacgttggggttgttggagtggttggattttccctggaattgagtgagaaattcagaagactgaagcccaggcttactgtctacctttcacggaggcctagccgtgagaggacagaagaaggcacgtggcgaatcatgacagcggacaaagacaaagacaaagacaaagagaaggaccgggaccgagaccgggaccgagagagagagaaaagagacaaagcaagagagagtgagaattcaaggccacgccggagctgtaccttggaaggaggagccaaaaattatgctgagagtgatcacagtgaagacgaggacaatgacaacaatagtgccaccgcagaggagtccacgaagaagaataagaagaaaccaccgaaaaaaaagtctcgttatgaaaggacagataccggtgagataacatcctacatcactgaagatgatgtggtctacagaccaggagactgtgtgtatatcgagagtcggaggccaaacacaccgtatttcatctgtagcattcaagacttcaaactggtccacaactcccaggcctgttgcagatctccaactcctgctttgtgtgaccccccagcatgctctctgccggtggcatcacagccaccacagcatctttctgaagccgggagagggcctgtagggagtaagagggaccatctcctcatgaacgtcaaatggtactaccgtcaatctgaggttccagattctgtgtatcagcatttggttcaggatcgacataatgaaaatgactctggaagagaacttgtcattacagacccagttatcaagaaccgagagctcttcatttctgattacgttgacacttaccatgctgctgcccttagagggaagtgtaacatctcccatttttctgacatatttgctgctagagagtttaaagcccgagtggattcatttttctacatattaggatataaccctgagacaaggaggctgaacagtacccagggggagattcgtgtcggtcctagtcatcaggccaaacttccagatctgcaaccatttccttctccagatggtgatacagtgacccaacatgaggaactggtctggatgcctggagttaacgactgtgacctccttatgtacttgagggcagcaaggagcatggcggcatttgcaggaatgtgtgatggaggctctacagaggacggctgtgtcgcagcctctcgggatgacaccactctgaatgcactgaacacactgcatgaaagcggttacgatgctggcaaagccctgcagcgcctggtgaagaagcctgtgcccaagctcatcgagaagtgctggaccgaggacgaagtgaaacgcttcgttaagggactcaggcagtacgggaagaacttcttcagaattagaaaggagctgcttcccaataaggaaacaggggagctgatcaccttctattactattggaagaagacccccgaagcagccagctcccgagcccatcgtaggcaccgcaggcaggccgtgttcaggaggattaagactcgcaccgcgtccacacccgtcaacacaccctccagacccccgtccagtgaattcttggacctaagttcagccagtgaagatgacttcgacagtgaggacagtgagcaggagctgaaggggtacgcctgccgccactgcttcaccaccagtaagtggcctcgtcacgctcct

SEQ ID NO: 65437 - DNA, 1443 bp, Homo sapiens
gcaaccctccgcgctccggagcctcctcagcctcccgcacaccccgagacgctcgccccgctgggcctcggtccccgcctcctcccccgtccttttcccctctctcgctccccacattgtctctgcctcattttctctcctagttgaggattaaaaaaaaaaaaaaatcaccatcatcctcagggagccccctcgccctcggaaaacaaaaccagacatgatcctgggctcctgcttctgaaagatctgcccgaccgaggaggagggagcctaggttcaagtcgcaggaaaggtcacggcagggaagccccctcagcccctccgcgtcgcctccccgcgggccgcccctctcggccctgcgccccgcggccccgcagcctccgcgcggcctcccgccccatccccgccactttccccggagctgggccgcgaacacctcactattgatggtgtagcgctttaggggaagcatttttgaaacgttggggttgttggagtggttggattttccctggaattgagtgagaaattcagaagactgaagcccaggcttactgtctacctttcacggaggcctagccgtgagaggacagaagaaggcacgtggcgaatcatgacagcggacaaagacaaagacaaagacaaagagaaggaccgggaccgagaccgggaccgagagagagagaaaagagacaaagcaagagagagtgagaattcaaggccacgccggagctgtaccttggaaggaggagccaaaaattatgctgagagtgatcacagtgaagacgaggacaatgacaacaatagtgccaccgcagaggagtccacgaagaagaataagaagaaaccaccgaaaaaaaagtctcgttatgaaaggacagataccggtgagataacatcctacatcactgaagatgatgtggtctacagaccaggagactgtgtgtatatcgagagtcggaggccaaacacaccgtatttcatctgtagcattcaagacttcaaactggtccacaactcccaggcctgttgcagatctccaactcctgctttgtgtgaccccccagcatgctctctgccggtggcatcacagccaccacagcatctttctgaagccgggagagggcctgtaggggtaaggagaatcccgtttttaaaagctatcagtattttatatcccatagggtataaaataggaatattacctccctccccagagccccttttaaaatgtgctgtattatatgtgtttttaaaggagtaacaagtacatgcacagaggaagcaaaatacgggacttgccttacccctctaggacagttccagaagttagcggggtttggtggaagggtattttggcaccagcagagagcatgctgggctgctgcaaggagcaggagctggcaatcagcagcgagtatggatgttggcaactgaaatggg

SEQ ID NO: 65438 - DNA, 884 bp, Homo sapiens
gcaaccctccgcgctccggagcctcctcagcctcccgcacaccccgagacgctcgccccgctgggcctcggtccccgcctcctcccccgtccttttcccctctctcgctccccacattgtctctgcctcattttctctcctagttgaggattaaaaaaaaaaaaaaatcaccatcatcctcagggagccccctcgccctcggaaaacaaaaccagacatgatcctgggctcctgcttctgaaagatctgcccgaccgaggaggagggagcctaggttcaagtcgcaggaaaggtcacggcagggaagccccctcagcccctccgcgtcgcctccccgcgggccgcccctctcggccctgcgccccgcggccccgcagcctccgcgcggcctcccgccccatccccgccactttccccggagctgggccgcgaacacctcactattgatggtgtagcgctttaggggaaggaggtgattgtctaggagtaactgtatgtgcgctcagcaccgggtcacaaccaccgtgggatccacttacagagaagatttgtggagagcttcagcctgtttatggtgttactgagaaaggaattgtggccatttgatataattctggatggaagacctcttatttgtattacattgaattagaggtcagtatttgaaattttctccttgagtggctattataagaggatcccgtaagaattgattactgtgaaattagccaactacatagtgtatttcaaagataaggtaaactgttggacttgtgattacctggtttctggtatgaattactgaacttatgtttgtttttatgtgcatagataaagctatatgcttgatactctttcaattataaacttaatgggttataaga

SEQ ID NO: 65439 - DNA, 155 bp, Homo sapiens
tgttgctaaagcaccaaagagagaggagtttgactattttgagcttgtctgtgacacctgttttgtttggaaaatgctaatgaaactagttggcagagctgcatttttgaagttgtttcatttagtcacagtgatagtcatctgtcttcttttag

SEQ ID NO: 65440 - DNA, 424 bp, Homo sapiens
gccagctctctgctgtcgcggggaggaaagggcagccaacccaggaagtggcatgagggactgccagtgaggttcctggcctgctgggctcactcacccatgccccccagctgtcactcccagacacaaccctcacacgtagacaacccatgcatgagcttagtctcacagggacacattcccatctgggcctgaggggagctgcgggcacaggtgagcccgaccctgtggggcctggactgcatcctggtgtcaggccaaggcagggccgggtctccgtggagggaccaggttggcctgtcagagcaggccaggagcaggaccaggcccacctccgcagtgtggaccaagcggagaccccaggcgctcgggggacccctcacgctttcttttccttctgcagaaggcgtccagctcagcgcat

SEQ ID NO: 65441 - DNA, 810 bp, Homo sapiens
tctctaggttttaatttccaagtaactttatttgttgcacattgcaggagaagaaaaatgtttattggccagaagctgtattccaaagacatgtcaaatattccacattttagctttaaacagttaaactttctgcctatcataatatagtaggaagaaaggctcatttttttttatgatttagaaaggctttaaactgagtttttcttatattcacaatggttttaatttttctccatttctactttgtttaatattctttctcatagtcctgtctccagtttatctttgttgttttaattaattttactttattagtaaaatggtgatataaaagcagtcagattacacaggtgtacagtgaagcagtcatgaaacagctgaataggtgaaataaagtgtggtgtttgtagccgattctccatgcacatggacttagttcagtgcttcctccacccttccccctccagttttggttagcaaaagcagttgagggtattactaattatttttttctctttttcccagagggaagtgtaacatctcccatttttctgacatatttgctgctagagagtttaaagcccgagtggattcatttttctacatattaggatataaccctgagacaaggtaagtgagtcacttgtgtccattcattgagaactcttttccttttctcatttgtgtgtgtgtgtatgtgtgtgtgtgtgtagtttatgcttctggacatacactagtaacatacttaaaaaaaatgactccagagtccttcagtaaacttctttgggaggagttgtaattaatgtc

SEQ ID NO: 65442 - DNA, 8181 bp, Homo sapiens
  misc_feature (4743)..(4743): n is a, c, g, or t
  misc_feature (4749)..(4749): n is a, c, g, or t
gcaaccctccgcgctccggagcctcctcagcctcccgcacaccccgagacgctcgccccgctgggcctcggtccccgcctcctcccccgtccttttcccctctctcgctccccacattgtctctgcctcattttctctcctagttgaggattaaaaaaaaaaaaaaatcaccatcatcctcagggagccccctcgccctcggaaaacaaaaccagacatgatcctgggctcctgcttctgaaagatctgcccgaccgaggaggagggagcctaggttcaagtcgcaggaaaggtcacggcagggaagccccctcagcccctccgcgtcgcctccccgcgggccgcccctctcggccctgcgccccgcggccccgcagcctccgcgcggcctcccgccccatccccgccactttccccggagctgggccgcgaacacctcactattgatggtgtagcgctttaggggaaggaggtgattgtctaggagtaactgtatgtgcgctcagcaccgggtcacaaccaccgtgggatccacttacagagaagatttgtggagagcttcagcctgtttatggtgttactgagaaaggaattgtggccatttgatataattctggatggaagacctcttatttgtattacattgaattagagcatttttgaaacgttggggttgttggagtggttggattttccctggaattgagtgagaaattcagaagactgaagcccaggcttactgtctacctttcacggaggcctagccgtgagaggacagaagaaggcacgtggcgaatcatgacagcggacaaagacaaagacaaagacaaagagaaggaccgggaccgagaccgggaccgagagagagagaaaagagacaaagcaagagagagtgagaattcaaggccacgccggagctgtaccttggaaggaggagccaaaaattatgctgagagtgatcacagtgaagacgaggacaatgacaacaatagtgccaccgcagaggagtccacgaagaagaataagaagaaaccaccgaaaaaaaagtctcgttatgaaaggacagataccggtgagataacatcctacatcactgaagatgatgtggtctacagaccaggagactgtgtgtatatcgagagtcggaggccaaacacaccgtatttcatctgtagcattcaagacttcaaactggtccacaactcccaggcctgttgcagatctccaactcctgctttgtgtgaccccccagcatgctctctgccggtggcatcacagccaccacagcatctttctgaagccgggagagggcctgtagggagtaagagggaccatctcctcatgaacgtcaaatggtactaccgtcaatctgaggttccagattctgtgtatcagcatttggttcaggatcgacataatgaaaatgactctggaagagaacttgtcattacagacccagttatcaagaaccgagagctcttcatttctgattacgttgacacttaccatgctgctgcccttagagggaagtgtaacatctcccatttttctgacatatttgctgctagagagtttaaagcccgagtggattcatttttctacatattaggatataaccctgagacaaggaggctgaacagtacccagggggagattcgtgtcggtcctagtcatcaggccaaacttccagatctgcaaccatttccttctccagatggtgatacagtgacccaacatgaggaactggtctggatgcctggagttaacgactgtgacctccttatgtacttgagggcagcaaggagcatggcggcatttgcaggaatgtgtgatggaggctctacagaggacggctgtgtcgcagcctctcgggatgacaccactctgaatgcactgaacacactgcatgaaagcggttacgatgctggcaaagccctgcagcgcctggtgaagaagcctgtgcccaagctcatcgagaagtgctggaccgaggacgaagtgaaacgcttcgttaagggactcaggcagtacgggaagaacttcttcagaattagaaaggagctgcttcccaataaggaaacaggggagctgatcaccttctattactattggaagaagacccccgaagcagccagctcccgagcccatcgtaggcaccgcaggcaggccgtgttcaggaggattaagactcgcaccgcgtccacacccgtcaacacaccctccagacccccgtccagtgaattcttggacctaagttcagccagtgaagatgacttcgacagtgaggacagtgagcaggagctgaaggggtacgcctgccgccactgcttcaccaccacctccaaagattggcaccacggaggccgggagaacatcctgctttgcaccgactgtcgcatccacttcaagaaatacggtgagctcccgcccattgagaagcccgtggacccgccaccgtttatgttcaaacccgtcaaggaagaggatgatgggctcagtgggaagcatagcatgaggacacggcggagtcggggctcgatgtcgacactacgcagtggtcggaagaagcagccagccagccctgatggtcgcacctcacccatcaatgaagacatccgctccagcggccggaactcccccagcgctgccagtacctccagcaatgacagtaaagcagagacagtgaagaagtcggccaagaaggtgaaggaggaagcctcttcccctcttaagagtaacaaacgccagcgggagaaggtggcctctgatacggaggaggctgacaggaccagctccaagaagacaaaaacgcaggagatcagcaggcccaactcgccatctgaaggtgagggagagagttcagacagtcgcagcgtcaacgatgagggtagcagtgaccccaaagacatcgaccaggacaatcgcagcacgtccccgagcatccccagcccccaggacaatgagagtgactcggactcgtcagcccagcagcagatgctgcaggcccagcccccagccttgcaggctcccactggggtcaccccagctccctcctcagctcctccagggacccctcagctgcccacgccagggcccacgccctctgccactgcagttcccccacagggctcccccacggcctcccaggcccctaaccagccgcaggctcccacagcgcctgttccccacacccacatccaacaggcaccggccttgcacccccagcggccgccctcaccgcatcccccgccgcatccctcgccacatcccccactgcagcctctgactgggtcggcgggccagccttctgcaccctctcatgcccagcccccactgcacggtcagggcccacccggccctcacagcctgcaggctgggcccctgctgcagcacccaggccccccacagccctttggcctccctccccaggcctcccaaggccaggcccctctggggacctccccagcagcagcgtaccctcacacctccctgcagctgccagcctctcagtcagcgctgcagtcccaacagcctccacgggagcagcccctgccaccagcgcccttggccatgccccacatcaagcccccgcctaccactcccatcccccagctgccggcgccacaggcccacaagcaccctccccacctctcggggccctcacccttctccatgaatgccaacctgcctccccctccagccctgaagcccctgagctccctgtccacacatcaccccccgtcggctcaccccccacccctgcaactcatgcctcagagccagccattgccctcctcgcccgcccagccccccgggctgacccagagccagaacctgcccccgccccctgcctcccacccccctacaggcctccaccaggtggccccccaacccccgtttgctcagcacccctttgtccctggaggccctcctcccatcacccctccgacctgcccctccacctctaccccaccggcgggacctggcacctcggcccagccaccctgctctggtgcggcggcttcaggaggcagcatagcgggggggtcgtcctgcccactccccaccgtccagatcaaggaggaggctctggacgacgctgaggagcctgagagcccccctcccccaccaaggagcccgtccccggagcccactgtggtggacacccccagtcacgccagccagtcagctaggttctacaaacacctggaccggggctacaactcgtgtgcccggacagacctgtacttcatgcctctggccgggtccaagctggccaagaagagggaggaggccattgagaaggccaagcgcgaggctgagcagaaagcccgagaggagcgagagcgggagaaggagaaggagaaggagcgggagcgggagcgagagcgggagcgcgaggcagagcgggcggctaaggcgtccagctcagcgcatgaaggtcgcctcagtgacccacagctcagtggtcctggccacatgcggccatccttcgagccaccaccaaccaccattgctgctgtgcccccctacatcgggcccgacacacctgcccttcggactctgagcgagtacgcccggccccacgtcatgtcgcccaccaaccgcaaccaccccttctacatgccccttaaccccacggaccccctgctggcctaccacatgcctggcctctacaacgtcgaccccaccatccgcgagcgggagctccgggagcgggagatccgagagcgggagatccgngagcgngagctgcgggagaggatgaagccgggcttcgaggtgaagcccccagagctggaccccctgcacccagccgccaaccccatggagcactttgcccggcacagcgccctcaccatccccccgaccgccgggccccacccttttgcttctttccacccgggcctgaaccccttggagagggagagactggccctggcgggcccccagctgcggcccgagatgagctaccctgacagactggcagccgagcgtatccacgcagagcgcatggcatcgctgaccagcgatcccctggcccgactgcagatgttcaacgtgactccgcaccatcaccagcactctcacattcactcccacctccacctccaccagcaggaccccctccaccaaggttcagcaggccccgttcacccgctggtcgaccccctgactgccggtccccacctggctcgcttcccctacccgcctggcactctccccaaccctctgcttggacagcccccacacgagcacgagatgcttcgccacccagttttcggcaccccctacccccgtgacctgcctggggccatcccaccccccatgtcagcagcccaccagctgcaggccatgcatgcccagtcggccgagctgcagagactggccatggagcagcagtggctgcatggacacccccacatgcatggtggccacctaccaagtcaggaagattattacagtcgactgaagaaagaaggtgacaagcagttataagttatttatttgttaacgctggctgtggaaaccccagttcttggggggagaaacaggactttttacataaaataggagctgcaaaagcaaaaagaatatcttctaaagatttctttatatatttaaaaacccacaactaaaaatgtatccacatagtagtgttcgtttgtcgagaggatttcctgagactggtttggatctccctgcatgacagtcccccagaaacttagtgagtcctggactggactgaacatccagaaagcttccctgcaatcttggggtttggctttagttttcttttccttgatttctcagtaggtgctagaatccagttcacacccttcactgtgcgtgcagacacactgacacactccgccacgagtgctccagagcccacgaggcttgcagatcgggggcataggaatttggaatccaagagctataatttttaaaaaaaaaaatcttttattttaatacattgtaggaaatcttcataattggagaaagttctgcagcatggctttttacgtctgtaaataaataattttagaacagcctttttttcttccataaactactattgtgatctattttttccagccatgtcactaattgtgaattcctaccaactattgacagaatacagagttgattttttaataaaaagttatatataattatccctttaattaaagggagcaaaggggcgttccacatggacagaggcttggaccgaggcctggtcacagcagcgagcatccagggtttgcagggacgatgttacagactctgttttctgcctggcgtttcacttgtgtctgctcctagcctgtgctctgccagcagcacagacatctgctccatcagacctcttccattttgcacagggagtgcaggaggtgaatgttcactttctgttctccagtgtcactgttctgtttccacgggatggaaagcgcatgggcctgtgtccattgtagatttccttctagatttctgtgtacacacacttgattgttctggatgaatgtcttttttaatactccgaaaatttcatcatctaagaaaatgattccatacaaataactcagcacacaagtgacccaggacatatgcctgccaaagggatgtgttagaaggctgccttctcatgcgcattgtcacttggatcttgtggtgaggacggccccatctttcttgccacagattgaggccacttttgagcaagggagatcctggagttaagacaggtgttgggggcagcctgtattttaccctaggggcaggtctgcatggtgaccccacattgcactggtaaaccatttgagtcccactcttcatcctggaagtgggaactggagtcccacccacagtgcattcagaaagcatgctgtgtgggggctgcttctcaggaggccaggcccttctgagcggaaccgtcctggagagagcctgccctcgtttccaggctgcagccgtaacgcactttctcccaggctgagggcgggtgttctggggtgtctgccctctgtcggccctgcttcctgccaggacgtggcctcttccgatccttttctctcagacactggaggtctcttctgccattgtgctggtcccatcccaagaattgtaggacagagaccacactgggtcggcggacacaaagtccatccaggacccaggccgcagagggagcaggaagagatgctgatagtttgatctagaaaccagcagctactggctcaaattcaggttctggcgtcaaatagcgacatttccagtttctcttaaaaaccgtgtttggtttcagttgggataggcttgttttgtctgttgaaaatgtttctagttttttttctttcatttttctctcattccatttctgccttaactttagtttgttcacagggaggcaaagctgacatgaaccttttgtcgtgggacttcaggccacattggcttgaaggcattcgtttccttctggggtggggacaggccctcatggcaggcttgttcccgtggctctgagcgaggcctcttcctgctgggctcccagactcctgcatccaggcccccaccttctcggcttctggtttttctttctttttggtagaacacaacatctaccattcagttaaaccttctttatctcctcctctggcatccatttttccaaagaagagtcgagtcctctgaggtctgtgcttgaaagccgtccgaaggcattcttgttagctttgcttttctccccatatcccaaggcgaagcgctgagattcttccatctaaaaaaccctcgacccgaaaccctcaccagataaactacagtttgtttaggaggccctgaccttcatggtgtctttgaagcccaaccactcggtttccttcggattttcctccctttgttcggggtttggtttggctcctctgtgtgtgtccgtatcttgttcggtgtcctcgaggttgagcttcactccactgcggcagaggcagcgtgcacactcggatttgctacgtttctatatatcttgaagctaaatgtatatatgagtagtttgccatgagataacacagtgtaaacagtagacacccagaaatcgtgacttctgtgttctctccatttgagtattttgtaatttttttgaaatatttgtggacataaataaaaccaagctacactaca

SEQ ID NO: 65443 - DNA, 522 bp, Homo sapiens
tctcaaacacagggagtgggagggaccctctgcccggtgggcaggtgatttattggctgggaagcttccgcggtgatttagttgtgaagcggcggccggggaagtgcaggctaatgcctgggccgccagggagaggccgcccacaatcgcgggccggaagggaccgcggggggcgtcggggccagccccccgtttcgcagctgaggcggggttggggcggagggcgtgcggccggggcgcagccgacttcgtccatccggaacgtgggctggagacccagcagcctgggaagggccccagccctgtgggcgccctctccccacgcttgctgcggtagggaggaagtttctgtgctttaccgccttgatgttctcctgtccggaaggaggacacagattccagcgccgggtgccctggaggctccggcctcggggtgggggtcgggccgggggcggggccggggccggggcgcggggccccggctggcggacaggagggcggcggcaatccaggccgcctttt

SEQ ID NO: 65444 - DNA, 7996 bp, Homo sapiens
  misc_feature (4558)..(4558): n is a, c, g, or t
  misc_feature (4564)..(4564): n is a, c, g, or t
gcaaccctccgcgctccggagcctcctcagcctcccgcacaccccgagacgctcgccccgctgggcctcggtccccgcctcctcccccgtccttttcccctctctcgctccccacattgtctctgcctcattttctctcctagttgaggattaaaaaaaaaaaaaaatcaccatcatcctcagggagccccctcgccctcggaaaacaaaaccagacatgatcctgggctcctgcttctgaaagatctgcccgaccgaggaggagggagcctaggttcaagtcgcaggaaaggtcacggcagggaagccccctcagcccctccgcgtcgcctccccgcgggccgcccctctcggccctgcgccccgcggccccgcagcctccgcgcggcctcccgccccatccccgccactttccccggagctgggccgcgaacacctcactattgatggtgtagcgctttaggggaagcatttttgaaacgttggggttgttggagtggttggattttccctggaattgagtgagaaattcagaagactgaagcccaggcttactgtctacctttcacggaggcctagccgtgagaggacagaagaaggcacgtggcgaatcatgacagcggacaaagacaaagacaaagacaaagagaaggaccgggaccgagaccgggaccgagagagagagaaaagagacaaagcaagagagagtgagaattcaaggccacgccggagctgtaccttggaaggaggagccaaaaattatgctgagagtgatcacagtgaagacgaggacaatgacaacaatagtgccaccgcagaggagtccacgaagaagaataagaagaaaccaccgaaaaaaaagtctcgttatgaaaggacagataccggtgagataacatcctacatcactgaagatgatgtggtctacagaccaggagactgtgtgtatatcgagagtcggaggccaaacacaccgtatttcatctgtagcattcaagacttcaaactggtccacaactcccaggcctgttgcagatctccaactcctgctttgtgtgaccccccagcatgctctctgccggtggcatcacagccaccacagcatctttctgaagccgggagagggcctgtagggagtaagagggaccatctcctcatgaacgtcaaatggtactaccgtcaatctgaggttccagattctgtgtatcagcatttggttcaggatcgacataatgaaaatgactctggaagagaacttgtcattacagacccagttatcaagaaccgagagctcttcatttctgattacgttgacacttaccatgctgctgcccttagagggaagtgtaacatctcccatttttctgacatatttgctgctagagagtttaaagcccgagtggattcatttttctacatattaggatataaccctgagacaaggaggctgaacagtacccagggggagattcgtgtcggtcctagtcatcaggccaaacttccagatctgcaaccatttccttctccagatggtgatacagtgacccaacatgaggaactggtctggatgcctggagttaacgactgtgacctccttatgtacttgagggcagcaaggagcatggcggcatttgcaggaatgtgtgatggaggctctacagaggacggctgtgtcgcagcctctcgggatgacaccactctgaatgcactgaacacactgcatgaaagcggttacgatgctggcaaagccctgcagcgcctggtgaagaagcctgtgcccaagctcatcgagaagtgctggaccgaggacgaagtgaaacgcttcgttaagggactcaggcagtacgggaagaacttcttcagaattagaaaggagctgcttcccaataaggaaacaggggagctgatcaccttctattactattggaagaagacccccgaagcagccagctcccgagcccatcgtaggcaccgcaggcaggccgtgttcaggaggattaagactcgcaccgcgtccacacccgtcaacacaccctccagacccccgtccagtgaattcttggacctaagttcagccagtgaagatgacttcgacagtgaggacagtgagcaggagctgaaggggtacgcctgccgccactgcttcaccaccacctccaaagattggcaccacggaggccgggagaacatcctgctttgcaccgactgtcgcatccacttcaagaaatacggtgagctcccgcccattgagaagcccgtggacccgccaccgtttatgttcaaacccgtcaaggaagaggatgatgggctcagtgggaagcatagcatgaggacacggcggagtcggggctcgatgtcgacactacgcagtggtcggaagaagcagccagccagccctgatggtcgcacctcacccatcaatgaagacatccgctccagcggccggaactcccccagcgctgccagtacctccagcaatgacagtaaagcagagacagtgaagaagtcggccaagaaggtgaaggaggaagcctcttcccctcttaagagtaacaaacgccagcgggagaaggtggcctctgatacggaggaggctgacaggaccagctccaagaagacaaaaacgcaggagatcagcaggcccaactcgccatctgaaggtgagggagagagttcagacagtcgcagcgtcaacgatgagggtagcagtgaccccaaagacatcgaccaggacaatcgcagcacgtccccgagcatccccagcccccaggacaatgagagtgactcggactcgtcagcccagcagcagatgctgcaggcccagcccccagccttgcaggctcccactggggtcaccccagctccctcctcagctcctccagggacccctcagctgcccacgccagggcccacgccctctgccactgcagttcccccacagggctcccccacggcctcccaggcccctaaccagccgcaggctcccacagcgcctgttccccacacccacatccaacaggcaccggccttgcacccccagcggccgccctcaccgcatcccccgccgcatccctcgccacatcccccactgcagcctctgactgggtcggcgggccagccttctgcaccctctcatgcccagcccccactgcacggtcagggcccacccggccctcacagcctgcaggctgggcccctgctgcagcacccaggccccccacagccctttggcctccctccccaggcctcccaaggccaggcccctctggggacctccccagcagcagcgtaccctcacacctccctgcagctgccagcctctcagtcagcgctgcagtcccaacagcctccacgggagcagcccctgccaccagcgcccttggccatgccccacatcaagcccccgcctaccactcccatcccccagctgccggcgccacaggcccacaagcaccctccccacctctcggggccctcacccttctccatgaatgccaacctgcctccccctccagccctgaagcccctgagctccctgtccacacatcaccccccgtcggctcaccccccacccctgcaactcatgcctcagagccagccattgccctcctcgcccgcccagccccccgggctgacccagagccagaacctgcccccgccccctgcctcccacccccctacaggcctccaccaggtggccccccaacccccgtttgctcagcacccctttgtccctggaggccctcctcccatcacccctccgacctgcccctccacctctaccccaccggcgggacctggcacctcggcccagccaccctgctctggtgcggcggcttcaggaggcagcatagcgggggggtcgtcctgcccactccccaccgtccagatcaaggaggaggctctggacgacgctgaggagcctgagagcccccctcccccaccaaggagcccgtccccggagcccactgtggtggacacccccagtcacgccagccagtcagctaggttctacaaacacctggaccggggctacaactcgtgtgcccggacagacctgtacttcatgcctctggccgggtccaagctggccaagaagagggaggaggccattgagaaggccaagcgcgaggctgagcagaaagcccgagaggagcgagagcgggagaaggagaaggagaaggagcgggagcgggagcgagagcgggagcgcgaggcagagcgggcggctaaggcgtccagctcagcgcatgaaggtcgcctcagtgacccacagctcagtggtcctggccacatgcggccatccttcgagccaccaccaaccaccattgctgctgtgcccccctacatcgggcccgacacacctgcccttcggactctgagcgagtacgcccggccccacgtcatgtcgcccaccaaccgcaaccaccccttctacatgccccttaaccccacggaccccctgctggcctaccacatgcctggcctctacaacgtcgaccccaccatccgcgagcgggagctccgggagcgggagatccgagagcgggagatccgngagcgngagctgcgggagaggatgaagccgggcttcgaggtgaagcccccagagctggaccccctgcacccagccgccaaccccatggagcactttgcccggcacagcgccctcaccatccccccgaccgccgggccccacccttttgcttctttccacccgggcctgaaccccttggagagggagagactggccctggcgggcccccagctgcggcccgagatgagctaccctgacagactggcagccgagcgtatccacgcagagcgcatggcatcgctgaccagcgatcccctggcccgactgcagatgttcaacgtgactccgcaccatcaccagcactctcacattcactcccacctccacctccaccagcaggaccccctccaccaaggttcagcaggccccgttcacccgctggtcgaccccctgactgccggtccccacctggctcgcttcccctacccgcctggcactctccccaaccctctgcttggacagcccccacacgagcacgagatgcttcgccacccagttttcggcaccccctacccccgtgacctgcctggggccatcccaccccccatgtcagcagcccaccagctgcaggccatgcatgcccagtcggccgagctgcagagactggccatggagcagcagtggctgcatggacacccccacatgcatggtggccacctaccaagtcaggaagattattacagtcgactgaagaaagaaggtgacaagcagttataagttatttatttgttaacgctggctgtggaaaccccagttcttggggggagaaacaggactttttacataaaataggagctgcaaaagcaaaaagaatatcttctaaagatttctttatatatttaaaaacccacaactaaaaatgtatccacatagtagtgttcgtttgtcgagaggatttcctgagactggtttggatctccctgcatgacagtcccccagaaacttagtgagtcctggactggactgaacatccagaaagcttccctgcaatcttggggtttggctttagttttcttttccttgatttctcagtaggtgctagaatccagttcacacccttcactgtgcgtgcagacacactgacacactccgccacgagtgctccagagcccacgaggcttgcagatcgggggcataggaatttggaatccaagagctataatttttaaaaaaaaaaatcttttattttaatacattgtaggaaatcttcataattggagaaagttctgcagcatggctttttacgtctgtaaataaataattttagaacagcctttttttcttccataaactactattgtgatctattttttccagccatgtcactaattgtgaattcctaccaactattgacagaatacagagttgattttttaataaaaagttatatataattatccctttaattaaagggagcaaaggggcgttccacatggacagaggcttggaccgaggcctggtcacagcagcgagcatccagggtttgcagggacgatgttacagactctgttttctgcctggcgtttcacttgtgtctgctcctagcctgtgctctgccagcagcacagacatctgctccatcagacctcttccattttgcacagggagtgcaggaggtgaatgttcactttctgttctccagtgtcactgttctgtttccacgggatggaaagcgcatgggcctgtgtccattgtagatttccttctagatttctgtgtacacacacttgattgttctggatgaatgtcttttttaatactccgaaaatttcatcatctaagaaaatgattccatacaaataactcagcacacaagtgacccaggacatatgcctgccaaagggatgtgttagaaggctgccttctcatgcgcattgtcacttggatcttgtggtgaggacggccccatctttcttgccacagattgaggccacttttgagcaagggagatcctggagttaagacaggtgttgggggcagcctgtattttaccctaggggcaggtctgcatggtgaccccacattgcactggtaaaccatttgagtcccactcttcatcctggaagtgggaactggagtcccacccacagtgcattcagaaagcatgctgtgtgggggctgcttctcaggaggccaggcccttctgagcggaaccgtcctggagagagcctgccctcgtttccaggctgcagccgtaacgcactttctcccaggctgagggcgggtgttctggggtgtctgccctctgtcggccctgcttcctgccaggacgtggcctcttccgatccttttctctcagacactggaggtctcttctgccattgtgctggtcccatcccaagaattgtaggacagagaccacactgggtcggcggacacaaagtccatccaggacccaggccgcagagggagcaggaagagatgctgatagtttgatctagaaaccagcagctactggctcaaattcaggttctggcgtcaaatagcgacatttccagtttctcttaaaaaccgtgtttggtttcagttgggataggcttgttttgtctgttgaaaatgtttctagttttttttctttcatttttctctcattccatttctgccttaactttagtttgttcacagggaggcaaagctgacatgaaccttttgtcgtgggacttcaggccacattggcttgaaggcattcgtttccttctggggtggggacaggccctcatggcaggcttgttcccgtggctctgagcgaggcctcttcctgctgggctcccagactcctgcatccaggcccccaccttctcggcttctggtttttctttctttttggtagaacacaacatctaccattcagttaaaccttctttatctcctcctctggcatccatttttccaaagaagagtcgagtcctctgaggtctgtgcttgaaagccgtccgaaggcattcttgttagctttgcttttctccccatatcccaaggcgaagcgctgagattcttccatctaaaaaaccctcgacccgaaaccctcaccagataaactacagtttgtttaggaggccctgaccttcatggtgtctttgaagcccaaccactcggtttccttcggattttcctccctttgttcggggtttggtttggctcctctgtgtgtgtccgtatcttgttcggtgtcctcgaggttgagcttcactccactgcggcagaggcagcgtgcacactcggatttgctacgtttctatatatcttgaagctaaatgtatatatgagtagtttgccatgagataacacagtgtaaacagtagacacccagaaatcgtgacttctgtgttctctccatttgagtattttgtaatttttttgaaatatttgtggacataaataaaaccaagctacactaca

SEQ ID NO: 65445 - DNA, 6921 bp, Homo sapiens
  misc_feature (3483)..(3483): n is a, c, g, or t
  misc_feature (3489)..(3489): n is a, c, g, or t
ctgtgaatcagcgtggctgagaaggctgcaagagtgggaagaagtcaaggaacctcacagagtaagagggaccatctcctcatgaacgtcaaatggtactaccgtcaatctgaggttccagattctgtgtatcagcatttggttcaggatcgacataatgaaaatgactctggaagagaacttgtcattacagacccagttatcaagaaccgagagctcttcatttctgattacgttgacacttaccatgctgctgcccttagagggaagtgtaacatctcccatttttctgacatatttgctgctagagagtttaaagcccgagtggattcatttttctacatattaggatataaccctgagacaaggaggctgaacagtacccagggggagattcgtgtcggtcctagtcatcaggccaaacttccagatctgcaaccatttccttctccagatggtgatacagtgacccaacatgaggaactggtctggatgcctggagttaacgactgtgacctccttatgtacttgagggcagcaaggagcatggcggcatttgcaggaatgtgtgatggaggctctacagaggacggctgtgtcgcagcctctcgggatgacaccactctgaatgcactgaacacactgcatgaaagcggttacgatgctggcaaagccctgcagcgcctggtgaagaagcctgtgcccaagctcatcgagaagtgctggaccgaggacgaagtgaaacgcttcgttaagggactcaggcagtacgggaagaacttcttcagaattagaaaggagctgcttcccaataaggaaacaggggagctgatcaccttctattactattggaagaagacccccgaagcagccagctcccgagcccatcgtaggcaccgcaggcaggccgtgttcaggaggattaagactcgcaccgcgtccacacccgtcaacacaccctccagacccccgtccagtgaattcttggacctaagttcagccagtgaagatgacttcgacagtgaggacagtgagcaggagctgaaggggtacgcctgccgccactgcttcaccaccacctccaaagattggcaccacggaggccgggagaacatcctgctttgcaccgactgtcgcatccacttcaagaaatacggtgagctcccgcccattgagaagcccgtggacccgccaccgtttatgttcaaacccgtcaaggaagaggatgatgggctcagtgggaagcatagcatgaggacacggcggagtcggggctcgatgtcgacactacgcagtggtcggaagaagcagccagccagccctgatggtcgcacctcacccatcaatgaagacatccgctccagcggccggaactcccccagcgctgccagtacctccagcaatgacagtaaagcagagacagtgaagaagtcggccaagaaggtgaaggaggaagcctcttcccctcttaagagtaacaaacgccagcgggagaaggtggcctctgatacggaggaggctgacaggaccagctccaagaagacaaaaacgcaggagatcagcaggcccaactcgccatctgaaggtgagggagagagttcagacagtcgcagcgtcaacgatgagggtagcagtgaccccaaagacatcgaccaggacaatcgcagcacgtccccgagcatccccagcccccaggacaatgagagtgactcggactcgtcagcccagcagcagatgctgcaggcccagcccccagccttgcaggctcccactggggtcaccccagctccctcctcagctcctccagggacccctcagctgcccacgccagggcccacgccctctgccactgcagttcccccacagggctcccccacggcctcccaggcccctaaccagccgcaggctcccacagcgcctgttccccacacccacatccaacaggcaccggccttgcacccccagcggccgccctcaccgcatcccccgccgcatccctcgccacatcccccactgcagcctctgactgggtcggcgggccagccttctgcaccctctcatgcccagcccccactgcacggtcagggcccacccggccctcacagcctgcaggctgggcccctgctgcagcacccaggccccccacagccctttggcctccctccccaggcctcccaaggccaggcccctctggggacctccccagcagcagcgtaccctcacacctccctgcagctgccagcctctcagtcagcgctgcagtcccaacagcctccacgggagcagcccctgccaccagcgcccttggccatgccccacatcaagcccccgcctaccactcccatcccccagctgccggcgccacaggcccacaagcaccctccccacctctcggggccctcacccttctccatgaatgccaacctgcctccccctccagccctgaagcccctgagctccctgtccacacatcaccccccgtcggctcaccccccacccctgcaactcatgcctcagagccagccattgccctcctcgcccgcccagccccccgggctgacccagagccagaacctgcccccgccccctgcctcccacccccctacaggcctccaccaggtggccccccaacccccgtttgctcagcacccctttgtccctggaggccctcctcccatcacccctccgacctgcccctccacctctaccccaccggcgggacctggcacctcggcccagccaccctgctctggtgcggcggcttcaggaggcagcatagcgggggggtcgtcctgcccactccccaccgtccagatcaaggaggaggctctggacgacgctgaggagcctgagagcccccctcccccaccaaggagcccgtccccggagcccactgtggtggacacccccagtcacgccagccagtcagctaggttctacaaacacctggaccggggctacaactcgtgtgcccggacagacctgtacttcatgcctctggccgggtccaagctggccaagaagagggaggaggccattgagaaggccaagcgcgaggctgagcagaaagcccgagaggagcgagagcgggagaaggagaaggagaaggagcgggagcgggagcgagagcgggagcgcgaggcagagcgggcggctaaggcgtccagctcagcgcatgaaggtcgcctcagtgacccacagctcagtggtcctggccacatgcggccatccttcgagccaccaccaaccaccattgctgctgtgcccccctacatcgggcccgacacacctgcccttcggactctgagcgagtacgcccggccccacgtcatgtcgcccaccaaccgcaaccaccccttctacatgccccttaaccccacggaccccctgctggcctaccacatgcctggcctctacaacgtcgaccccaccatccgcgagcgggagctccgggagcgggagatccgagagcgggagatccgngagcgngagctgcgggagaggatgaagccgggcttcgaggtgaagcccccagagctggaccccctgcacccagccgccaaccccatggagcactttgcccggcacagcgccctcaccatccccccgaccgccgggccccacccttttgcttctttccacccgggcctgaaccccttggagagggagagactggccctggcgggcccccagctgcggcccgagatgagctaccctgacagactggcagccgagcgtatccacgcagagcgcatggcatcgctgaccagcgatcccctggcccgactgcagatgttcaacgtgactccgcaccatcaccagcactctcacattcactcccacctccacctccaccagcaggaccccctccaccaaggttcagcaggccccgttcacccgctggtcgaccccctgactgccggtccccacctggctcgcttcccctacccgcctggcactctccccaaccctctgcttggacagcccccacacgagcacgagatgcttcgccacccagttttcggcaccccctacccccgtgacctgcctggggccatcccaccccccatgtcagcagcccaccagctgcaggccatgcatgcccagtcggccgagctgcagagactggccatggagcagcagtggctgcatggacacccccacatgcatggtggccacctaccaagtcaggaagattattacagtcgactgaagaaagaaggtgacaagcagttataagttatttatttgttaacgctggctgtggaaaccccagttcttggggggagaaacaggactttttacataaaataggagctgcaaaagcaaaaagaatatcttctaaagatttctttatatatttaaaaacccacaactaaaaatgtatccacatagtagtgttcgtttgtcgagaggatttcctgagactggtttggatctccctgcatgacagtcccccagaaacttagtgagtcctggactggactgaacatccagaaagcttccctgcaatcttggggtttggctttagttttcttttccttgatttctcagtaggtgctagaatccagttcacacccttcactgtgcgtgcagacacactgacacactccgccacgagtgctccagagcccacgaggcttgcagatcgggggcataggaatttggaatccaagagctataatttttaaaaaaaaaaatcttttattttaatacattgtaggaaatcttcataattggagaaagttctgcagcatggctttttacgtctgtaaataaataattttagaacagcctttttttcttccataaactactattgtgatctattttttccagccatgtcactaattgtgaattcctaccaactattgacagaatacagagttgattttttaataaaaagttatatataattatccctttaattaaagggagcaaaggggcgttccacatggacagaggcttggaccgaggcctggtcacagcagcgagcatccagggtttgcagggacgatgttacagactctgttttctgcctggcgtttcacttgtgtctgctcctagcctgtgctctgccagcagcacagacatctgctccatcagacctcttccattttgcacagggagtgcaggaggtgaatgttcactttctgttctccagtgtcactgttctgtttccacgggatggaaagcgcatgggcctgtgtccattgtagatttccttctagatttctgtgtacacacacttgattgttctggatgaatgtcttttttaatactccgaaaatttcatcatctaagaaaatgattccatacaaataactcagcacacaagtgacccaggacatatgcctgccaaagggatgtgttagaaggctgccttctcatgcgcattgtcacttggatcttgtggtgaggacggccccatctttcttgccacagattgaggccacttttgagcaagggagatcctggagttaagacaggtgttgggggcagcctgtattttaccctaggggcaggtctgcatggtgaccccacattgcactggtaaaccatttgagtcccactcttcatcctggaagtgggaactggagtcccacccacagtgcattcagaaagcatgctgtgtgggggctgcttctcaggaggccaggcccttctgagcggaaccgtcctggagagagcctgccctcgtttccaggctgcagccgtaacgcactttctcccaggctgagggcgggtgttctggggtgtctgccctctgtcggccctgcttcctgccaggacgtggcctcttccgatccttttctctcagacactggaggtctcttctgccattgtgctggtcccatcccaagaattgtaggacagagaccacactgggtcggcggacacaaagtccatccaggacccaggccgcagagggagcaggaagagatgctgatagtttgatctagaaaccagcagctactggctcaaattcaggttctggcgtcaaatagcgacatttccagtttctcttaaaaaccgtgtttggtttcagttgggataggcttgttttgtctgttgaaaatgtttctagttttttttctttcatttttctctcattccatttctgccttaactttagtttgttcacagggaggcaaagctgacatgaaccttttgtcgtgggacttcaggccacattggcttgaaggcattcgtttccttctggggtggggacaggccctcatggcaggcttgttcccgtggctctgagcgaggcctcttcctgctgggctcccagactcctgcatccaggcccccaccttctcggcttctggtttttctttctttttggtagaacacaacatctaccattcagttaaaccttctttatctcctcctctggcatccatttttccaaagaagagtcgagtcctctgaggtctgtgcttgaaagccgtccgaaggcattcttgttagctttgcttttctccccatatcccaaggcgaagcgctgagattcttccatctaaaaaaccctcgacccgaaaccctcaccagataaactacagtttgtttaggaggccctgaccttcatggtgtctttgaagcccaaccactcggtttccttcggattttcctccctttgttcggggtttggtttggctcctctgtgtgtgtccgtatcttgttcggtgtcctcgaggttgagcttcactccactgcggcagaggcagcgtgcacactcggatttgctacgtttctatatatcttgaagctaaatgtatatatgagtagtttgccatgagataacacagtgtaaacagtagacacccagaaatcgtgacttctgtgttctctccatttgagtattttgtaatttttttgaaatatttgtggacataaataaaaccaagctacactaca

SEQ ID NO: 65446 - DNA, 6367 bp, Homo sapiens
  misc_feature (2929)..(2929): n is a, c, g, or t
  misc_feature (2935)..(2935): n is a, c, g, or t
gagccggagcccagtgacaggcgacggcctcttgccgccccggaccccgggcgcttacctgtggctgctggggtcggccgcccgggaccaggctgggagccccgagggttcccttctggagaagagtcaccgggtttggttctgtttcccctttctgctcgacacttctgggaagcttggttctcagaaacgcttcgttaagggactcaggcagtacgggaagaacttcttcagaattagaaaggagctgcttcccaataaggaaacaggggagctgatcaccttctattactattggaagaagacccccgaagcagccagctcccgagcccatcgtaggcaccgcaggcaggccgtgttcaggaggattaagactcgcaccgcgtccacacccgtcaacacaccctccagacccccgtccagtgaattcttggacctaagttcagccagtgaagatgacttcgacagtgaggacagtgagcaggagctgaaggggtacgcctgccgccactgcttcaccaccacctccaaagattggcaccacggaggccgggagaacatcctgctttgcaccgactgtcgcatccacttcaagaaatacggtgagctcccgcccattgagaagcccgtggacccgccaccgtttatgttcaaacccgtcaaggaagaggatgatgggctcagtgggaagcatagcatgaggacacggcggagtcggggctcgatgtcgacactacgcagtggtcggaagaagcagccagccagccctgatggtcgcacctcacccatcaatgaagacatccgctccagcggccggaactcccccagcgctgccagtacctccagcaatgacagtaaagcagagacagtgaagaagtcggccaagaaggtgaaggaggaagcctcttcccctcttaagagtaacaaacgccagcgggagaaggtggcctctgatacggaggaggctgacaggaccagctccaagaagacaaaaacgcaggagatcagcaggcccaactcgccatctgaaggtgagggagagagttcagacagtcgcagcgtcaacgatgagggtagcagtgaccccaaagacatcgaccaggacaatcgcagcacgtccccgagcatccccagcccccaggacaatgagagtgactcggactcgtcagcccagcagcagatgctgcaggcccagcccccagccttgcaggctcccactggggtcaccccagctccctcctcagctcctccagggacccctcagctgcccacgccagggcccacgccctctgccactgcagttcccccacagggctcccccacggcctcccaggcccctaaccagccgcaggctcccacagcgcctgttccccacacccacatccaacaggcaccggccttgcacccccagcggccgccctcaccgcatcccccgccgcatccctcgccacatcccccactgcagcctctgactgggtcggcgggccagccttctgcaccctctcatgcccagcccccactgcacggtcagggcccacccggccctcacagcctgcaggctgggcccctgctgcagcacccaggccccccacagccctttggcctccctccccaggcctcccaaggccaggcccctctggggacctccccagcagcagcgtaccctcacacctccctgcagctgccagcctctcagtcagcgctgcagtcccaacagcctccacgggagcagcccctgccaccagcgcccttggccatgccccacatcaagcccccgcctaccactcccatcccccagctgccggcgccacaggcccacaagcaccctccccacctctcggggccctcacccttctccatgaatgccaacctgcctccccctccagccctgaagcccctgagctccctgtccacacatcaccccccgtcggctcaccccccacccctgcaactcatgcctcagagccagccattgccctcctcgcccgcccagccccccgggctgacccagagccagaacctgcccccgccccctgcctcccacccccctacaggcctccaccaggtggccccccaacccccgtttgctcagcacccctttgtccctggaggccctcctcccatcacccctccgacctgcccctccacctctaccccaccggcgggacctggcacctcggcccagccaccctgctctggtgcggcggcttcaggaggcagcatagcgggggggtcgtcctgcccactccccaccgtccagatcaaggaggaggctctggacgacgctgaggagcctgagagcccccctcccccaccaaggagcccgtccccggagcccactgtggtggacacccccagtcacgccagccagtcagctaggttctacaaacacctggaccggggctacaactcgtgtgcccggacagacctgtacttcatgcctctggccgggtccaagctggccaagaagagggaggaggccattgagaaggccaagcgcgaggctgagcagaaagcccgagaggagcgagagcgggagaaggagaaggagaaggagcgggagcgggagcgagagcgggagcgcgaggcagagcgggcggctaaggcgtccagctcagcgcatgaaggtcgcctcagtgacccacagctcagtggtcctggccacatgcggccatccttcgagccaccaccaaccaccattgctgctgtgcccccctacatcgggcccgacacacctgcccttcggactctgagcgagtacgcccggccccacgtcatgtcgcccaccaaccgcaaccaccccttctacatgccccttaaccccacggaccccctgctggcctaccacatgcctggcctctacaacgtcgaccccaccatccgcgagcgggagctccgggagcgggagatccgagagcgggagatccgngagcgngagctgcgggagaggatgaagccgggcttcgaggtgaagcccccagagctggaccccctgcacccagccgccaaccccatggagcactttgcccggcacagcgccctcaccatccccccgaccgccgggccccacccttttgcttctttccacccgggcctgaaccccttggagagggagagactggccctggcgggcccccagctgcggcccgagatgagctaccctgacagactggcagccgagcgtatccacgcagagcgcatggcatcgctgaccagcgatcccctggcccgactgcagatgttcaacgtgactccgcaccatcaccagcactctcacattcactcccacctccacctccaccagcaggaccccctccaccaaggttcagcaggccccgttcacccgctggtcgaccccctgactgccggtccccacctggctcgcttcccctacccgcctggcactctccccaaccctctgcttggacagcccccacacgagcacgagatgcttcgccacccagttttcggcaccccctacccccgtgacctgcctggggccatcccaccccccatgtcagcagcccaccagctgcaggccatgcatgcccagtcggccgagctgcagagactggccatggagcagcagtggctgcatggacacccccacatgcatggtggccacctaccaagtcaggaagattattacagtcgactgaagaaagaaggtgacaagcagttataagttatttatttgttaacgctggctgtggaaaccccagttcttggggggagaaacaggactttttacataaaataggagctgcaaaagcaaaaagaatatcttctaaagatttctttatatatttaaaaacccacaactaaaaatgtatccacatagtagtgttcgtttgtcgagaggatttcctgagactggtttggatctccctgcatgacagtcccccagaaacttagtgagtcctggactggactgaacatccagaaagcttccctgcaatcttggggtttggctttagttttcttttccttgatttctcagtaggtgctagaatccagttcacacccttcactgtgcgtgcagacacactgacacactccgccacgagtgctccagagcccacgaggcttgcagatcgggggcataggaatttggaatccaagagctataatttttaaaaaaaaaaatcttttattttaatacattgtaggaaatcttcataattggagaaagttctgcagcatggctttttacgtctgtaaataaataattttagaacagcctttttttcttccataaactactattgtgatctattttttccagccatgtcactaattgtgaattcctaccaactattgacagaatacagagttgattttttaataaaaagttatatataattatccctttaattaaagggagcaaaggggcgttccacatggacagaggcttggaccgaggcctggtcacagcagcgagcatccagggtttgcagggacgatgttacagactctgttttctgcctggcgtttcacttgtgtctgctcctagcctgtgctctgccagcagcacagacatctgctccatcagacctcttccattttgcacagggagtgcaggaggtgaatgttcactttctgttctccagtgtcactgttctgtttccacgggatggaaagcgcatgggcctgtgtccattgtagatttccttctagatttctgtgtacacacacttgattgttctggatgaatgtcttttttaatactccgaaaatttcatcatctaagaaaatgattccatacaaataactcagcacacaagtgacccaggacatatgcctgccaaagggatgtgttagaaggctgccttctcatgcgcattgtcacttggatcttgtggtgaggacggccccatctttcttgccacagattgaggccacttttgagcaagggagatcctggagttaagacaggtgttgggggcagcctgtattttaccctaggggcaggtctgcatggtgaccccacattgcactggtaaaccatttgagtcccactcttcatcctggaagtgggaactggagtcccacccacagtgcattcagaaagcatgctgtgtgggggctgcttctcaggaggccaggcccttctgagcggaaccgtcctggagagagcctgccctcgtttccaggctgcagccgtaacgcactttctcccaggctgagggcgggtgttctggggtgtctgccctctgtcggccctgcttcctgccaggacgtggcctcttccgatccttttctctcagacactggaggtctcttctgccattgtgctggtcccatcccaagaattgtaggacagagaccacactgggtcggcggacacaaagtccatccaggacccaggccgcagagggagcaggaagagatgctgatagtttgatctagaaaccagcagctactggctcaaattcaggttctggcgtcaaatagcgacatttccagtttctcttaaaaaccgtgtttggtttcagttgggataggcttgttttgtctgttgaaaatgtttctagttttttttctttcatttttctctcattccatttctgccttaactttagtttgttcacagggaggcaaagctgacatgaaccttttgtcgtgggacttcaggccacattggcttgaaggcattcgtttccttctggggtggggacaggccctcatggcaggcttgttcccgtggctctgagcgaggcctcttcctgctgggctcccagactcctgcatccaggcccccaccttctcggcttctggtttttctttctttttggtagaacacaacatctaccattcagttaaaccttctttatctcctcctctggcatccatttttccaaagaagagtcgagtcctctgaggtctgtgcttgaaagccgtccgaaggcattcttgttagctttgcttttctccccatatcccaaggcgaagcgctgagattcttccatctaaaaaaccctcgacccgaaaccctcaccagataaactacagtttgtttaggaggccctgaccttcatggtgtctttgaagcccaaccactcggtttccttcggattttcctccctttgttcggggtttggtttggctcctctgtgtgtgtccgtatcttgttcggtgtcctcgaggttgagcttcactccactgcggcagaggcagcgtgcacactcggatttgctacgtttctatatatcttgaagctaaatgtatatatgagtagtttgccatgagataacacagtgtaaacagtagacacccagaaatcgtgacttctgtgttctctccatttgagtattttgtaatttttttgaaatatttgtggacataaataaaaccaagctacactaca

SEQ ID NO: 65447 - DNA, 5947 bp, Homo sapiens
  misc_feature (2848)..(2848): n is a, c, g, or t
  misc_feature (2854)..(2854): n is a, c, g, or t
gagccggagcccagtgacaggcgacggcctcttgccgccccggaccccgggcgcttacctgtggctgctggggtcggccgcccgggaccaggctgggagccccgagaaacgcttcgttaagggactcaggcagtacgggaagaacttcttcagaattagaaaggagctgcttcccaataaggaaacaggggagctgatcaccttctattactattggaagaagacccccgaagcagccagctcccgagcccatcgtaggcaccgcaggcaggccgtgttcaggaggattaagactcgcaccgcgtccacacccgtcaacacaccctccagacccccgtccagtgaattcttggacctaagttcagccagtgaagatgacttcgacagtgaggacagtgagcaggagctgaaggggtacgcctgccgccactgcttcaccaccacctccaaagattggcaccacggaggccgggagaacatcctgctttgcaccgactgtcgcatccacttcaagaaatacggtgagctcccgcccattgagaagcccgtggacccgccaccgtttatgttcaaacccgtcaaggaagaggatgatgggctcagtgggaagcatagcatgaggacacggcggagtcggggctcgatgtcgacactacgcagtggtcggaagaagcagccagccagccctgatggtcgcacctcacccatcaatgaagacatccgctccagcggccggaactcccccagcgctgccagtacctccagcaatgacagtaaagcagagacagtgaagaagtcggccaagaaggtgaaggaggaagcctcttcccctcttaagagtaacaaacgccagcgggagaaggtggcctctgatacggaggaggctgacaggaccagctccaagaagacaaaaacgcaggagatcagcaggcccaactcgccatctgaaggtgagggagagagttcagacagtcgcagcgtcaacgatgagggtagcagtgaccccaaagacatcgaccaggacaatcgcagcacgtccccgagcatccccagcccccaggacaatgagagtgactcggactcgtcagcccagcagcagatgctgcaggcccagcccccagccttgcaggctcccactggggtcaccccagctccctcctcagctcctccagggacccctcagctgcccacgccagggcccacgccctctgccactgcagttcccccacagggctcccccacggcctcccaggcccctaaccagccgcaggctcccacagcgcctgttccccacacccacatccaacaggcaccggccttgcacccccagcggccgccctcaccgcatcccccgccgcatccctcgccacatcccccactgcagcctctgactgggtcggcgggccagccttctgcaccctctcatgcccagcccccactgcacggtcagggcccacccggccctcacagcctgcaggctgggcccctgctgcagcacccaggccccccacagccctttggcctccctccccaggcctcccaaggccaggcccctctggggacctccccagcagcagcgtaccctcacacctccctgcagctgccagcctctcagtcagcgctgcagtcccaacagcctccacgggagcagcccctgccaccagcgcccttggccatgccccacatcaagcccccgcctaccactcccatcccccagctgccggcgccacaggcccacaagcaccctccccacctctcggggccctcacccttctccatgaatgccaacctgcctccccctccagccctgaagcccctgagctccctgtccacacatcaccccccgtcggctcaccccccacccctgcaactcatgcctcagagccagccattgccctcctcgcccgcccagccccccgggctgacccagagccagaacctgcccccgccccctgcctcccacccccctacaggcctccaccaggtggccccccaacccccgtttgctcagcacccctttgtccctggaggccctcctcccatcacccctccgacctgcccctccacctctaccccaccggcgggacctggcacctcggcccagccaccctgctctggtgcggcggcttcaggaggcagcatagcgggggggtcgtcctgcccactccccaccgtccagatcaaggaggaggctctggacgacgctgaggagcctgagagcccccctcccccaccaaggagcccgtccccggagcccactgtggtggacacccccagtcacgccagccagtcagctaggttctacaaacacctggaccggggctacaactcgtgtgcccggacagacctgtacttcatgcctctggccgggtccaagctggccaagaagagggaggaggccattgagaaggccaagcgcgaggctgagcagaaagcccgagaggagcgagagcgggagaaggagaaggagaaggagcgggagcgggagcgagagcgggagcgcgaggcagagcgggcggctaaggcgtccagctcagcgcatgaaggtcgcctcagtgacccacagctcagtggtcctggccacatgcggccatccttcgagccaccaccaaccaccattgctgctgtgcccccctacatcgggcccgacacacctgcccttcggactctgagcgagtacgcccggccccacgtcatgtcgcccaccaaccgcaaccaccccttctacatgccccttaaccccacggaccccctgctggcctaccacatgcctggcctctacaacgtcgaccccaccatccgcgagcgggagctccgggagcgggagatccgagagcgggagatccgngagcgngagctgcgggagaggatgaagccgggcttcgaggtgaagcccccagagctggaccccctgcacccagccgccaaccccatggagcactttgcccggcacagcgccctcaccatccccccgaccgccgggccccacccttttgcttctttccacccgggcctgaaccccttggagagggagagactggccctggcgggcccccagctgcggcccgagatgagctaccctgacagactggcagccgagcgtatccacgcagagcgcatggcatcgctgaccagcgatcccctggcccgactgcagatgttcaacgtgactccgcaccatcaccagcactctcacattcactcccacctccacctccaccagcaggaccccctccaccaaggttcagcaggccccgttcacccgctggtcgaccccctgactgccggtccccacctggctcgcttcccctacccgcctggcactctccccaaccctctgcttggacagcccccacacgagcacgagatgcttcgccacccagttttcggcaccccctacccccgtgacctgcctggggccatcccaccccccatgtcagcagcccaccagctgcaggccatgcatgcccagtcggccgagctgcagagactggccatggagcagcagtggctgcatggacacccccacatgcatggtggccacctaccaagtcaggaagattattacagtcgactgaagaaagaaggtgacaagcagttataagttatttatttgttaacgctggctgtggaaaccccagttcttggggggagaaacaggactttttacataaaataggagctgcaaaagcaaaaagaatatcttctaaagatttctttatatatttaaaaacccacaactaaaaatgtatccacatagtagtgttcgtttgtcgagaggatttcctgagactggtttggatctccctgcatgacagtcccccagaaacttagtgagtcctggactggactgaacatccagaaagcttccctgcaatcttggggtttggctttagttttcttttccttgatttctcagtaggtgctagaatccagttcacacccttcactgtgcgtgcagacacactgacacactccgccacgagtgctccagagcccacgaggcttgcagatcgggggcataggaatttggaatccaagagctataatttttaaaaaaaaaaatcttttattttaatacattgtaggaaatcttcataattggagaaagttctgcagcatggctttttacgtctgtaaataaataattttagaacagcctttttttcttccataaactactattgtgatctattttttccagccatgtcactaattgtgaattcctaccaactattgacagaatacagagttgattttttaataaaaagttatatataattatccctttaattaaagggagcaaaggggcgttccacatggacagaggcttggaccgaggcctggtcacagcagcgagcatccagggtttgcagggacgatgttacagactctgttttctgcctggcgtttcacttgtgtctgctcctagcctgtgctctgccagcagcacagacatctgctccatcagacctcttccattttgcacagggagtgcaggaggtgaatgttcactttctgttctccagtgtcactgttctgtttccacgggatggaaagcgcatgggcctgtgtccattgtagatttccttctagatttctgtgtacacacacttgattgttctggatgaatgtcttttttaatactccgaaaatttcatcatctaagaaaatgattccatacaaataactcagcacacaagtgacccaggacatatgcctgccaaagggatgtgttagaaggctgccttctcatgcgcattgtcacttggatcttgtggtgaggacggccccatctttcttgccacagattgaggccacttttgagcaagggagatcctggagttaagacaggtgttgggggcagcctgtattttaccctaggggcaggtctgcatggtgaccccacattgcactggtaaaccatttgagtcccactcttcatcctggaagtgggaactggagtcccacccacagtgcattcagaaagcatgctgtgtgggggctgcttctcaggaggccaggcccttctgagcggaaccgtcctggagagagcctgccctcgtttccaggctgcagccgtaacgcactttctcccaggctgagggcgggtgttctggggtgtctgccctctgtcggccctgcttcctgccaggacgtggcctcttccgatccttttctctcagacactggaggtctcttctgccattgtgctggtcccatcccaagaattgtaggacagagaccacactgggtcggcggacacaaagtccatccaggacccaggccgcagagggagcaggaagagatgctgatagtttgatctagaaaccagcagctactggctcaaattcaggttctggcgtcaaatagcgacatttccagtttctcttaaaaaccgtgtttggtttcagttgggataggcttgttttgtctgttgaaaatgtttctagttttttttctttcatttttctctcattccatttctgccttaactttagtttgtttttctccccatatcccaaggcgaagcgctgagattcttccatctaaaaaaccctcgacccgaaaccctcaccagataaactacagtttgtttaggaggccctgaccttcatggtgtctttgaagcccaaccactcggtttccttcggattttcctccctttgttcggggtttggtttggctcctctgtgtgtgtccgtatcttgttcggtgtcctcgaggttgagcttcactccactgcggcagaggcagcgtgcacactcggatttgctacgtttctatatatcttgaagctaaatgtatatatgagtagtttgccatgagataacacagtgtaaacagtagacacccagaaatcgtgacttctgtgttctctccatttgagtattttgtaatttttttgaaatatttgtggacataaataaaaccaagctacactaca

SEQ ID NO: 65448 - DNA, 8268 bp, Homo sapiens
  misc_feature (4830)..(4830): n is a, c, g, or t
  misc_feature (4836)..(4836): n is a, c, g, or t
gcaaccctccgcgctccggagcctcctcagcctcccgcacaccccgagacgctcgccccgctgggcctcggtccccgcctcctcccccgtccttttcccctctctcgctccccacattgtctctgcctcattttctctcctagttgaggattaaaaaaaaaaaaaaatcaccatcatcctcagggagccccctcgccctcggaaaacaaaaccagacatgatcctgggctcctgcttctgaaagatctgcccgaccgaggaggagggagcctaggttcaagtcgcaggaaaggtcacggcagggaagccccctcagcccctccgcgtcgcctccccgcgggccgcccctctcggccctgcgccccgcggccccgcagcctccgcgcggcctcccgccccatccccgccactttccccggagctgggccgcgaacacctcactattgatggtgtagcgctttaggggaagcatttttgaaacgttggggttgttggagtggttggattttccctggaattgagtgagaaattcagaagactgaagcccaggcttactgtctacctttcacggaggcctagccgtgagaggacagaagaaggcacgtggcgaatcatgacagcggacaaagacaaagacaaagacaaagagaaggaccgggaccgagaccgggaccgagagagagagaaaagagacaaagcaagagagagtgagaattcaaggccacgccggagctgtaccttggaaggaggagccaaaaattatgctgagagtgatcacagtgaagacgaggacaatgacaacaatagtgccaccgcagaggagtccacgaagaagaataagaagaaaccaccgaaaaaaaagtctcgttatgaaaggacagataccggtgagataacatcctacatcactgaagatgatgtggtctacagaccaggagactgtgtgtatatcgagagtcggaggccaaacacaccgtatttcatctgtagcattcaagacttcaaactggtccacaactcccaggcctgttgcagatctccaactcctgctttgtgtgaccccccagcatgctctctgccggtggcatcacagccaccacagcatctttctgaagccgggagagggcctgtagggagtaagagggaccatctcctcatgaacgtcaaatggtactaccgtcaatctgaggttccagattctgtgtatcagcatttggttcaggatcgacataatgaaaatgactctggaagagaacttgtcattacagacccagttatcaagaaccgagagctcttcatttctgattacgttgacacttaccatgctgctgcccttagagggaagtgtaacatctcccatttttctgacatatttgctgctagagagtttaaagcccgagtggattcatttttctacatattaggatataaccctgagacaaggaggctgaacagtacccagggggagattcgtgtcggtcctagtcatcaggccaaacttccagatctgcaaccatttccttctccagatggtgatacagtgacccaacatgaggaactggtctggatgcctggagttaacgactgtgacctccttatgtacttgagggcagcaaggagcatggcggcatttgcaggaatgtgtgatggaggctctacagaggacggctgtgtcgcagcctctcgggatgacaccactctgaatgcactgaacacactgcatgaaagcggttacgatgctggcaaagccctgcagcgcctggtgaagaagcctgtgcccaagctcatcgagaagtgctggaccgaggacgaagtgaaacgcttcgttaagggactcaggcagtacgggaagaacttcttcagaattagaaaggagctgcttcccaataaggaaacaggggagctgatcaccttctattactattggaagaagacccccgaagcagccagctcccgagcccatcgtaggcaccgcaggcaggccgtgttcaggaggattaagactcgcaccgcgtccacacccgtcaacacaccctccagacccccgtccagtgaattcttggacctaagttcagccagtgaagatgacttcgacagtgaggacagtgagcaggagctgaaggggtacgcctgccgccactgcttcaccaccacctccaaagattggcaccacggaggccgggagaacatcctgctttgcaccgactgtcgcatccacttcaagaaatacggtgagctcccgcccattgagaagcccgtggacccgccaccgtttatgttcaaacccgtcaaggaagaggatgatgggctcagtgggaagcatagcatgaggacacggcggagtcggggctcgatgtcgacactacgcagtggtcggaagaagcagccagccagccctgatggtcgcacctcacccatcaatgaagacatccgctccagcggccggaactcccccagcgctgccagtacctccagcaatgacagtaaagcagagacagtgaagaagtcggccaagaaggtgaaggaggaagcctcttcccctcttaagagtaacaaacgccagcgggagaaggtggcctctgatacggaggaggctgacaggaccagctccaagaagacaaaaacgcaggtgaggtttgctgctgagccttgctgagtaaagctaatgcttcttcagaagcccccagccggggttctccctagttggtggccgtgccctgtctcctagggtggggctggagtggcctttgacactggctgggtcagggcacgacctgtggtcccggagccaagcttgctgcttcatctgcacaaacattactgtgtgtccggcactggtggtgcagagcagacagggctctgccctcctgggacttccatccttcccttctctgactccaggagatcagcaggcccaactcgccatctgaaggtgagggagagagttcagacagtcgcagcgtcaacgatgagggtagcagtgaccccaaagacatcgaccaggacaatcgcagcacgtccccgagcatccccagcccccaggacaatgagagtgactcggactcgtcagcccagcagcagatgctgcaggcccagcccccagccttgcaggctcccactggggtcaccccagctccctcctcagctcctccagggacccctcagctgcccacgccagggcccacgccctctgccactgcagttcccccacagggctcccccacggcctcccaggcccctaaccagccgcaggctcccacagcgcctgttccccacacccacatccaacaggcaccggccttgcacccccagcggccgccctcaccgcatcccccgccgcatccctcgccacatcccccactgcagcctctgactgggtcggcgggccagccttctgcaccctctcatgcccagcccccactgcacggtcagggcccacccggccctcacagcctgcaggctgggcccctgctgcagcacccaggccccccacagccctttggcctccctccccaggcctcccaaggccaggcccctctggggacctccccagcagcagcgtaccctcacacctccctgcagctgccagcctctcagtcagcgctgcagtcccaacagcctccacgggagcagcccctgccaccagcgcccttggccatgccccacatcaagcccccgcctaccactcccatcccccagctgccggcgccacaggcccacaagcaccctccccacctctcggggccctcacccttctccatgaatgccaacctgcctccccctccagccctgaagcccctgagctccctgtccacacatcaccccccgtcggctcaccccccacccctgcaactcatgcctcagagccagccattgccctcctcgcccgcccagccccccgggctgacccagagccagaacctgcccccgccccctgcctcccacccccctacaggcctccaccaggtggccccccaacccccgtttgctcagcacccctttgtccctggaggccctcctcccatcacccctccgacctgcccctccacctctaccccaccggcgggacctggcacctcggcccagccaccctgctctggtgcggcggcttcaggaggcagcatagcgggggggtcgtcctgcccactccccaccgtccagatcaaggaggaggctctggacgacgctgaggagcctgagagcccccctcccccaccaaggagcccgtccccggagcccactgtggtggacacccccagtcacgccagccagtcagctaggttctacaaacacctggaccggggctacaactcgtgtgcccggacagacctgtacttcatgcctctggccgggtccaagctggccaagaagagggaggaggccattgagaaggccaagcgcgaggctgagcagaaagcccgagaggagcgagagcgggagaaggagaaggagaaggagcgggagcgggagcgagagcgggagcgcgaggcagagcgggcggctaaggcgtccagctcagcgcatgaaggtcgcctcagtgacccacagctcagtggtcctggccacatgcggccatccttcgagccaccaccaaccaccattgctgctgtgcccccctacatcgggcccgacacacctgcccttcggactctgagcgagtacgcccggccccacgtcatgtcgcccaccaaccgcaaccaccccttctacatgccccttaaccccacggaccccctgctggcctaccacatgcctggcctctacaacgtcgaccccaccatccgcgagcgggagctccgggagcgggagatccgagagcgggagatccgngagcgngagctgcgggagaggatgaagccgggcttcgaggtgaagcccccagagctggaccccctgcacccagccgccaaccccatggagcactttgcccggcacagcgccctcaccatccccccgaccgccgggccccacccttttgcttctttccacccgggcctgaaccccttggagagggagagactggccctggcgggcccccagctgcggcccgagatgagctaccctgacagactggcagccgagcgtatccacgcagagcgcatggcatcgctgaccagcgatcccctggcccgactgcagatgttcaacgtgactccgcaccatcaccagcactctcacattcactcccacctccacctccaccagcaggaccccctccaccaaggttcagcaggccccgttcacccgctggtcgaccccctgactgccggtccccacctggctcgcttcccctacccgcctggcactctccccaaccctctgcttggacagcccccacacgagcacgagatgcttcgccacccagttttcggcaccccctacccccgtgacctgcctggggccatcccaccccccatgtcagcagcccaccagctgcaggccatgcatgcccagtcggccgagctgcagagactggccatggagcagcagtggctgcatggacacccccacatgcatggtggccacctaccaagtcaggaagattattacagtcgactgaagaaagaaggtgacaagcagttataagttatttatttgttaacgctggctgtggaaaccccagttcttggggggagaaacaggactttttacataaaataggagctgcaaaagcaaaaagaatatcttctaaagatttctttatatatttaaaaacccacaactaaaaatgtatccacatagtagtgttcgtttgtcgagaggatttcctgagactggtttggatctccctgcatgacagtcccccagaaacttagtgagtcctggactggactgaacatccagaaagcttccctgcaatcttggggtttggctttagttttcttttccttgatttctcagtaggtgctagaatccagttcacacccttcactgtgcgtgcagacacactgacacactccgccacgagtgctccagagcccacgaggcttgcagatcgggggcataggaatttggaatccaagagctataatttttaaaaaaaaaaatcttttattttaatacattgtaggaaatcttcataattggagaaagttctgcagcatggctttttacgtctgtaaataaataattttagaacagcctttttttcttccataaactactattgtgatctattttttccagccatgtcactaattgtgaattcctaccaactattgacagaatacagagttgattttttaataaaaagttatatataattatccctttaattaaagggagcaaaggggcgttccacatggacagaggcttggaccgaggcctggtcacagcagcgagcatccagggtttgcagggacgatgttacagactctgttttctgcctggcgtttcacttgtgtctgctcctagcctgtgctctgccagcagcacagacatctgctccatcagacctcttccattttgcacagggagtgcaggaggtgaatgttcactttctgttctccagtgtcactgttctgtttccacgggatggaaagcgcatgggcctgtgtccattgtagatttccttctagatttctgtgtacacacacttgattgttctggatgaatgtcttttttaatactccgaaaatttcatcatctaagaaaatgattccatacaaataactcagcacacaagtgacccaggacatatgcctgccaaagggatgtgttagaaggctgccttctcatgcgcattgtcacttggatcttgtggtgaggacggccccatctttcttgccacagattgaggccacttttgagcaagggagatcctggagttaagacaggtgttgggggcagcctgtattttaccctaggggcaggtctgcatggtgaccccacattgcactggtaaaccatttgagtcccactcttcatcctggaagtgggaactggagtcccacccacagtgcattcagaaagcatgctgtgtgggggctgcttctcaggaggccaggcccttctgagcggaaccgtcctggagagagcctgccctcgtttccaggctgcagccgtaacgcactttctcccaggctgagggcgggtgttctggggtgtctgccctctgtcggccctgcttcctgccaggacgtggcctcttccgatccttttctctcagacactggaggtctcttctgccattgtgctggtcccatcccaagaattgtaggacagagaccacactgggtcggcggacacaaagtccatccaggacccaggccgcagagggagcaggaagagatgctgatagtttgatctagaaaccagcagctactggctcaaattcaggttctggcgtcaaatagcgacatttccagtttctcttaaaaaccgtgtttggtttcagttgggataggcttgttttgtctgttgaaaatgtttctagttttttttctttcatttttctctcattccatttctgccttaactttagtttgttcacagggaggcaaagctgacatgaaccttttgtcgtgggacttcaggccacattggcttgaaggcattcgtttccttctggggtggggacaggccctcatggcaggcttgttcccgtggctctgagcgaggcctcttcctgctgggctcccagactcctgcatccaggcccccaccttctcggcttctggtttttctttctttttggtagaacacaacatctaccattcagttaaaccttctttatctcctcctctggcatccatttttccaaagaagagtcgagtcctctgaggtctgtgcttgaaagccgtccgaaggcattcttgttagctttgcttttctccccatatcccaaggcgaagcgctgagattcttccatctaaaaaaccctcgacccgaaaccctcaccagataaactacagtttgtttaggaggccctgaccttcatggtgtctttgaagcccaaccactcggtttccttcggattttcctccctttgttcggggtttggtttggctcctctgtgtgtgtccgtatcttgttcggtgtcctcgaggttgagcttcactccactgcggcagaggcagcgtgcacactcggatttgctacgtttctatatatcttgaagctaaatgtatatatgagtagtttgccatgagataacacagtgtaaacagtagacacccagaaatcgtgacttctgtgttctctccatttgagtattttgtaatttttttgaaatatttgtggacataaataaaaccaagctacactaca

SEQ ID NO: 65449 - DNA, 6040 bp, Homo sapiens
  misc_feature (2602)..(2602): n is a, c, g, or t
  misc_feature (2608)..(2608): n is a, c, g, or t
tgtgcacgttcagtatagatgtaaccatcacagtcctgcctacattttcagtccatggttgcttgaatctgaggatgcaaacccacaggtgcagagggctggctctcattcccacccccagatacgtgttccttcttggccccagttgacccttctagagctttttgctcctggagatggaactcagaatgagggagcaaagtgtctgcaaaccgtcatttccttgctgaggctgatgggatggtctcccttggcctgattgctccttgtgggcttttcccctgcagaaggtgaaggaggaagcctcttcccctcttaagagtaacaaacgccagcgggagaaggtggcctctgatacggaggaggctgacaggaccagctccaagaagacaaaaacgcaggtgaggtttgctgctgagccttgctgagtaaagctaatgcttcttcagaagcccccagccggggttctccctagttggtggccgtgccctgtctcctagggtggggctggagtggcctttgacactggctgggtcagggcacgacctgtggtcccggagccaagcttgctgcttcatctgcacaaacattactgtgtgtccggcactggtggtgcagagcagacagggctctgccctcctgggacttccatccttcccttctctgactccaggagatcagcaggcccaactcgccatctgaaggtgagggagagagttcagacagtcgcagcgtcaacgatgagggtagcagtgaccccaaagacatcgaccaggacaatcgcagcacgtccccgagcatccccagcccccaggacaatgagagtgactcggactcgtcagcccagcagcagatgctgcaggcccagcccccagccttgcaggctcccactggggtcaccccagctccctcctcagctcctccagggacccctcagctgcccacgccagggcccacgccctctgccactgcagttcccccacagggctcccccacggcctcccaggcccctaaccagccgcaggctcccacagcgcctgttccccacacccacatccaacaggcaccggccttgcacccccagcggccgccctcaccgcatcccccgccgcatccctcgccacatcccccactgcagcctctgactgggtcggcgggccagccttctgcaccctctcatgcccagcccccactgcacggtcagggcccacccggccctcacagcctgcaggctgggcccctgctgcagcacccaggccccccacagccctttggcctccctccccaggcctcccaaggccaggcccctctggggacctccccagcagcagcgtaccctcacacctccctgcagctgccagcctctcagtcagcgctgcagtcccaacagcctccacgggagcagcccctgccaccagcgcccttggccatgccccacatcaagcccccgcctaccactcccatcccccagctgccggcgccacaggcccacaagcaccctccccacctctcggggccctcacccttctccatgaatgccaacctgcctccccctccagccctgaagcccctgagctccctgtccacacatcaccccccgtcggctcaccccccacccctgcaactcatgcctcagagccagccattgccctcctcgcccgcccagccccccgggctgacccagagccagaacctgcccccgccccctgcctcccacccccctacaggcctccaccaggtggccccccaacccccgtttgctcagcacccctttgtccctggaggccctcctcccatcacccctccgacctgcccctccacctctaccccaccggcgggacctggcacctcggcccagccaccctgctctggtgcggcggcttcaggaggcagcatagcgggggggtcgtcctgcccactccccaccgtccagatcaaggaggaggctctggacgacgctgaggagcctgagagcccccctcccccaccaaggagcccgtccccggagcccactgtggtggacacccccagtcacgccagccagtcagctaggttctacaaacacctggaccggggctacaactcgtgtgcccggacagacctgtacttcatgcctctggccgggtccaagctggccaagaagagggaggaggccattgagaaggccaagcgcgaggctgagcagaaagcccgagaggagcgagagcgggagaaggagaaggagaaggagcgggagcgggagcgagagcgggagcgcgaggcagagcgggcggctaaggcgtccagctcagcgcatgaaggtcgcctcagtgacccacagctcagtggtcctggccacatgcggccatccttcgagccaccaccaaccaccattgctgctgtgcccccctacatcgggcccgacacacctgcccttcggactctgagcgagtacgcccggccccacgtcatgtcgcccaccaaccgcaaccaccccttctacatgccccttaaccccacggaccccctgctggcctaccacatgcctggcctctacaacgtcgaccccaccatccgcgagcgggagctccgggagcgggagatccgagagcgggagatccgngagcgngagctgcgggagaggatgaagccgggcttcgaggtgaagcccccagagctggaccccctgcacccagccgccaaccccatggagcactttgcccggcacagcgccctcaccatccccccgaccgccgggccccacccttttgcttctttccacccgggcctgaaccccttggagagggagagactggccctggcgggcccccagctgcggcccgagatgagctaccctgacagactggcagccgagcgtatccacgcagagcgcatggcatcgctgaccagcgatcccctggcccgactgcagatgttcaacgtgactccgcaccatcaccagcactctcacattcactcccacctccacctccaccagcaggaccccctccaccaaggttcagcaggccccgttcacccgctggtcgaccccctgactgccggtccccacctggctcgcttcccctacccgcctggcactctccccaaccctctgcttggacagcccccacacgagcacgagatgcttcgccacccagttttcggcaccccctacccccgtgacctgcctggggccatcccaccccccatgtcagcagcccaccagctgcaggccatgcatgcccagtcggccgagctgcagagactggccatggagcagcagtggctgcatggacacccccacatgcatggtggccacctaccaagtcaggaagattattacagtcgactgaagaaagaaggtgacaagcagttataagttatttatttgttaacgctggctgtggaaaccccagttcttggggggagaaacaggactttttacataaaataggagctgcaaaagcaaaaagaatatcttctaaagatttctttatatatttaaaaacccacaactaaaaatgtatccacatagtagtgttcgtttgtcgagaggatttcctgagactggtttggatctccctgcatgacagtcccccagaaacttagtgagtcctggactggactgaacatccagaaagcttccctgcaatcttggggtttggctttagttttcttttccttgatttctcagtaggtgctagaatccagttcacacccttcactgtgcgtgcagacacactgacacactccgccacgagtgctccagagcccacgaggcttgcagatcgggggcataggaatttggaatccaagagctataatttttaaaaaaaaaaatcttttattttaatacattgtaggaaatcttcataattggagaaagttctgcagcatggctttttacgtctgtaaataaataattttagaacagcctttttttcttccataaactactattgtgatctattttttccagccatgtcactaattgtgaattcctaccaactattgacagaatacagagttgattttttaataaaaagttatatataattatccctttaattaaagggagcaaaggggcgttccacatggacagaggcttggaccgaggcctggtcacagcagcgagcatccagggtttgcagggacgatgttacagactctgttttctgcctggcgtttcacttgtgtctgctcctagcctgtgctctgccagcagcacagacatctgctccatcagacctcttccattttgcacagggagtgcaggaggtgaatgttcactttctgttctccagtgtcactgttctgtttccacgggatggaaagcgcatgggcctgtgtccattgtagatttccttctagatttctgtgtacacacacttgattgttctggatgaatgtcttttttaatactccgaaaatttcatcatctaagaaaatgattccatacaaataactcagcacacaagtgacccaggacatatgcctgccaaagggatgtgttagaaggctgccttctcatgcgcattgtcacttggatcttgtggtgaggacggccccatctttcttgccacagattgaggccacttttgagcaagggagatcctggagttaagacaggtgttgggggcagcctgtattttaccctaggggcaggtctgcatggtgaccccacattgcactggtaaaccatttgagtcccactcttcatcctggaagtgggaactggagtcccacccacagtgcattcagaaagcatgctgtgtgggggctgcttctcaggaggccaggcccttctgagcggaaccgtcctggagagagcctgccctcgtttccaggctgcagccgtaacgcactttctcccaggctgagggcgggtgttctggggtgtctgccctctgtcggccctgcttcctgccaggacgtggcctcttccgatccttttctctcagacactggaggtctcttctgccattgtgctggtcccatcccaagaattgtaggacagagaccacactgggtcggcggacacaaagtccatccaggacccaggccgcagagggagcaggaagagatgctgatagtttgatctagaaaccagcagctactggctcaaattcaggttctggcgtcaaatagcgacatttccagtttctcttaaaaaccgtgtttggtttcagttgggataggcttgttttgtctgttgaaaatgtttctagttttttttctttcatttttctctcattccatttctgccttaactttagtttgttcacagggaggcaaagctgacatgaaccttttgtcgtgggacttcaggccacattggcttgaaggcattcgtttccttctggggtggggacaggccctcatggcaggcttgttcccgtggctctgagcgaggcctcttcctgctgggctcccagactcctgcatccaggcccccaccttctcggcttctggtttttctttctttttggtagaacacaacatctaccattcagttaaaccttctttatctcctcctctggcatccatttttccaaagaagagtcgagtcctctgaggtctgtgcttgaaagccgtccgaaggcattcttgttagctttgcttttctccccatatcccaaggcgaagcgctgagattcttccatctaaaaaaccctcgacccgaaaccctcaccagataaactacagtttgtttaggaggccctgaccttcatggtgtctttgaagcccaaccactcggtttccttcggattttcctccctttgttcggggtttggtttggctcctctgtgtgtgtccgtatcttgttcggtgtcctcgaggttgagcttcactccactgcggcagaggcagcgtgcacactcggatttgctacgtttctatatatcttgaagctaaatgtatatatgagtagtttgccatgagataacacagtgtaaacagtagacacccagaaatcgtgacttctgtgttctctccatttgagtattttgtaatttttttgaaatatttgtggacataaataaaaccaagctacactaca

SEQ ID NO: 65450 - DNA, 5167 bp, Homo sapiens
  misc_feature (2848)..(2848): n is a, c, g, or t
  misc_feature (2854)..(2854): n is a, c, g, or t
gagccggagcccagtgacaggcgacggcctcttgccgccccggaccccgggcgcttacctgtggctgctggggtcggccgcccgggaccaggctgggagccccgagaaacgcttcgttaagggactcaggcagtacgggaagaacttcttcagaattagaaaggagctgcttcccaataaggaaacaggggagctgatcaccttctattactattggaagaagacccccgaagcagccagctcccgagcccatcgtaggcaccgcaggcaggccgtgttcaggaggattaagactcgcaccgcgtccacacccgtcaacacaccctccagacccccgtccagtgaattcttggacctaagttcagccagtgaagatgacttcgacagtgaggacagtgagcaggagctgaaggggtacgcctgccgccactgcttcaccaccacctccaaagattggcaccacggaggccgggagaacatcctgctttgcaccgactgtcgcatccacttcaagaaatacggtgagctcccgcccattgagaagcccgtggacccgccaccgtttatgttcaaacccgtcaaggaagaggatgatgggctcagtgggaagcatagcatgaggacacggcggagtcggggctcgatgtcgacactacgcagtggtcggaagaagcagccagccagccctgatggtcgcacctcacccatcaatgaagacatccgctccagcggccggaactcccccagcgctgccagtacctccagcaatgacagtaaagcagagacagtgaagaagtcggccaagaaggtgaaggaggaagcctcttcccctcttaagagtaacaaacgccagcgggagaaggtggcctctgatacggaggaggctgacaggaccagctccaagaagacaaaaacgcaggagatcagcaggcccaactcgccatctgaaggtgagggagagagttcagacagtcgcagcgtcaacgatgagggtagcagtgaccccaaagacatcgaccaggacaatcgcagcacgtccccgagcatccccagcccccaggacaatgagagtgactcggactcgtcagcccagcagcagatgctgcaggcccagcccccagccttgcaggctcccactggggtcaccccagctccctcctcagctcctccagggacccctcagctgcccacgccagggcccacgccctctgccactgcagttcccccacagggctcccccacggcctcccaggcccctaaccagccgcaggctcccacagcgcctgttccccacacccacatccaacaggcaccggccttgcacccccagcggccgccctcaccgcatcccccgccgcatccctcgccacatcccccactgcagcctctgactgggtcggcgggccagccttctgcaccctctcatgcccagcccccactgcacggtcagggcccacccggccctcacagcctgcaggctgggcccctgctgcagcacccaggccccccacagccctttggcctccctccccaggcctcccaaggccaggcccctctggggacctccccagcagcagcgtaccctcacacctccctgcagctgccagcctctcagtcagcgctgcagtcccaacagcctccacgggagcagcccctgccaccagcgcccttggccatgccccacatcaagcccccgcctaccactcccatcccccagctgccggcgccacaggcccacaagcaccctccccacctctcggggccctcacccttctccatgaatgccaacctgcctccccctccagccctgaagcccctgagctccctgtccacacatcaccccccgtcggctcaccccccacccctgcaactcatgcctcagagccagccattgccctcctcgcccgcccagccccccgggctgacccagagccagaacctgcccccgccccctgcctcccacccccctacaggcctccaccaggtggccccccaacccccgtttgctcagcacccctttgtccctggaggccctcctcccatcacccctccgacctgcccctccacctctaccccaccggcgggacctggcacctcggcccagccaccctgctctggtgcggcggcttcaggaggcagcatagcgggggggtcgtcctgcccactccccaccgtccagatcaaggaggaggctctggacgacgctgaggagcctgagagcccccctcccccaccaaggagcccgtccccggagcccactgtggtggacacccccagtcacgccagccagtcagctaggttctacaaacacctggaccggggctacaactcgtgtgcccggacagacctgtacttcatgcctctggccgggtccaagctggccaagaagagggaggaggccattgagaaggccaagcgcgaggctgagcagaaagcccgagaggagcgagagcgggagaaggagaaggagaaggagcgggagcgggagcgagagcgggagcgcgaggcagagcgggcggctaaggcgtccagctcagcgcatgaaggtcgcctcagtgacccacagctcagtggtcctggccacatgcggccatccttcgagccaccaccaaccaccattgctgctgtgcccccctacatcgggcccgacacacctgcccttcggactctgagcgagtacgcccggccccacgtcatgtcgcccaccaaccgcaaccaccccttctacatgccccttaaccccacggaccccctgctggcctaccacatgcctggcctctacaacgtcgaccccaccatccgcgagcgggagctccgggagcgggagatccgagagcgggagatccgngagcgngagctgcgggagaggatgaagccgggcttcgaggtgaagcccccagagctggaccccctgcacccagccgccaaccccatggagcactttgcccggcacagcgccctcaccatccccccgaccgccgggccccacccttttgcttctttccacccgggcctgaaccccttggagagggagagactggccctggcgggcccccagctgcggcccgagatgagctaccctgacagactggcagccgagcgtatccacgcagagcgcatggcatcgctgaccagcgatcccctggcccgactgcagatgttcaacgtgactccgcaccatcaccagcactctcacattcactcccacctccacctccaccagcaggaccccctccaccaaggttcagcaggccccgttcacccgctggtcgaccccctgactgccggtccccacctggctcgcttcccctacccgcctggcactctccccaaccctctgcttggacagcccccacacgagcacgagatgcttcgccacccagttttcggcaccccctacccccgtgacctgcctggggccatcccaccccccatgtcagcagcccaccagctgcaggccatgcatgcccagtcggccgagctgcagagactggccatggagcagcagtggctgcatggacacccccacatgcatggtggccacctaccaagtcaggaagattattacagtcgactgaagaaagaaggtgacaagcagttataagttatttatttgttaacgctggctgtggaaaccccagttcttggggggagaaacaggactttttacataaaataggagctgcaaaagcaaaaagaatatcttctaaagatttctttatatatttaaaaacccacaactaaaaatgtatccacatagtagtgttcgtttgtcgagaggatttcctgagactggtttggatctccctgcatgacagtcccccagaaacttagtgagtcctggactggactgaacatccagaaagcttccctgcaatcttggggtttggctttagttttcttttccttgatttctcagtaggtgctagaatccagttcacacccttcactgtgcgtgcagacacactgacacactccgccacgagtgctccagagcccacgaggcttgcagatcgggggcataggaatttggaatccaagagctataatttttaaaaaaaaaaatcttttattttaatacattgtaggaaatcttcataattggagaaagttctgcagcatggctttttacgtctgtaaataaataattttagaacagcctttttttcttccataaactactattgtgatctattttttccagccatgtcactaattgtgaattcctaccaactattgacagaatacagagttgattttttaataaaaagttatatataattatccctttaattaaagggagcaaaggggcgttccacatggacagaggcttggaccgaggcctggtcacagcagcgagcatccagggtttgcagggacgatgttacagactctgttttctgcctggcgtttcacttgtgtctgctcctagcctgtgctctgccagcagcacagacatctgctccatcagacctcttccattttgcacagggagtgcaggaggtgaatgttcactttctgttctccagtgtcactgttctgtttccacgggatggaaagcgcatgggcctgtgtccattgtagatttccttctagatttctgtgtacacacacttgattgttctggatgaatgtcttttttaatactccgaaaatttcatcatctaagaaaatgattccatacaaataactcagcacacaagtgacccaggacatatgcctgccaaagggatgtgttagaaggctgccttctcatgcgcattgtcacttggatcttgtggtgaggacggccccatctttcttgccacagattgaggccacttttgagcaagggagatcctggagttaagacaggtgttgggggcagcctgtattttaccctaggggcaggtctgcatggtgaccccacattgcactggtaaaccatttgagtcccactcttcatcctggaagtgggaactggagtcccacccacagtgcattcagaaagcatgctgtgtgggggctgcttctcaggaggccaggccctagggtaaaatacaggctgcccccaacacctgtcttaactccaggatctcccttgctcaaaagtggcctcaatctgtggcagaaagatgggccgtcctcaccacagatccagtgacatgcgcatgagaagcagccttca

SEQ ID NO: 65451 - DNA, 5886 bp, Homo sapiens
  misc_feature (4558)..(4558): n is a, c, g, or t
  misc_feature (4564)..(4564): n is a, c, g, or t
gcaaccctccgcgctccggagcctcctcagcctcccgcacaccccgagacgctcgccccgctgggcctcggtccccgcctcctcccccgtccttttcccctctctcgctccccacattgtctctgcctcattttctctcctagttgaggattaaaaaaaaaaaaaaatcaccatcatcctcagggagccccctcgccctcggaaaacaaaaccagacatgatcctgggctcctgcttctgaaagatctgcccgaccgaggaggagggagcctaggttcaagtcgcaggaaaggtcacggcagggaagccccctcagcccctccgcgtcgcctccccgcgggccgcccctctcggccctgcgccccgcggccccgcagcctccgcgcggcctcccgccccatccccgccactttccccggagctgggccgcgaacacctcactattgatggtgtagcgctttaggggaagcatttttgaaacgttggggttgttggagtggttggattttccctggaattgagtgagaaattcagaagactgaagcccaggcttactgtctacctttcacggaggcctagccgtgagaggacagaagaaggcacgtggcgaatcatgacagcggacaaagacaaagacaaagacaaagagaaggaccgggaccgagaccgggaccgagagagagagaaaagagacaaagcaagagagagtgagaattcaaggccacgccggagctgtaccttggaaggaggagccaaaaattatgctgagagtgatcacagtgaagacgaggacaatgacaacaatagtgccaccgcagaggagtccacgaagaagaataagaagaaaccaccgaaaaaaaagtctcgttatgaaaggacagataccggtgagataacatcctacatcactgaagatgatgtggtctacagaccaggagactgtgtgtatatcgagagtcggaggccaaacacaccgtatttcatctgtagcattcaagacttcaaactggtccacaactcccaggcctgttgcagatctccaactcctgctttgtgtgaccccccagcatgctctctgccggtggcatcacagccaccacagcatctttctgaagccgggagagggcctgtagggagtaagagggaccatctcctcatgaacgtcaaatggtactaccgtcaatctgaggttccagattctgtgtatcagcatttggttcaggatcgacataatgaaaatgactctggaagagaacttgtcattacagacccagttatcaagaaccgagagctcttcatttctgattacgttgacacttaccatgctgctgcccttagagggaagtgtaacatctcccatttttctgacatatttgctgctagagagtttaaagcccgagtggattcatttttctacatattaggatataaccctgagacaaggaggctgaacagtacccagggggagattcgtgtcggtcctagtcatcaggccaaacttccagatctgcaaccatttccttctccagatggtgatacagtgacccaacatgaggaactggtctggatgcctggagttaacgactgtgacctccttatgtacttgagggcagcaaggagcatggcggcatttgcaggaatgtgtgatggaggctctacagaggacggctgtgtcgcagcctctcgggatgacaccactctgaatgcactgaacacactgcatgaaagcggttacgatgctggcaaagccctgcagcgcctggtgaagaagcctgtgcccaagctcatcgagaagtgctggaccgaggacgaagtgaaacgcttcgttaagggactcaggcagtacgggaagaacttcttcagaattagaaaggagctgcttcccaataaggaaacaggggagctgatcaccttctattactattggaagaagacccccgaagcagccagctcccgagcccatcgtaggcaccgcaggcaggccgtgttcaggaggattaagactcgcaccgcgtccacacccgtcaacacaccctccagacccccgtccagtgaattcttggacctaagttcagccagtgaagatgacttcgacagtgaggacagtgagcaggagctgaaggggtacgcctgccgccactgcttcaccaccacctccaaagattggcaccacggaggccgggagaacatcctgctttgcaccgactgtcgcatccacttcaagaaatacggtgagctcccgcccattgagaagcccgtggacccgccaccgtttatgttcaaacccgtcaaggaagaggatgatgggctcagtgggaagcatagcatgaggacacggcggagtcggggctcgatgtcgacactacgcagtggtcggaagaagcagccagccagccctgatggtcgcacctcacccatcaatgaagacatccgctccagcggccggaactcccccagcgctgccagtacctccagcaatgacagtaaagcagagacagtgaagaagtcggccaagaaggtgaaggaggaagcctcttcccctcttaagagtaacaaacgccagcgggagaaggtggcctctgatacggaggaggctgacaggaccagctccaagaagacaaaaacgcaggagatcagcaggcccaactcgccatctgaaggtgagggagagagttcagacagtcgcagcgtcaacgatgagggtagcagtgaccccaaagacatcgaccaggacaatcgcagcacgtccccgagcatccccagcccccaggacaatgagagtgactcggactcgtcagcccagcagcagatgctgcaggcccagcccccagccttgcaggctcccactggggtcaccccagctccctcctcagctcctccagggacccctcagctgcccacgccagggcccacgccctctgccactgcagttcccccacagggctcccccacggcctcccaggcccctaaccagccgcaggctcccacagcgcctgttccccacacccacatccaacaggcaccggccttgcacccccagcggccgccctcaccgcatcccccgccgcatccctcgccacatcccccactgcagcctctgactgggtcggcgggccagccttctgcaccctctcatgcccagcccccactgcacggtcagggcccacccggccctcacagcctgcaggctgggcccctgctgcagcacccaggccccccacagccctttggcctccctccccaggcctcccaaggccaggcccctctggggacctccccagcagcagcgtaccctcacacctccctgcagctgccagcctctcagtcagcgctgcagtcccaacagcctccacgggagcagcccctgccaccagcgcccttggccatgccccacatcaagcccccgcctaccactcccatcccccagctgccggcgccacaggcccacaagcaccctccccacctctcggggccctcacccttctccatgaatgccaacctgcctccccctccagccctgaagcccctgagctccctgtccacacatcaccccccgtcggctcaccccccacccctgcaactcatgcctcagagccagccattgccctcctcgcccgcccagccccccgggctgacccagagccagaacctgcccccgccccctgcctcccacccccctacaggcctccaccaggtggccccccaacccccgtttgctcagcacccctttgtccctggaggccctcctcccatcacccctccgacctgcccctccacctctaccccaccggcgggacctggcacctcggcccagccaccctgctctggtgcggcggcttcaggaggcagcatagcgggggggtcgtcctgcccactccccaccgtccagatcaaggaggaggctctggacgacgctgaggagcctgagagcccccctcccccaccaaggagcccgtccccggagcccactgtggtggacacccccagtcacgccagccagtcagctaggttctacaaacacctggaccggggctacaactcgtgtgcccggacagacctgtacttcatgcctctggccgggtccaagctggccaagaagagggaggaggccattgagaaggccaagcgcgaggctgagcagaaagcccgagaggagcgagagcgggagaaggagaaggagaaggagcgggagcgggagcgagagcgggagcgcgaggcagagcgggcggctaaggcgtccagctcagcgcatgaaggtcgcctcagtgacccacagctcagtggtcctggccacatgcggccatccttcgagccaccaccaaccaccattgctgctgtgcccccctacatcgggcccgacacacctgcccttcggactctgagcgagtacgcccggccccacgtcatgtcgcccaccaaccgcaaccaccccttctacatgccccttaaccccacggaccccctgctggcctaccacatgcctggcctctacaacgtcgaccccaccatccgcgagcgggagctccgggagcgggagatccgagagcgggagatccgngagcgngagctgcgggagaggatgaagccgggcttcgaggtgaagcccccagagctggaccccctgcacccagccgccaaccccatggagcactttgcccggcacagcgccctcaccatccccccgaccgccgggccccacccttttgcttctttccacccgggcctgaaccccttggagagggagagactggccctggcgggcccccagctgcggcccgagatgagctaccctgacagactggcagccgagcgtatccacgcagagcgcatggcatcgctgaccagcgatcccctggcccgactgcagatgttcaacgtgactccgcaccatcaccagcactctcacattcactcccacctccacctccaccagcaggaccccctccaccaaggttcagcaggccccgttcacccgctggtcgaccccctgactgccggtccccacctggctcgcttcccctacccgcctggcactctccccaaccctctgcttggacagcccccacacgagcacgagatgcttcgccacccagttttcggcaccccctacccccgtgacctgcctggggccatcccaccccccatgtcagcagcccaccagctgcaggccatgcatgcccagtcggccgagctgcagagactggccatggagcagcagtggctgcatggacacccccacatgcatggtggccacctaccaagtcaggaagattattacagtcgactgaagaaagaaggtgacaagcagttataagttatttatttgttaacgctggctgtggaaaccccagttcttggggggagaaacaggactttttacataaaataggagctgcaaaagcaaaaagaatatcttctaaagatttctttatatatttaaaaacccacaactaaaaatgtatccacatagtagtgttcgtttgtcgagaggatttcctgagactggtttggatctccctgcatgacagtcccccagaaacttagtgagtcctggactggactgaacatccagaaagcttccctgcaatcttggggtttggctttagttttcttttccttgatttctcagtaggtgctagaatccagttcacacccttcactgtgcgtgcagacacactgacacactccgccacgagtgctccagagcccacgaggcttgcagatcgggggcataggaatttggaatccaagagctataatttttaaaaaaaaaaatcttttattttaatacattgtaggaaatcttcataattggagaaagttctgcagcatggctttttacgtctgtaaataaataattttagaacagcctttttttcttccata

SEQ ID NO: 65452 - DNA, 2711 bp, Homo sapiens
gcaaccctccgcgctccggagcctcctcagcctcccgcacaccccgagacgctcgccccgctgggcctcggtccccgcctcctcccccgtccttttcccctctctcgctccccacattgtctctgcctcattttctctcctagttgaggattaaaaaaaaaaaaaaatcaccatcatcctcagggagccccctcgccctcggaaaacaaaaccagacatgatcctgggctcctgcttctgaaagatctgcccgaccgaggaggagggagcctaggttcaagtcgcaggaaaggtcacggcagggaagccccctcagcccctccgcgtcgcctccccgcgggccgcccctctcggccctgcgccccgcggccccgcagcctccgcgcggcctcccgccccatccccgccactttccccggagctgggccgcgaacacctcactattgatggtgtagcgctttaggggaagcatttttgaaacgttggggttgttggagtggttggattttccctggaattgagtgagaaattcagaagactgaagcccaggcttactgtctacctttcacggaggcctagccgtgagaggacagaagaaggcacgtggcgaatcatgacagcggacaaagacaaagacaaagacaaagagaaggaccgggaccgagaccgggaccgagagagagagaaaagagacaaagcaagagagagtgagaattcaaggccacgccggagctgtaccttggaaggaggagccaaaaattatgctgagagtgatcacagtgaagacgaggacaatgacaacaatagtgccaccgcagaggagtccacgaagaagaataagaagaaaccaccgaaaaaaaagtctcgttatgaaaggacagataccggtgagataacatcctacatcactgaagatgatgtggtctacagaccaggagactgtgtgtatatcgagagtcggaggccaaacacaccgtatttcatctgtagcattcaagacttcaaactggtccacaactcccaggcctgttgcagatctccaactcctgctttgtgtgaccccccagcatgctctctgccggtggcatcacagccaccacagcatctttctgaagccgggagagggcctgtagggagtaagagggaccatctcctcatgaacgtcaaatggtactaccgtcaatctgaggttccagattctgtgtatcagcatttggttcaggatcgacataatgaaaatgactctggaagagaacttgtcattacagacccagttatcaagaaccgagagctcttcatttctgattacgttgacacttaccatgctgctgcccttagagggaagtgtaacatctcccatttttctgacatatttgctgctagagagtttaaagcccgagtggattcatttttctacatattaggatataaccctgagacaaggaggctgaacagtacccagggggagattcgtgtcggtcctagtcatcaggccaaacttccagatctgcaaccatttccttctccagatggtgatacagtgacccaacatgaggaactggtctggatgcctggagttaacgactgtgacctccttatgtacttgagggcagcaaggagcatggcggcatttgcaggaatgtgtgatggaggctctacagaggacggctgtgtcgcagcctctcgggatgacaccactctgaatgcactgaacacactgcatgaaagcggttacgatgctggcaaagccctgcagcgcctggtgaagaagcctgtgcccaagctcatcgagaagtgctggaccgaggacgaagtgaaacgcttcgttaagggactcaggcagtacgggaagaacttcttcagaattagaaaggagctgcttcccaataaggaaacaggggagctgatcaccttctattactattggaagaagacccccgaagcagccagctcccgagcccatcgtaggcaccgcaggcaggccgtgttcaggaggattaagactcgcaccgcgtccacacccgtcaacacaccctccagacccccgtccagtgaattcttggacctaagttcagccagtgaagatgacttcgacagtgaggacagtgagcaggagctgaaggggtacgcctgccgccactgcttcaccaccacctccaaagattggcaccacggaggccgggagaacatcctgctttgcaccgactgtcgcatccacttcaagaaatacggtgagctcccgcccattgagaagcccgtggacccgccaccgtttatgttcaaacccgtcaaggaagaggatgatgggctcagtgggaagcatagcatgaggacacggcggagtcggggctcggtgagtcccctggggccatggggctcctggcaacttcttcagtttcctgggatgtgtgggggcttgagcctcccagggggaggaagcgaaagtcttgtttaccagacaaagtcctggaggggagctgctttgcccgaggcggtagcttgcctgtgggctgggaagagttctctgttctctccttcgaggggccccagggtggcatcctgctctgggttttgtagcaagctcttagcttctggctcagtgcaggctctccaaggcccctcttgctctccaaggctgctgcttgtggtgtcacttccattgtatcaaatctctgctattttaaacttgcaggctcttttgtgttagtgtg

SEQ ID NO: 65453 - DNA, 1072 bp, Homo sapiens
gagcggggtcgcgcgcgcgcggcaggcgagtagggaacgaggagcggccgggtgtgagtgtgtgggagtgagagtgtgtgggagtggggtgagggagaagctgacgggacgcgaggctgtgagaaactgggcgagtgtgcgaggacgcccggccagcctgcgggagccgcagtcggcggaggagaaaggaggcggctcccggtatcccgaccccctccccctcctctccttcccccacttccagccgcccggcggcccgcgcttcctcgaaggccccagcccggctcagtcggccgagagcgagggaggagccccccgacccaggtagacgttacatccaagaggaaataatccaggcaaggaagcacaagctgatcaagatgtgtagttctgtggctgccaagttgtggtttttgacagatcgtcgcatcagggaagactatcctcaaaaagagattttacgagcattgaaggccaaatgttgtgaggaggaactggactttagggctgtggtgatggatgaggtggtgctgacaatcgagcaaggaaacctgggtctgcggatcaatggagagctaatcactgcctacccacaagtggtggtagtcagagtaccaaccccttgggtgcaaagtgatagtgacatcactgttttgcgccatctagagaagatgggatgtcggttaatgaaccgacctcaagccatcctgaactgcgttaataagttctggacatttcaagagttggctggccatggtgttcctctgccggatactttctcttatggtggccacgaaaattttgctaaaatgattgatgaggctgaagttctggagttcccaatggtagtaaagaatacgcggggtcacagaggtaaagctgttttcttggctcgagataagcaccatttggctgatctaagccatcttattcgccatgaagcgccatacctgttccagaagtatgttaaagagtctcatggacgggatgtacgtgtcattgtcgtgggaggccgtgtggttggcaccatgttacgttgttcaacagatgggagaatgcaaagcaactgctc

SEQ ID NO: 65454 - DNA, 766 bp, Homo sapiens
gagcggggtcgcgcgcgcgcggcaggcgagtagggaacgaggagcggccgggtgtgagtgtgtgggagtgagagtgtgtgggagtggggtgagggagaagctgacgggacgcgaggctgtgagaaactgggcgagtgtgcgaggacgcccggccagcctgcgggagccgcagtcggcggaggagaaaggaggcggctcccggtatcccgaccccctccccctcctctccttcccccacttccagccgcccggcggcccgcgcttcctcgaaggccccagcccggctcagtcggccgagagcgagggaggagccccccgacccagaggtgctggagtctgcttgtcagggaggggggcagtctgtgattctgagaacagagccaagaaggggaacagcaaattcagtcacagacaatcctccactcggtcaagagccacttttctcttcctgccttgcccccccgcagggggtaaggaactgagcgtttaatctttagccggttggctaccagctaaaattctacttatcttagtttctagtggatagctttcttattttgcccatgttttcttagaatccctgtttaatatacttttgtcagtagtagtatctaggagtagcagggagagtgacaataaattagccccttcttttttcccttgtcattcaggccccttttcctctccagagggaaattaccagtaaactcttctaaatcttccaccccttctcagtcatactgtgaagaaacacactaaagtggac

SEQ ID NO: 65455 - DNA, 571 bp, Homo sapiens
cactgaccttcgggaagcaggctggagagggggctggaaataaagctctataaaaactcatgaacagtgggtcttgatgagcttccgggtttatggattcgtgggctgcttccacctgctaggagggtggtgtactctaactcagggacagaagcccctgtctgtgctcaggactcttgcagacctctttacctggctgttcatcttccataatcaactggtagacgttacatccaagaggaaataatccaggcaaggaagcacaagctgatcaagatgtgtagttctgtggctgccaagttgtggtttttgacagatcgtcgcatcagggaagactatcctcaaaaagagattttacgagcattgaaggccaaatgttgtgaggaggaactggactttagggctgtggtgatggatgaggtggtgctgacaatcgagcaaggaaacctgggtaagtctgtatactaagtgatcttttggatttttacctagaatatgatgaatctgcatgttttaggaataattaggacagaggaattcttagccttgtcattactaagtatcttctaat

SEQ ID NO: 65456 - DNA, 482 bp, Homo sapiens
gctcggtacccggtgtttatcgatgccaccctccccgaccaggtgctggagtctgcttgtcagggaggggggcagtctgtgattctgagaacagagccaagaaggggaacagcaaattcagtcacagacaatcctccactcggtcaagagccacttttctcttcctgccttgcccccccgcagggggtaaggaactgagcgtttaatctttagccggttggctaccagctaaaattctacttatcttagtttctagtggatagctttcttattttgcccatgttttcttagaatccctgtttaatatacttttgtcagtagtagtatctaggagtagcagggagagtgacaataaattagccccttcttttttcccttgtcattcaggccccttttcctctccagagggaaattaccagtaaactcttctaaatcttccaccccttctcagtcatactgtgaagaaacacactaaagtggac

SEQ ID NO: 65457 - DNA, 736 bp, Homo sapiens
gtaccccatcgagcacggcatcgtcaccaactgggacgacatggagaaaatctggcaccacaccttctacaatgagctgcgtgtggctcccgaggagcaccccgtgctgctggccgcccgcccccttgtcattgaaggccaaatgttgtgaggaggaactggactttagggctgtggtgatggatgaggtggtgctgacaatcgagcaaggaaacctgggtctgcggatcaatggagagctaatcactgcctacccacaagtggtggtagtcagagtaccaaccccttgggtgcaaagtgatagtgacatcactgttttgcgccatctagagaagatgggatgtcggttaatgaaccgacctcaagccatcctgaactgcgttaataagttctggacatttcaagagttggctggccatggtgttcctctgccggatactttctcttatggtggccacgaaaattttgctaaaatgattgatgaggctgaagttctggagttcccaatggtagtaaagaatacgcggggtcacagaggtaaagctgttttcttggctcgagataagcaccatttggctgatctaagccatcttattcgccatgaagcgccatacctgttccagaagtatgttaaagagtctcatggacgggatgtacgtgtcattgtcgtgggaggccgtgtggttggcaccatgttacgttgttcaacagatgggagaatgcaaagcaactgctc

SEQ ID NO: 65458 - DNA, 968 bp, Homo sapiens
cactgaccttcgggaagcaggctggagagggggctggaaataaagctctataaaaactcatgaacagtgggtcttgatgagcttccgggtttatggattcgtgggctgcttccacctgctaggagggtggtgtactctaactcagggacagaagcccctgtctgtgctcaggactcttgcagacctctttacctggctgttcatcttccataatcaactggtagacgttacatccaagaggaaataatccaggcaaggaagcacaagctgatcaagatgtgtagttctgtggctgccaagttgtggtttttgacagatcgtcgcatcagggaagactatcctcaaaaagagattttacgagcattgaaggccaaatgttgtgaggaggaactggactttagggctgtggtgatggatgaggtggtgctgacaatcgagcaaggaaacctgggtctgcggatcaatggagagctaatcactgcctacccacaagtggtggtagtcagagtaccaaccccttgggtgcaaagtgatagtgacatcactgttttgcgccatctagagaagatgggatgtcggttaatgaaccgacctcaagccatcctgaactgcgttaataagttctggacatttcaagagttggctggccatggtgttcctctgccggatactttctcttatggtggccacgaaaattttgctaaaatgattgatgaggctgaagttctggagttcccaatggtagtaaagaatacgcggggtcacagaggtaaagctgttttcttggctcgagataagcaccatttggctgatctaagccatcttattcgccatgaagcgccatacctgttccagaagtatgttaaagagtctcatggacgggatgtacgtgtcattgtcgtgggaggccgtgtggttggcaccatgttacgttgttcaacagatgggagaatgcaaagcaactgctc

SEQ ID NO: 65459 - DNA, 868 bp, Homo sapiens
  misc_feature (605)..(605): n is a, c, g, or t
  misc_feature (611)..(611): n is a, c, g, or t
  misc_feature (618)..(619): n is a, c, g, or t
  misc_feature (637)..(637): n is a, c, g, or t
ttaaacgtcgcttcccgccccgcctgggtctcttacgcttttttagcgggcaacacagcctattgacctgcctctgtttttccctcgagaccagccaactctcacatttcagtccgtttatcactttaccaacagtggacagctttactcccaggcccaaaaaaattatccgtacagccccagatgggatggaaatgaaatggccaaaagagcaaaggcttatttcaaaacctttgtccctcagttccaggaggcagcatttgccaatggaaagctctaggaaacaccagtcttgagaggtggccagccagactgcctgtccacatgcgtgtcagcacatacagccgcttcctggaagccgcctggaatgtcttcacggcagcgttttgctcacacagcagcttttgcacgccccaggcagccccgactgctgaaatccaacttgagctggctggtggtccctggatcctagagcccttcacttcgggttactccctctttcttgcctctatttcttagttggaagaaataaactcacaaattatggtgcagtaattttccggggaaagtaaagcctcaggaatgcccacgcctttcttccaagnccttgnctctganncctcttaagtctaagatnaaatgcccccttcgttgctcctccctcctgacaaagaaataaactccgccatcgcttgggcccacaacgcggacctcttcgacgctcccccccctagggaggggtacactctcgtccctccatccttgactccgttctcctagaatatacccacttcgcctaccgcgcgcgcttcatacgctgggcggtctagacgattttctccaaaatactgggcgatacacgaggata

SEQ ID NO: 65460 - DNA, 578 bp, Homo sapiens
ataaatacaattaattttataacatgccttgagataaaataaaaaagctgattgacctgcctctgtttttccctcgagaccagccaactctcacatttcagtccgtttatcactttaccaacagtggacagctttactcccaggcccaaaaaaattatccgtacagccccagatgggatggaaatgaaatggccaaaagagcaaaggcttatttcaaaacctttgtccctcagttccaggaggcagcatttgccaatggaaagctctaggaaacaccagtcttgagaggtggccagccagactgcctgtccacatgcgtgtcagcacatacagccgcttcctggaagccgcctggaatgtcttcacggcagcgttttgctcacacagcagcttttgcacgccccaggcagccccgactgctgaaatccaacttgagctggctggtggtccctggatcctagagcccttcacttcgggttactccctctttcttgcctctatttcttagttggaagaaataaactcacaaattatggtgccataaaaaaagaaataaattggatctcttgtcctcattt

SEQ ID NO: 65461 - DNA, 1125 bp, Homo sapiens
  misc_feature (49)..(49): n is a, c, g, or t
  misc_feature (64)..(64): n is a, c, g, or t
  misc_feature (1125)..(1125): n is a, c, g, or t
gaccctggagaagatgtggccctccccttgttagttttgaggacactgnagccacccaggtgtnccccaagctgtacttgtcacctcgaattgagcatgcacttggaggctcctcagctcttcatatcccagcttttccaggaggaggatgtctcattgattacgttcctcaagtatgccacctgctcaccaacaaggtgcagtacgtgattcaagggtatcacaaaagaagagagtatattgctgcttttctcagtcactttggcacaggtgtcgtggaatatgatgcagaaggctttacaaaactcactctgctgctgatgtggaaagatttttgttttcttgtacacattgacctgcctctgtttttccctcgagaccagccaactctcacatttcagtccgtttatcactttaccaacagtggacagctttactcccaggcccaaaaaaattatccgtacagccccagatgggatggaaatgaaatggccaaaagagcaaaggcttatttcaaaacctttgtccctcagttccaggaggcagcatttgccaatggaaagctctaggaaacaccagtcttgagaggtggccagccagactgcctgtccacatgcgtgtcagcacatacagccgcttcctggaagccgcctggaatgtcttcacggcagcgttttgctcacacagcagcttttgcacgccccaggcagccccgactgctgaaatccaacttgagctggctggtggtccctggatcctagagcccttcacttcgggttactccctctttcttgcctctatttcttagttggaagaaataaactcacaaattatggtgcagtaattttccggggaaagtaaagcctcaggaatgcccacgcctttcttccaaagcctttgtctctgagacctcttaagttctaagattaaatgcccctcgctgttcttcctctgaaaaaaaaaaacggactcattggcctaaatgtccccccccctcgccacggcaaacatagcaaaaaaatgtccctcttggcccccggggggacctttgcgcacccttcccttcacggagggtcaacttaagaccccccctcaccacctccctgccttccgactcctggcatn

SEQ ID NO: 65462 - DNA, 1247 bp, Homo sapiens
  misc_feature (43)..(43): n is a, c, g, or t
  misc_feature (123)..(123): n is a, c, g, or t
  misc_feature (141)..(141): n is a, c, g, or t
  misc_feature (181)..(181): n is a, c, g, or t
  misc_feature (183)..(183): n is a, c, g, or t
  misc_feature (185)..(185): n is a, c, g, or t
  misc_feature (368)..(368): n is a, c, g, or t
  misc_feature (1247)..(1247): n is a, c, g, or t
agaggcaggtcaatgtgtacaagaaaacaaaaatctttccacntcagcagcagagtgagttttgtaaagccttctgcttcattttccacaacacctgtgccaaagtaactgagaaaagcagcnatatactctcttcttttntaatacccttaaatcacgtactgcaccttgttggtgagcngntngcatacttgaggaacgtaatcaatgaaacatcctcctcctggaaaagctgggatatgaagagctgaggagcctccaagtgcatgctcaattcgaggtgacaagtacagcttggggtacacctaggtggcttcagtgtcctcaaaactgacagagaggagggccacatcttctccagggtcttnatttacatccttgagtaggtttgtggggatattgctgaaatctacgggcagcttcaaaaggaaacgagctgaaaattcaccagtccagttgttttcttgtacacattgacctgcctctgtttttccctcgagaccagccaactctcacatttcagtccgtttatcactttaccaacagtggacagctttactcccaggcccaaaaaaattatccgtacagccccagatgggatggaaatgaaatggccaaaagagcaaaggcttatttcaaaacctttgtccctcagttccaggaggcagcatttgccaatggaaagctctaggaaacaccagtcttgagaggtggccagccagactgcctgtccacatgcgtgtcagcacatacagccgcttcctggaagccgcctggaatgtcttcacggcagcgttttgctcacacagcagcttttgcacgccccaggcagccccgactgctgaaatccaacttgagctggctggtggtccctggatcctagagcccttcacttcgggttactccctctttcttgcctctatttcttagttggaagaaataaactcacaaattatggtgcagtaattttccggggaaagtaaagcctcaggaatgcccacgcctttcttccaaagcctttgtctctgagacctcttaagttctaagattaaatgcccctcgctgttcttcctctgaaaaaaaaaaacggactcattggcctaaatgtccccccccctcgccacggcaaacatagcaaaaaaatgtccctcttggcccccggggggacctttgcgcacccttcccttcacggagggtcaacttaagaccccccctcaccacctccctgccttccgactcctggcatn

SEQ ID NO: 65463 - DNA, 830 bp, Homo sapiens
  misc_feature (830)..(830): n is a, c, g, or t
aatataattaatattttattactttatcaataataattaataattataaagtaacattgacctgcctctgtttttccctcgagaccagccaactctcacatttcagtccgtttatcactttaccaacagtggacagctttactcccaggcccaaaaaaattatccgtacagccccagatgggatggaaatgaaatggccaaaagagcaaaggcttatttcaaaacctttgtccctcagttccaggaggcagcatttgccaatggaaagctctaggaaacaccagtcttgagaggtggccagccagactgcctgtccacatgcgtgtcagcacatacagccgcttcctggaagccgcctggaatgtcttcacggcagcgttttgctcacacagcagcttttgcacgccccaggcagccccgactgctgaaatccaacttgagctggctggtggtccctggatcctagagcccttcacttcgggttactccctctttcttgcctctatttcttagttggaagaaataaactcacaaattatggtgcagtaattttccggggaaagtaaagcctcaggaatgcccacgcctttcttccaaagcctttgtctctgagacctcttaagttctaagattaaatgcccctcgctgttcttcctctgaaaaaaaaaaacggactcattggcctaaatgtccccccccctcgccacggcaaacatagcaaaaaaatgtccctcttggcccccggggggacctttgcgcacccttcccttcacggagggtcaacttaagaccccccctcaccacctccctgccttccgactcctggcatn

SEQ ID NO: 65464 - DNA, 824 bp, Homo sapiens
  misc_feature (824)..(824): n is a, c, g, or t
gcactgtaattcggattgcgcattatggcaagaaaacacaaaaacctaagttgacctgcctctgtttttccctcgagaccagccaactctcacatttcagtccgtttatcactttaccaacagtggacagctttactcccaggcccaaaaaaattatccgtacagccccagatgggatggaaatgaaatggccaaaagagcaaaggcttatttcaaaacctttgtccctcagttccaggaggcagcatttgccaatggaaagctctaggaaacaccagtcttgagaggtggccagccagactgcctgtccacatgcgtgtcagcacatacagccgcttcctggaagccgcctggaatgtcttcacggcagcgttttgctcacacagcagcttttgcacgccccaggcagccccgactgctgaaatccaacttgagctggctggtggtccctggatcctagagcccttcacttcgggttactccctctttcttgcctctatttcttagttggaagaaataaactcacaaattatggtgcagtaattttccggggaaagtaaagcctcaggaatgcccacgcctttcttccaaagcctttgtctctgagacctcttaagttctaagattaaatgcccctcgctgttcttcctctgaaaaaaaaaaacggactcattggcctaaatgtccccccccctcgccacggcaaacatagcaaaaaaatgtccctcttggcccccggggggacctttgcgcacccttcccttcacggagggtcaacttaagaccccccctcaccacctccctgccttccgactcctggcatn

SEQ ID NO: 65465 - DNA, 816 bp, Homo sapiens
  misc_feature (816)..(816): n is a, c, g, or t
atatttaatcatataataaaaaaaaagacaaaaaaaccttagttgacctgcctctgtttttccctcgagaccagccaactctcacatttcagtccgtttatcactttaccaacagtggacagctttactcccaggcccaaaaaaattatccgtacagccccagatgggatggaaatgaaatggccaaaagagcaaaggcttatttcaaaacctttgtccctcagttccaggaggcagcatttgccaatggaaagctctaggaaacaccagtcttgagaggtggccagccagactgcctgtccacatgcgtgtcagcacatacagccgcttcctggaagccgcctggaatgtcttcacggcagcgttttgctcacacagcagcttttgcacgccccaggcagccccgactgctgaaatccaacttgagctggctggtggtccctggatcctagagcccttcacttcgggttactccctctttcttgcctctatttcttagttggaagaaataaactcacaaattatggtgcagtaattttccggggaaagtaaagcctcaggaatgcccacgcctttcttccaaagcctttgtctctgagacctcttaagttctaagattaaatgcccctcgctgttcttcctctgaaaaaaaaaaacggactcattggcctaaatgtccccccccctcgccacggcaaacatagcaaaaaaatgtccctcttggcccccggggggacctttgcgcacccttcccttcacggagggtcaacttaagaccccccctcaccacctccctgccttccgactcctggcatn

SEQ ID NO: 65466 - DNA, 1028 bp, Homo sapiens
  misc_feature (49)..(49): n is a, c, g, or t
  misc_feature (64)..(64): n is a, c, g, or t
gaccctggagaagatgtggccctccccttgttagttttgaggacactgnagccacccaggtgtnccccaagctgtacttgtcacctcgaattgagcatgcacttggaggctcctcagctcttcatatcccagcttttccaggaggaggatgtctcattgattacgttcctcaagtatgccacctgctcaccaacaaggtgcagtacgtgattcaagggtatcacaaaagaagagagtatattgctgcttttctcagtcactttggcacaggtgtcgtggaatatgatgcagaaggctttacaaaactcactctgctgctgatgtggaaagatttttgttttcttgtacacattgacctgcctctgtttttccctcgagaccagccaactctcacatttcagtccgtttatcactttaccaacagtggacagctttactcccaggcccaaaaaaattatccgtacagccccagatgggatggaaatgaaatggccaaaagagcaaagaagagagagcaacagagatggggaggaatccagctctgcctgacatccaggcatcctctccaaattgcatagggcttatttcaaaacctttgtccctcagttccaggaggcagcatttgccaatggaaagctctaggaaacaccagtcttgagaggtggccagccagactgcctgtccacatgcgtgtcagcacatacagccgcttcctggaagccgcctggaatgtcttcacggcagcgttttgctcacacagcagcttttgcacgccccaggcagccccgactgctgaaatccaacttgagctggctggtggtccctggatcctagagcccttcacttcgggttactccctctttcttgcctctatttcttagttggaagaaataaactcacaaattatggtgcagtaattttccggggaaagtaaagcctcaggaatgcccacgcctttcttccaaagcctttgtctctgagacctcttaagttctaagattaaatgcccctcgctgttcttcctctga

SEQ ID NO: 65467 - DNA, 1130 bp, Homo sapiens
  misc_feature (49)..(49): n is a, c, g, or t
  misc_feature (64)..(64): n is a, c, g, or t
gaccctggagaagatgtggccctccccttgttagttttgaggacactgnagccacccaggtgtnccccaagctgtacttgtcacctcgaattgagcatgcacttggaggctcctcagctcttcatatcccagcttttccaggaggaggatgtctcattgattacgttcctcaagtatgccacctgctcaccaacaaggtgcagtacgtgattcaagggtatcacaaaagaagagagtatattgctgcttttctcagtcactttggcacaggtgtcgtggaatatgatgcagaaggctttacaaaactcactctgctgctgatgtggaaagatttttgttttcttgtacacattgacctgcctctgtttttccctcgagaccagccaactctcacatttcagtccgtttatcactttaccaacagtggacagctttactcccaggcccaaaaaaattatccgtacagccccagatgggatggaaatgaaatggccaaaagagcaaaggggatgccaagggagcagagatgcctgcagcccgtgggagcaagtcctggcctttgcagttgcaaaaactggctgcaagctgctccagccccagaggaactggccaagctccagagggcctccttggagggcctcagagggagagagaactgctcagtaattttgatcactttgggcttatttcaaaacctttgtccctcagttccaggaggcagcatttgccaatggaaagctctaggaaacaccagtcttgagaggtggccagccagactgcctgtccacatgcgtgtcagcacatacagccgcttcctggaagccgcctggaatgtcttcacggcagcgttttgctcacacagcagcttttgcacgccccaggcagccccgactgctgaaatccaacttgagctggctggtggtccctggatcctagagcccttcacttcgggttactccctctttcttgcctctatttcttagttggaagaaataaactcacaaattatggtgcagtaattttccggggaaagtaaagcctcaggaatgcccacgcctttcttccaaagcctttgtctctgagacctcttaagttctaagattaaatgcccctcgctgttcttcctctga

SEQ ID NO: 65468 - DNA, 732 bp, Homo sapiens
ttatgtattaaaaatatatatcgcttcatatataagtaaagattaacatatttgtttgacctgcctctgtttttccctcgagaccagccaactctcacatttcagtccgtttatcactttaccaacagtggacagctttactcccaggcccaaaaaaattatccgtacagccccagatgggatggaaatgaaatggccaaaagagcaaagaagagagagcaacagagatggggaggaatccagctctgcctgacatccaggcatcctctccaaattgcatagggcttatttcaaaacctttgtccctcagttccaggaggcagcatttgccaatggaaagctctaggaaacaccagtcttgagaggtggccagccagactgcctgtccacatgcgtgtcagcacatacagccgcttcctggaagccgcctggaatgtcttcacggcagcgttttgctcacacagcagcttttgcacgccccaggcagccccgactgctgaaatccaacttgagctggctggtggtccctggatcctagagcccttcacttcgggttactccctctttcttgcctctatttcttagttggaagaaataaactcacaaattatggtgcagtaattttccggggaaagtaaagcctcaggaatgcccacgcctttcttccaaagcctttgtctctgagacctcttaagttctaagattaaatgcccctcgctgttcttcctctga

SEQ ID NO: 65469 - DNA, 729 bp, Homo sapiens
atataaataaaaaccgttatgatattaagatttcctgatttataataagtgattgacctgcctctgtttttccctcgagaccagccaactctcacatttcagtccgtttatcactttaccaacagtggacagctttactcccaggcccaaaaaaattatccgtacagccccagatgggatggaaatgaaatggccaaaagagcaaagaagagagagcaacagagatggggaggaatccagctctgcctgacatccaggcatcctctccaaattgcatagggcttatttcaaaacctttgtccctcagttccaggaggcagcatttgccaatggaaagctctaggaaacaccagtcttgagaggtggccagccagactgcctgtccacatgcgtgtcagcacatacagccgcttcctggaagccgcctggaatgtcttcacggcagcgttttgctcacacagcagcttttgcacgccccaggcagccccgactgctgaaatccaacttgagctggctggtggtccctggatcctagagcccttcacttcgggttactccctctttcttgcctctatttcttagttggaagaaataaactcacaaattatggtgcagtaattttccggggaaagtaaagcctcaggaatgcccacgcctttcttccaaagcctttgtctctgagacctcttaagttctaagattaaatgcccctcgctgttcttcctctga

SEQ ID NO: 65470 - DNA, 719 bp, Homo sapiens
atatttaatcatataataaaaaaaaagacaaaaaaaccttagttgacctgcctctgtttttccctcgagaccagccaactctcacatttcagtccgtttatcactttaccaacagtggacagctttactcccaggcccaaaaaaattatccgtacagccccagatgggatggaaatgaaatggccaaaagagcaaagaagagagagcaacagagatggggaggaatccagctctgcctgacatccaggcatcctctccaaattgcatagggcttatttcaaaacctttgtccctcagttccaggaggcagcatttgccaatggaaagctctaggaaacaccagtcttgagaggtggccagccagactgcctgtccacatgcgtgtcagcacatacagccgcttcctggaagccgcctggaatgtcttcacggcagcgttttgctcacacagcagcttttgcacgccccaggcagccccgactgctgaaatccaacttgagctggctggtggtccctggatcctagagcccttcacttcgggttactccctctttcttgcctctatttcttagttggaagaaataaactcacaaattatggtgcagtaattttccggggaaagtaaagcctcaggaatgcccacgcctttcttccaaagcctttgtctctgagacctcttaagttctaagattaaatgcccctcgctgttcttcctctga

SEQ ID NO: 65471 - DNA, 1098 bp, Homo sapiens
  misc_feature (49)..(49): n is a, c, g, or t
  misc_feature (64)..(64): n is a, c, g, or t
  misc_feature (1098)..(1098): n is a, c, g, or t
gaccctggagaagatgtggccctccccttgttagttttgaggacactgnagccacccaggtgtnccccaagctgtacttgtcacctcgaattgagcatgcacttggaggctcctcagctcttcatatcccagcttttccaggaggaggatgtctcattgattacgttcctcaagtatgccacctgctcaccaacaaggtgcagtacgtgattcaagggtatcacaaaagaagagagtatattgctgcttttctcagtcactttggcacaggtgtcgtggaatatgatgcagaaggctttacaaaactcactctgctgctgatgtggaaagatttttgttttcttgtacacattgacctgcctctgtttttccctcgagaccagccaactctcacatttcagtccgtttatcactttaccaacagtggacagctttactcccaggcccaaaaaaattatccgtacagccccagatgggatggaaatgaaatggccaaaagagcaaagttccaggaggcagcatttgccaatggaaagctctaggaaacaccagtcttgagaggtggccagccagactgcctgtccacatgcgtgtcagcacatacagccgcttcctggaagccgcctggaatgtcttcacggcagcgttttgctcacacagcagcttttgcacgccccaggcagccccgactgctgaaatccaacttgagctggctggtggtccctggatcctagagcccttcacttcgggttactccctctttcttgcctctatttcttagttggaagaaataaactcacaaattatggtgcagtaattttccggggaaagtaaagcctcaggaatgcccacgcctttcttccaaagcctttgtctctgagacctcttaagttctaagattaaatgcccctcgctgttcttcctctgaaaaaaaaaaacggactcattggcctaaatgtccccccccctcgccacggcaaacatagcaaaaaaatgtccctcttggcccccggggggacctttgcgcacccttcccttcacggagggtcaacttaagaccccccctcaccacctccctgccttccgactcctggcatn

SEQ ID NO: 65472 - DNA, 839 bp, Homo sapiens
  misc_feature (16)..(16): n is a, c, g, or t
  misc_feature (20)..(20): n is a, c, g, or t
  misc_feature (839)..(839): n is a, c, g, or t
cactccccaccccccncccnctccccccccctatgtttagggtgcacgccaagggcagcagtatcatgcctgcagcccgtgggagcaagtcctggcctttgcagttgcaaaaactggctgcaagctgctccagccccagaggaactggccaagctccagagggcctccttggagggcctcagagggagagagaactgctcagtaattttgatcactttgggcttatttcaaaacctttgtccctcagttccaggaggcagcatttgccaatggaaagctctaggaaacaccagtcttgagaggtggccagccagactgcctgtccacatgcgtgtcagcacatacagccgcttcctggaagccgcctggaatgtcttcacggcagcgttttgctcacacagcagcttttgcacgccccaggcagccccgactgctgaaatccaacttgagctggctggtggtccctggatcctagagcccttcacttcgggttactccctctttcttgcctctatttcttagttggaagaaataaactcacaaattatggtgcagtaattttccggggaaagtaaagcctcaggaatgcccacgcctttcttccaaagcctttgtctctgagacctcttaagttctaagattaaatgcccctcgctgttcttcctctgaaaaaaaaaaacggactcattggcctaaatgtccccccccctcgccacggcaaacatagcaaaaaaatgtccctcttggcccccggggggacctttgcgcacccttcccttcacggagggtcaacttaagaccccccctcaccacctccctgccttccgactcctggcatn

SEQ ID NO: 65473 - DNA, 955 bp, Homo sapiens
  misc_feature (49)..(49): n is a, c, g, or t
  misc_feature (64)..(64): n is a, c, g, or t
gaccctggagaagatgtggccctccccttgttagttttgaggacactgnagccacccaggtgtnccccaagctgtacttgtcacctcgaattgagcatgcacttggaggctcctcagctcttcatatcccagcttttccaggaggaggatgtctcattgattacgttcctcaagtatgccacctgctcaccaacaaggtgcagtacgtgattcaagggtatcacaaaagaagagagtatattgctgcttttctcagtcactttggcacaggtgtcgtggaatatgatgcagaaggctttacaaaactcactctgctgctgatgtggaaagatttttgttttcttgtacacattgacctgcctctgtttttccctcgagaccagccaactctcacatttcagtccgtttatcactttaccaacagtggacagctttactcccaggcccaaaaaaattatccgtacagccccagatgggatggaaatgaaatggccaaaagagcaaaggcttatttcaaaacctttgtccctcagttccaggaggcagcatttgccaatggaaagctctaggaaacaccagtcttgagaggtggccagccagactgcctgtccacatgcgtgtcagcacatacagccgcttcctggaagccgcctggaatgtcttcacggcagcgttttgctcacacagcagcttttgcacgccccaggcagccccgactgctgaaatccaacttgagctggctggtggtccctggatcctagagcccttcacttcgggttactccctctttcttgcctctatttcttagttggaagaaataaactcacaaattatggtgcagtaattttccggggaaagtaaagcctcaggaatgcccacgcctttcttccaaagcctttgtctctgagacctcttaagttctaagattaaatgcccctcgctgttcttcctctga

SEQ ID NO: 65474 - DNA, 1157 bp, Homo sapiens
  misc_feature (49)..(49): n is a, c, g, or t
  misc_feature (64)..(64): n is a, c, g, or t
  misc_feature (894)..(894): n is a, c, g, or t
  misc_feature (900)..(900): n is a, c, g, or t
  misc_feature (907)..(908): n is a, c, g, or t
  misc_feature (926)..(926): n is a, c, g, or t
gaccctggagaagatgtggccctccccttgttagttttgaggacactgnagccacccaggtgtnccccaagctgtacttgtcacctcgaattgagcatgcacttggaggctcctcagctcttcatatcccagcttttccaggaggaggatgtctcattgattacgttcctcaagtatgccacctgctcaccaacaaggtgcagtacgtgattcaagggtatcacaaaagaagagagtatattgctgcttttctcagtcactttggcacaggtgtcgtggaatatgatgcagaaggctttacaaaactcactctgctgctgatgtggaaagatttttgttttcttgtacacattgacctgcctctgtttttccctcgagaccagccaactctcacatttcagtccgtttatcactttaccaacagtggacagctttactcccaggcccaaaaaaattatccgtacagccccagatgggatggaaatgaaatggccaaaagagcaaaggcttatttcaaaacctttgtccctcagttccaggaggcagcatttgccaatggaaagctctaggaaacaccagtcttgagaggtggccagccagactgcctgtccacatgcgtgtcagcacatacagccgcttcctggaagccgcctggaatgtcttcacggcagcgttttgctcacacagcagcttttgcacgccccaggcagccccgactgctgaaatccaacttgagctggctggtggtccctggatcctagagcccttcacttcgggttactccctctttcttgcctctatttcttagttggaagaaataaactcacaaattatggtgcagtaattttccggggaaagtaaagcctcaggaatgcccacgcctttcttccaagnccttgnctctganncctcttaagtctaagatnaaatgcccccttcgttgctcctccctcctgacaaagaaataaactccgccatcgcttgggcccacaacgcggacctcttcgacgctcccccccctagggaggggtacactctcgtccctccatccttgactccgttctcctagaatatacccacttcgcctaccgcgcgcgcttcatacgctgggcggtctagacgattttctccaaaatactgggcgatacacgaggata

SEQ ID NO: 65475 - DNA, 1176 bp, Homo sapiens
  misc_feature (49)..(49): n is a, c, g, or t
  misc_feature (64)..(64): n is a, c, g, or t
gaccctggagaagatgtggccctccccttgttagttttgaggacactgnagccacccaggtgtnccccaagctgtacttgtcacctcgaattgagcatgcacttggaggctcctcagctcttcatatcccagcttttccaggaggaggatgtctcattgattacgttcctcaagtatgccacctgctcaccaacaaggtgcagtacgtgattcaagggtatcacaaaagaagagagtatattgctgcttttctcagtcactttggcacaggtgtcgtggaatatgatgcagaaggctttacaaaactcactctgctgctgatgtggaaagatttttgttttcttgtacacattgacctgcctctgtttttccctcgagaccagccaactctcacatttcagtccgtttatcactttaccaacagtggacagctttactcccaggcccaaaaaaattatccgtacagccccagatgggatggaaatgaaatggccaaaagagcaaagccagctggccctcccttctcctcctccttctcatctgctgcaccaggggatgccaagggagcagagatgcctgcagcccgtgggagcaagtcctggcctttgcagttgcaaaaactggctgcaagctgctccagccccagaggaactggccaagctccagagggcctccttggagggcctcagagggagagagaactgctcagtaattttgatcactttgggcttatttcaaaacctttgtccctcagttccaggaggcagcatttgccaatggaaagctctaggaaacaccagtcttgagaggtggccagccagactgcctgtccacatgcgtgtcagcacatacagccgcttcctggaagccgcctggaatgtcttcacggcagcgttttgctcacacagcagcttttgcacgccccaggcagccccgactgctgaaatccaacttgagctggctggtggtccctggatcctagagcccttcacttcgggttactccctctttcttgcctctatttcttagttggaagaaataaactcacaaattatggtgcagtaattttccggggaaagtaaagcctcaggaatgcccacgcctttcttccaaagcctttgtctctgagacctcttaagttctaagattaaatgcccctcgctgttcttcctctga

SEQ ID NO: 65476 - DNA, 639 bp, Homo sapiens
  misc_feature (49)..(49): n is a, c, g, or t
  misc_feature (64)..(64): n is a, c, g, or t
gaccctggagaagatgtggccctccccttgttagttttgaggacactgnagccacccaggtgtnccccaagctgtacttgtcacctcgaattgagcatgcacttggaggctcctcagctcttcatatcccagcttttccaggaggaggatgtctcattgattacgttcctcaagtatgccacctgctcaccaacaaggtgcagtacgtgattcaagggtatcacaaaagaagagagtatattgctgcttttctcagtcactttggcacaggtgtcgtggaatatgatgcagaaggctttacaaaactcactctgctgctgatgtggaaagatttttgttttcttgtacacattgacctgcctctgtttttccctcgagaccagccaactctcacatttcagtccgtttatcactttaccaacagtggacagctttactcccaggcccaaaaaaattatccgtacagccccagatgggatggaaatgaaatggccaaaagagcaaaggtaagtgaatctgtcgttatttccaacaggtaagagcattttgtttatctagtccaggggttggcaagctactgcttgcaggttagttcctgccctgtgcatgtttttgtaaataaagttttatagaaacaca

SEQ ID NO: 65477 - DNA, 324 bp, Homo sapiens
  misc_feature (49)..(49): n is a, c, g, or t
  misc_feature (64)..(64): n is a, c, g, or t
gaccctggagaagatgtggccctccccttgttagttttgaggacactgnagccacccaggtgtnccccaagctgtacttgtcacctcgaattgagcatgcacttggaggctcctcagctcttcatatcccagcttttccaggaggaggatgtctcattgattacgttcctcaagtatgccacctgctcaccaacaaggtgcagtacgtgattcaagggtatcacaaaagaagagagtatattgctgcttttctcagtcactttggcacaacttaaacagtttttgttgtcttggatagctgctgtagaaggggatcctctagtc

SEQ ID NO: 65478 - DNA, 568 bp, Homo sapiens
ggaggagaaagaaacagctctctgggccaggacccgctgttcgtgggatgtctggggagctgtgtgaacccacaggccgttttgtttctctccatcagcagctgtgggctgaagcgtgtaccggcagagtgggttgagatcgtgtctgcgcccacttgccaccagctccggcctctggggaggtggtgctgagagggagggagagtggctcctgtttggctcctggagacagacagctgggtgtcccaccctcagagtccccagccccctctcccctctgctaactctgccggtggagctcacgccgcagctcatgccaaccctgcccttctgttttgcctctcatgactctccccaaattctgccccaggcccccagccagccttcttgccactttcctgccctttactcttgccccttctacctcttgccagggcagcgtcactggctacgtgaggcccagcttggggatgcatggggaggtgtaagaacagctgtgccatgagctgtccttccgggcctctggggctggagaaaccccggggtcagcagtaccacgggttttgct

SEQ ID NO: 65479 - DNA, 1108 bp, Homo sapiens
gatgaatcttaaagcaacactccattggaggagctgctcccttccccgttcagctgtaattgtctgaatatttatttctcggcattcactgcagaacaagctgcaagtggtgactcggacgtgatcaagtggtgactcggacatgatcaagtggtgactccgacgtgattgccttgaagttatgcatggagtaggatgactcaccaatcttcggggaataccggactagagtggatccccataaaatgagtgaagccataatatgagttagagactactgaaaaagcccctcctgatgatgaaggacctgtcattggagaatcgaccaaaactgacagtgataacttggaaggcacctgacattacctggggacagctaaagaaactggaccaacagggaactatctggcttgcatctatgggagcccctgaaactgcagagaaccagtttcttatgtatctgatggtaattgggggagcttctgagaaggcatctgcaaatggctctgtgctgccactcaaccaactatgaccagggaagaatgatagaagcttactttgcattggataatccgcatgttctaagaattaaagaagggggaaatgtgaggggtgtatgacaatacattcaagcttatgtacaaggcatttgaggttgaggcatggaaaaatactgaggcactgtgtgtatgttgtttgtgcatgaaactgtaattccttgaccctgaaaataggacaaggaatagaatttgtaataaggagtgctgaacacagcctcctaagaatgtggtttgagtgcttttagatgttataaacaaggccatatgtgcctcatgacccgaccccaaatagccaccttgtagatgtttcttgtttgtctaaattgtagttcaactagccttctcaataaatacttggcagatgaatcttaaagcagcactgtcttggaggagctgctcccctccctttcagctgtaattgtctgaatacttatttcttggtgttcactgcagagcaagctgcagcacagctgccggcatttattcatgcaagattccagcttgcttatctatgtctgcagctcaattttacaggctgctctttgtta

SEQ ID NO: 65480 - DNA, 377 bp, Homo sapiens
tacagattagaaaattaaggttcaggtcaattaaagatgtggagctttgcttctccatgggagaaaatttggcctagttttagatggacataccttatgccttttagagcacaaacccaagatactaaactgtctctggatttaagtgtaagaccaaaagattgtctagaaaagtttgagggcagtgtgtatttggattggcacatgcatcctttgagcctaaatataagaagagaatccagagaaatatcatcattcctgtcaaggaaaaaagtgagcactaacaggagtggtggtaagaggcccataggagaaggcataagagtcagaggggagaaggagaaaaggtaggcaaagcccaggtggagagcctgggg

SEQ ID NO: 65481 - DNA, 444 bp, Homo sapiens
ggttttcaccatgttggccaggctgtgaactcctgacctcaagtgatccacccgttctccctggcctccctaagtgctgagattacaggtgtgagccaccatgcctggccctgtttttcagttttcctgtttttcaattttagctgttgtctgttggctttcttctgtggtagatgagtctatgctttaggattcttatgccaccttgaaatttctttcccatgtcttcccaatatagtcatgcttttgattaaatcagcattcgttgtttacattattatgagtttgtaaatatgtttacagtggaaccttacagtgtactatgattatatttcttggagttgatttctttttatttcttagtttcctatttgtctctaatttttttttctacaaactgtcccaatatcatcaaacatcaggtaattgacccttcagttttaa

SEQ ID NO: 65482 - DNA, 298 bp, Homo sapiens
ggagtttcaccatgttgcccaggctggtctcaaactcctgagctcaggcaatccacccacctcggcctcccaaagtgctaggattacaggtgtgagccaccgcacccggctgggatttttatttatgtccatctgtaatgtacgctccccacagaaatcccagcatctaaaaccaccaccttgcacattgcaggggctcccaaaaacctcttgggtgaagggatggataggctggtgcccagaaacaacacatctttaggggatccatggcacggtcaaccctcacactgagggttga

SEQ ID NO: 65483 - DNA, 351 bp, Homo sapiens
tgtattgctaactgtctttgtaactaatttatgtatactgtaaatggtatagcatgtgattttattatagttgattaactttgtaatttctgtaactgcatcgatatcccagtctacctggaaaattaagtctattaaccatagttgctgtaggagacagtactattgccaactgaagcctgaatccttcatttattttgtccccaattacagagtggaggtttagaggagtggggttagataatgctcagattagaaatacaaaggcagctgtcagatcctcccattttattgttgaagaaactgagttgtaaacatcacaagagctagttaactggtgagtagcagccc

SEQ ID NO: 65484 - DNA, 180 bp, Homo sapiens
ttccttcctttactcatgtccacaaaggatcttggcgactgatacattctgatgtctagtgatttttgtactagccaagtaataatgtttttaaaaagactatgagaaaaagaattcaactgaaaatttatgatagctttaaaaaattaaaagctaacagatacatttttaagggagaga

SEQ ID NO: 65485 - DNA, 126 bp, Homo sapiens
cacaaaaaacaaaaacagagaagggtttgactctttaaacgatgtgtgtgcaaaatggaaactaaatgtttttctatgagacaagaaagaacaagcacatgcacacatacagacacacagacagac

SEQ ID NO: 65486 - DNA, 382 bp, Homo sapiens
gaatgtgtaccacagcaggtactgcatgctaaacccacgacttatgaccctattgtccaaatgagtggcaagcataacttctccattgtggtggtgaatgagaggatgaagagataatgatggcatatagaaagaaaagtgcagcaaacaaaaggataaccctgaagaaaaacttgagctgtttctctgctttgtctaatctcctgtcaggacatcatttattacccacaatattcacttgagaaaacaactttgagaaaccagcaaagaaaaagccaaaggatgaagatgaagtccttctatagttcaaatcgctcatgtctgtgatcttcaaaatgtgacattggacaatcaatttaaatgctcttttttaaaagataga

SEQ ID NO: 65487 - DNA, 748 bp, Homo sapiens
gtaggccctacgagagactgctggcttggggcgcagcccgtacctctgggagaggccacaaaggggtcggagagcgcggtcctgtgcacagttagggttaagtccgctcagtctccattgggccctgatcctgaagttctgtgccctccgaagaaagggcctattcacgtttcctggagacgccggaggtgcccagcttgtgctcaccactcaagcagctctccccttgctggaggtgtgggttggagaattgcagaatttccctctcggcccgaatgagccattaccaaagcattttgtcaaaaatagtgaagttagtttggccttccaaggttaggtggtgtggtagattgcgggaccgaggttcagaatttctgggggctgtatccccgagccccactcctcagaatgcaactctgtacgacgaaggaactgggtaatccgcatttcagccaatttagcagatgactaaccaccttaaaacggtccacacaattatcttgtttatcaggcaaaaaaattgactcctaggtaccgaattggcatggatttgacaattagcgattcacggttaagcagactttatctatcttaatccaatcaaaggagaatttctgcctgctgtgtttggagagacaacgcgtggatgtgagttaaactttgttaaacccaggacaagctttaagataaaacgactgatatttaaaatggcaatttaaataaaaatgttctctgatcagcctttttg

SEQ ID NO: 65488 - DNA, 465 bp, Homo sapiens
ggaactgggtaatccgcatttccttcgtcgtacagagttgcattctgaggagtggggctcggggatacagcccccagaaattctgaacctcggtcccgcaatctaccacaccacctaaccttggaatgcaactctgtacgacgaaggaactgggtaatccgcatttcagccaatttagcagatgactaaccaccttaaaacggtccacacaattatcttgtttatcaggcaaaaaaattgactcctaggtaccgaattggcatggatttgacaattagcgattcacggttaagcagactttatctatcttaatccaatcaaaggagaatttctgcctgctgtgtttggagagacaacgcgtggatgtgagttaaactttgttaaacccaggacaagctttaagataaaacgactgatatttaaaatggcaatttaaataaaaatgttctctgatcagcctttttg

SEQ ID NO: 65489 - DNA, 2311 bp, Homo sapiens
  misc_feature (1)..(3): n is a, c, g, or t
  misc_feature (72)..(72): n is a, c, g, or t
  misc_feature (671)..(671): n is a, c, g, or t
  misc_feature (964)..(964): n is a, c, g, or t
  misc_feature (1021)..(1021): n is a, c, g, or t
  misc_feature (1109)..(1109): n is a, c, g, or t
  misc_feature (1292)..(1292): n is a, c, g, or t
  misc_feature (1442)..(1442): n is a, c, g, or t
  misc_feature (1947)..(1947): n is a, c, g, or t
  misc_feature (2077)..(2077): n is a, c, g, or t
nnngaggtgaaaattaaaaaatctagtatactgcttagtgtggctttaaaatcaatgtatttgtttttgaanttttttagtgtgatttcatagggaatactagaaataaaacatctgtcaaggaatgaattttttgcagatgagtagtgtcagagaggcatgaaattgattgctgtgatctaaggagaatgcgctgtggagcaggcatggtgggtgctgatgttgtctgttggtctctctgtgtatgccaaggtgactttcaacagaaagatgagcttggtctaggggataaggccccttcaactcttggtatttcttttgaggttgtaaggagttgaggtaaaaaatatagggccatctttattcagaagtaagactgttggaaattgttttctaaggcctatgtttaactagctaataataacaattgttgtgattgtgttcaatgatataaaatttgattcttaagaggcgatttatccttttgctggagtgggtttcaagtagtttttcagaataaaattagttttgcagcatatattcctttggagaggggttgttctgttttctcatataacttcattagactcctagctttcaaaaacggatatcactcttccctcagattggctgacctttacagcaattggcggtgtctttctctaacatcntagaataggtgctggccatgaagtttaatcttgaacttacttctgtgtaatgtttactcaaagccatgctctgaaatataggcaatccatttatttcttgattgtctaagacctgtcttttcattatgtttgattattattagtgagctacaaaactggaccatgttgttctgtctctctatatcaaatttctcttatttgattgttttggtgttcacagttttcatcctacatatatagaaagacttcatatagtacttacagtgagtgggggagggggctatgttaaaccncaaggtgtctttttagaaaaatgtagcctatagtgaaaagatggtacaaggaaattntttccataggaactaatgtacagtgccccagattgccctatcttgcactttttacttattaactctgccctaaaattctttaagtaancctttaatgttaaaacattaagatgaaatagacattttaaaaatggagaggattctgggagttggagacttgaagcatctctgcaccttctgctatcaatttcagtctcgccactagttgctgtttctcagaagcacatctgacgacagatgtgagccattgggctagttctggcaaagtgcngggatcaacagtgttggccccagtctctgtgactgttcctgagataaccttttggttttcatgtccctgtcaactggtttgggtgggtgagggatggggagagactttctccaggttttcttaagagggggctgcaaactcatcagctgntggcataccactgggcctcagcagcagaggctgcctcatctcccaccacttagtggatccttccacttaaggcagcccaacagtgggacctgagctctggtgcgtaggcagatgaaaaagaaggggtcatctatggggcacagtaggcggagagaaagagacaaatgagaacttagaagaggtgtgtcttggaagaactcttggaatagttcagtggtgctttgatgtttgtagcattgacaacgattactacttgattttaatacaccctcaattttaagttgcattttgatttcatagatagtgaagagtagaagaaagtaacttcatgcatgttatatttgatgaattagactaaattccagaaggagataaagggaagagtttgagaggaggtgataattatgtgatataaaacatttcactgagctgaagaaaactggagtctgcaaattgaaaggactctttattctaggaggcactgatgagaaaacatgcacacctngtcatagacagctaaaatttcagaactctaaggataaagagaaagccttatgaacttccagatagaaagaacactaatttataaaggaaatgggatcagcctgggtttaggcttttcttctgccagactngaagctagaagatggaatgacacctaaaaggactgcaagcccacaattctctgttgagctcttactcagctgttacggtgaaaaagaggaccattgatatgcaaggatttagaaaatttattaattttaattctagcaggcagagtccattaaggagatcaaacacaccagttatttttatagagagaatttaatgtaagaattgttaatgaggcacttaagagctgaaaaggc

SEQ ID NO: 65490 - DNA, 370 bp, Homo sapiens
atgtatctttttactgacaaactgacatcaagatcaaatttagtggccctctcttctaagaccacccagtttgagattaaaggcatcttccaacactttagattggtttcctgttagacttataggtatttccttagcatggttttgtatcataaccacagcattcagcattacacagctggttaattatcaaattactcccaggatgaggcccaaattttattttatttttatttttgtttttttgtaccttacttctataatagcttggctccaggcataacataatgggataaaataagacagactaacatgtgaaaatgttaaatgtataagataatttatgaggaaaattatcattaacataaaa

SEQ ID NO: 65491 - DNA, 463 bp, Homo sapiens
aaccacatggagggcttaatgtatgtcccctgcaatgtgggggacgtgatagaatggtgtctgatttatctgagaagcctaaaggtaagagatgggtttactaagcatttaataaataaatacaaaaataaattatctgtgttgacattggcctgcatcccatgagtaggcagcagaaaaataaatatgcatgcgtttcccatgggtcagtcataagcacatgtgacagagagccagtgtggtctgccttcacgcctgtactgaaattgccacttgtaatggtgactcattaggcagtgaccagccagattaaagcggcatttgtctacatcaagtaaattgcagtaggtactgcttcagttaattcacaaatgcccaggagatccaaaggcagctttaaacatctgtgagccccagaacgtgtggagcttccataggacaagcacagtaacataagaaaaat

SEQ ID NO: 65492 - DNA, 1693 bp, Homo sapiens
  misc_feature (3)..(3): n is a, c, g, or t
  misc_feature (5)..(6): n is a, c, g, or t
  misc_feature (10)..(10): n is a, c, g, or t
  misc_feature (15)..(15): n is a, c, g, or t
  misc_feature (20)..(20): n is a, c, g, or t
  misc_feature (164)..(164): n is a, c, g, or t
acngnncgcngcctnttttnttttgccgggagcatagtgctgctgcacgctccactctgttggaattcatttctttgctcagtggctcacctgctggagcggaagcgccctggacacaggggttttgtctctgtcccttgctgcatcccatgatatcatttctngaatagtgaactaattagtaaatgcaatggtattcggtggtgatatgaagtagaatttttaacgttccactatgctagttttgctttgttttctagattttgggaaccagtaggacattgacatacatccgagaacattctgtggtggatccagtggaaaagaaaatggaactttgttctaccaatatcacactcacaaatttggtgtcagttaatgagaggttggtgtacacacctcatccagagaacccagaaatgaccgtgctcacacaagaagccatcatcactgtgaaggggattagccttggtagttatttggaaagtttaatggccaatacgatatcatccaatgcaaagaaggggtgggctgctatcgagtggataattgaacactctgaaagcgctgtgagctaaggaggcctgtgcctgtgcttgtcataaatggtgatgcttcccagaagaaaggaaagaaggaggtgaggagaggacgagcaaggacgggacggaagagcacgtctggctgcgagggcacacagggccggggaggaggattaggctggactgatcgcgggtcgcaggtgaccccgggaccagatgtccctcccctcatgagcgtgcaacagggagcagccccagccagccccaccgccgccgtctgcgtggatggagggctcgaggccctcgcccgtgtcccttaggggcggcgcccatcgtcctgcctgccgcggtggcccagccccttctctccctgcaggtgacccgcgccgcccccgcccgcccgcccacgctgtcctccacttaggcgcctccacaaacgctggcgggtgtgccgccctccagcctctccgcccccgtcccctcggtcctgcagatcaccaagcagctctcctgggcccgcggctgctccgggcctcacatctgctgctggcctcggtgggctctgactgcggggctcacggggcctggggccatggctttcttctcggcccccaaatgcctttcctggagtggctaagcctctcctgacgaggctcctcatgcggggagagggctggggtccaggggtttcccggccctttctgcaggctgtgccagccccctccagtctgccactgccgtgcccgggggacatcctgcgcccaggctggaggccctgcctcgctgcttgccagcctcacctgctggggctggaggccatggatccctcatagtatccaaggtttgagttcctgtttttcgccttatagttttgtgagtgtttgagggacaacgaccaaaggtcttttccccaccatctttaaatcaaagttgtttaaaacaacattaattttaaaaaatacataaaagcaacccatgcttatggttaaaaaagagtacaggagtctggagtccgttgaagggtaaaggcctcccgcaagctgccagtcggctctttttcgcaaagccttccagaagttttctgtgcttatgaaagcgtatgtgtggcctttctcttcccttcttttattaaacacagataggtttatgct

SEQ ID NO: 65493 - DNA, 299 bp, Homo sapiens
gagttgaaaactttgaggcatatctatttgtactgtcatgaaaacatcatgagggcatattaagtagaagaaggatgttgtagcatgatgtatactgtttgattgcatgtgtttttaagcagcaaaattgaaactatctatgtaaaaacacataaaaagttctggaagttataggtctttttgaaaacagtgattacctcctaggcgggttctagatgggagcgaggaggagccaaggagaactttaggcttatctgtatttttttaaatttatgtatttttctctaattaagaataaa

SEQ ID NO: 65494 - DNA, 396 bp, Homo sapiens
tctctgaatgagacttagacataaattattgtaccttcatatacatatataatgttcattatctttttaaaaatcaataggggcccacattttttagtttttgaaaaatgggtagaagaaggaaggagggagaaaattgctgctgatctataggaaagaatagcagggtatatcttggtttaaactgaactatgtacagtttctcgtgtttttcacttttcacatggtccaatatgaaaaatacacctaaaacaatcataataattatgtaccaagtaccaacatgtaccaggcaattttacttttgctatctttaattatcacaacaatattgcagtgtaggtaagttccctttaagactgaaggatgctgagtcctaagagtatcagtgacctc

SEQ ID NO: 65495 - DNA, 436 bp, Homo sapiens
ctaaagcacaacttttcgccccgaggcctgttgttgcacttaggaggggacttcagcatcatgcttagggctcatttgaaacaatgtgctcaccaaggaaaagcacaacagttgaactaactatgccacgtaaggacacttgtttgcagtgccagagccacgacaagaaggcagggcgttgcctcgttcaatcttagctgagaacgtgtgtgctgggcagctctgcacatgtctgcaaatgactgagaaaggaccacaagtatcaactctggggtaatcaatacattttagtgagaaggcaaattcacaaatatggaatctgccaacgaggatcgactgtattttacagaggcatctggtgaccaaagtcagaccaatccttggtattaacagaactatctcttttccaccaatccagtaaaaacaacaagacaac

SEQ ID NO: 65496 - DNA, 526 bp, Homo sapiens
acttctcttcagcttcaggccttagctgaattgtcgcctcttgtccctcttcccatagcgtccttcgctcccgcaatggggtcctagtcacattgcatgtgagttgctgctcatgcctgtctcctgcatgggactgagccctgtgggtgcaggaaccacatggctcctctgttattccccagcgccttactggggcacctgatgtgtgtgggcagtcaccaaacagtggcaggtattgaccaaggtgtaggttcccggcaggctgaactgcccctgggaggttgagggatcaatcaccaaaccccaggagggaagggaggagagtgaggaggaaagtcaggacttgtcttcggtggtcggtctgcctctcctcacaccttctccagtgattcagagagtagatttgggggactgagaagatacacaaaggacagaaactcatgcttcagagatgctgatgtcatataagtagtttccctgtctggccttggatgtttatatacatatgtgttggtaaaaagtgtta

SEQ ID NO: 65497 - DNA, 238 bp, Homo sapiens
tttagttccctgtttgttgttgttgttgttgttgttgttattgttcttcctcttcctgaatggcaaagcatttttgagggggcttcctactattgattggtaaggacatgagagctagagctctttttttgtttatttttcttttccctgagatggagtcttggtctgtcgcccaggctggagtgcagtggtgcaatcttggctcactgcaacctccaccttccgagttcaagtaatt

SEQ ID NO: 65498 - DNA, 728 bp, Homo sapiens
ttacagctgtgagccaacatgcccggccatcacaggctattttttaatacccaccctaaaataggctatggagccatagttgaagtcttggtttgttccactgtgtatctgaaggagttagatagaagcatcccttctaattctgaaattgagggaaatcttgttgtctatgtgtgtatcaacctctctttttattaagattttgaaatatgttggtatcacagatataaaacattctcatgttctttaaagagaattcacttttatgctagaaatgatggaaagggcttggtccatgacactttgctgagttattttgcttcatctgcatattactttgggaagaagatacaacatggtaaaataacagttttgaagaagaaaaaaataataatgactgttctaataacaagtcaagtttttcttttgtttggttggtttcagtcttttcatgggtttaaaaatataatgcagacttaatgtctttttttccttcatcaggagaaaatcctaattccagttgtacctttcccccttttcttcaggccatccagtgaagagagagagactgaaatatctctgaaggattctacactagataactaggttgacatacctggaatatagagaacacttgagaagtttgtaatggttttcatttgaaatagactgctgaaagttttaaatttttataagcatagttgatgacgtgacactcaggatcctcg

SEQ ID NO: 65499 - DNA, 963 bp, Homo sapiens
ttcggtctagtacgaggcgggtgtgaattcggccgaggcagactgtcttttcactgtttgtgggttttgtagaagttacacatttttatggtagataaaatgttacttctatacaagtactcactccctttttatcaaaagttaattttaatctcacagtctacattgtgctacattatccagcttctttggaacaatgtgtgctctgtatggttttttttggtatgacaactaattaagcaactgacattgaactgagaattctacaaactataaaacattaatttttgaaggtaatttagttttgtggctgggcattcagtgaagtcttaggacttctttgcagacaactgactgggtatatataggaatgaatctggctttagggttaaatcatttaaggtccttttataggcaggcactagtaactaaaactgaaaactaagtaagtttatttttgaggaatgttgttaaaaatgtctttaggaagtcactaaaacttaattggaagaaaaaatcatgatgcttatacaataaatatgaataaatgttatataaggaaactcacctatttgaaatcatggctatattgtttttattttctagattccaaaaatacaaacactagttgttccagcattgtactttgataagtctgtacattgacgtgtatggactaaatccagggtaaaatcaatgttacaaaatttaagggtatgttaactaaaggatagcatttctaagatattttgaatattagggtcatttggcacttctcagcaagtaggatacttctcatggtgtcgactctttgccttttggggcacaatgggtcttgaccagcgctctgtgtgaccttggggggtgggcccctggataacgggtgccctccgaaaggcgttctgcggtagaggcgttaatggggggaaccccgcgggacgcctttccccccttgggcggccg

SEQ ID NO: 65500 - DNA, 400 bp, Homo sapiens
ttagcccttccaggcctaatgaaatggttgttagatgatcttcaatgtcccagccaccctttaaaattcacaattcaaatttatccacccctataattcagaattctagtgtagaaaaagtagttttataaatttaaatagacagacttcctggtgtaccagcaaccatgacttacatttgatctgacagtggaaatgcatttttctcactttataatgttgagacacaatgtttttaatttcagaactctacagagcaaaacagatttccccaatgctttcagttaaacgtgcttgtaacttttagtttaacaagtcgccaggattctcccgaatcaacgacgtcgtaacgagcgtcctagttgcctacgctttaggatgtcagttagactctagatga

SEQ ID NO: 65501 - DNA, 340 bp, Homo sapiens
cgcagtcttctcccatcagagagtgacatcattactgaagaggacaaaagtaagaaaaaggggcaagaggaaaaacaacctaaaaagcagcctaagaaggatgaagagggccagaaggaagaagataagccaagaaaagagccggataaaaaagaggggaagaaagaagttgaatcaaaaaggaaaaatttagctaaaacaggggttacttcaacctccgattctgatgggagcaagatggcacagtctaacaaaacaacgtagggatacaaccaaagaataaggctatttaaggtgacacgcaggaagcaacctgggagcaggctgatgcactagagac

SEQ ID NO: 65502 - DNA, 3363 bp, Homo sapiens
ggcggcggcagcggcggcgcggttgcgattccgagccgttgagacgcctctgcggcagctggtggcgcaggtggcttgcgtggacgcgggtagaggcgaccggccagcaaccgcagcgtcggcgcccgcggccccggcaggcgcgtcgggacgccccgaggcatcctcccccgcccgcgggcccggtagctgggcccgcgtccgccgcccgcatccccgcgccgccgcatctcctcgccgcctcccgggcttcggacccccggtctcgcccccgaaacatgactcgcgatttcaaacctggagacctcatcttcgccaagatgaaaggttatccccattggccagctcgagtagacgaagttcctgatggagctgtaaagccacccacaaacaaactacccattttcttttttggaactcatgagactgcttttttaggaccaaaggatatatttccttactcagaaaataaggaaaagtatggcaaaccaaataaaagaaaaggttttaatgaaggtttatgggagatagataacaatccaaaagtgaaattttcaagtcaacaggcagcaactaaacaatcaaatgcatcatctgatgttgaagttgaagaaaaggaaactagcgtttcaaaggaagataccgaccatgaagaaaaagccagcaatgaggatgtgactaaagcagttgacataactactccaaaagctgccagaagggggagaaagagaaaggcagaaaaacaagtagaaactgaggaggcaggagtagtgacaacagcaacagcatctgttaatctaaaagtgagtcctaaaagaggacgacctgcagctacagaagtcaagattccaaaaccaagaggcagacccaaaatggtaaaacagccctgtccttcagagagtgacatcattactgaagaggacaaaagtaagaaaaaggggcaagaggaaaaacaacctaaaaagcagcctaagaaggatgaagagggccagaaggaagaagataagccaagaaaagagccggataaaaaagaggggaagaaagaagttgaatcaaaaaggaaaaatttagctaaaacaggggttacttcaacctccgattctgaagaagaaggagatgatcaagaaggtgaaaagaagagaaaaggtgggaggaactttcagactgctcacagaaggaatatgctgaaaggccaacatgagaaagaagcagcagatcgaaaacgcaagcaagaggaacaaatggaaactgagcagcagaataaagatgaaggaaagaagccagaagttaagaaagtggagaagaagcgagaaacatcaatggattctcgacttcaaaggatacatgctgagattaaaaattcactcaaaattgataatcttgatgtgaacagatgcattgaggccttggatgaacttgcttcacttcaggtcacaatgcaacaagctcagaaacacacagagatgattactacactgaaaaaaatacggcgattcaaagttagtcaggtaatcatggaaaagtctacaatgttgtataacaagtttaagaacatgttcttggttggtgaaggagattccgtgatcacccaagtgctgaataaatctcttgctgaacaaagacagcatgaggaagcgaataaaaccaaagatcaagggaagaaagggccaaacaaaaagctagagaaggaacaaacagggtcaaagactctaaatggaggatctgatgctcaagatggtaatcagccacaacataacggggagagcaatgaagacagcaaagacaaccatgaagccagcacgaagaaaaagccatccagtgaagagagagagactgaaatatctctgaaggattctacactagataactaggttgacatacctggaatatagagaacacttgagaagtttgtaatggttttcatttgaaatagactgctgaaagttttaaatttttataagcataggtttgatgttgaaaacttgttttgagggagaaaatccctttgttttaaagtaaagtaaacattatcgctaagtgtacttgtgcagtattaacagctacattatacagtaaatgtgggataaaatccatttagaaaatgttaaactgcttttccagacatggttgtagcatattttcaattagtgtgtgtatgttaatgtgtaattgatagtagaacaaagttacatttttaaaactgctacttgtataaaccttgcctcttttcccaaatactgtgggttttgtgcatagtttttacaaaccttggatttaccagactgtcttttcactgtttgtgggttttgtagaagttacacatttttatggtagataaaatgttacttctatacaagtactcactccctttttatcaaaagttaattttaatctcacagtctacattgtgctacattatccagcttctttggaacaatgtgtgctctgtatggttttttttggtatgacaactaattaagcaactgacattgaactgagaattctacaaactataaaacattaatttttgaaggtaatttagttttgtggctgggcattcagtgaagtcttaggacttctttgcagacaactgactgggtatatataggaatgaatctggctttagggttaaatcatttaaggtccttttataggcaggcactagtaactaaaactgaaaactaagtaagtttatttttgaggaatgttgttaaaaatgtctttaggaagtcactaaaacttaattggaagaaaaaatcatgatgcttatacaataaatatgaataaatgttatataaggaaactcacctatttgaaatcatggctatattgtttttattttctagattccaaaaatacaaacactagttgttccagcattgtactttgataagtctgtacattgacgtgtatggactaaatccagggtaaaatcaatgttacaaaatttaagggtatgttaactaaaggatagcatttctaagatattttgaatattagggtcatttggcacttctcagcaagtaggatacttctcatgttttgaaattatatgaatatggaaaaaaatggcttaagaccagcgtctctgtatgacattgtgtggttgaccctctgagataactgttttcatctacagaattgcatttttgcttttaaagaggtcttataatggaactaggaatcaccgttttgagagaacctgcatatataccagtcattatctgtttggtccttatacagttttaacttacttagatttattctagttaagccataagttcaacgtgtaaacttgttttcattaaagaatttttctatcaaaaaaaaaaagtcgacgcggccgcgaatttagtagtagta

SEQ ID NO: 65503 - DNA, 3296 bp, Homo sapiens
ggcggcggcagcggcggcgcggttgcgattccgagccgttgagacgcctctgcggcagctggtggcgcaggtggcttgcgtggacgcgggtagaggcgaccggccagcaaccgcagcgtcggcgcccgcggccccggcaggcgcgtcgggacgccccgaggcatcctcccccgcccgcgggcccggtagctgggcccgcgtccgccgcccgcatccccgcgccgccgcatctcctcgccgcctcccgggcttcggacccccggtctcgcccccgaaacatgactcgcgatttcaaacctggagacctcatcttcgccaagatgaaaggttatccccattggccagctcgagtagacgaagttcctgatggagctgtaaagccacccacaaacaaactacccattttcttttttggaactcatgagactgcttttttaggaccaaaggatatatttccttactcagaaaataaggaaaagtatggcaaaccaaataaaagaaaaggttttaatgaaggtttatgggagatagataacaatccaaaagtgaaattttcaagtcaacaggcagcaactaaacaatcaaatgcatcatctgatgttgaagttgaagaaaaggaaactagcgtttcaaaggaagataccgaccatgaagaaaaagccagcaatgaggatgtgactaaagcagttgacataactactccaaaagctgccagaagggggagaaagagaaaggcagaaaaacaagtagaaactgaggaggcaggagtagtgacaacagcaacagcatctgttaatctaaaagtgagtcctaaaagaggacgacctgcagctacagaagtcaagattccaaaaccaagaggcagacccaaaatggtaaaacagccctgtccttcagagagtgacatcattactgaagaggacaaaagtaagaaaaaggggcaagaggaaaaacaacctaaaaagcagcctaagaaggatgaagagggccagaaggaagaagataagccaagaaaagagccggataaaaaagaggggaagaaagaagttgaatcaaaaaggaaaaatttagctaaaacaggggttacttcaacctccgattctgaagaagaaggagatgatcaagaaggtgaaaagtgctcacagaaggaatatgctgaaaggccaacatgagaaagaagcagcagatcgaaaacgcaagcaagaggaacaaatggaaactgagcagcagaataaagatgaaggaaagaagccagaagttaagaaagtggagaagaagcgagaaacatcaatggattctcgacttcaaaggatacatgctgagattaaaaattcactcaaaattgataatcttgatgtgaacagatgcattgaggccttggatgaacttgcttcacttcaggtcacaatgcaacaagctcagaaacacacagagatgattactacactgaaaaaaatacggcgattcaaagttagtcaggtaatcatggaaaagtctacaatgttgtataacaagtttaagaacatgttcttggttggtgaaggagattccgtgatcacccaagtgctgaataaatctcttgctgaacaaagacagcatgaggaagcgaataaaaccaaagatcaagggaagaaagggccaaacaaaaagctagagaaggaacaaacagggtcaaagactctaaatggaggatctgatgctcaagatggtaatcagccacaacataacggggagagcaatgaagacagcaaagacaaccatgaagccagcacgaagaaaaagccatccagtgaagagagagagactgaaatatctctgaaggattctacactagataactaggttgacatacctggaatatagagaacacttgagaagtttgtaatggttttcatttgaaatagactgctgaaagttttaaatttttataagcataggtttgatgttgaaaacttgttttgagggagaaaatccctttgttttaaagtaaagtaaacattatcgctaagtgtacttgtgcagtattaacagctacattatacagtaaatgtgggataaaatccatttagaaaatgttaaactgcttttccagacatggttgtagcatattttcaattagtgtgtgtatgttaatgtgtaattgatagtagaacaaagttacatttttaaaactgctacttgtataaaccttgcctcttttcccaaatactgtgggttttgtgcatagtttttacaaaccttggatttaccagactgtcttttcactgtttgtgggttttgtagaagttacacatttttatggtagataaaatgttacttctatacaagtactcactccctttttatcaaaagttaattttaatctcacagtctacattgtgctacattatccagcttctttggaacaatgtgtgctctgtatggttttttttggtatgacaactaattaagcaactgacattgaactgagaattctacaaactataaaacattaatttttgaaggtaatttagttttgtggctgggcattcagtgaagtcttaggacttctttgcagacaactgactgggtatatataggaatgaatctggctttagggttaaatcatttaaggtccttttataggcaggcactagtaactaaaactgaaaactaagtaagtttatttttgaggaatgttgttaaaaatgtctttaggaagtcactaaaacttaattggaagaaaaaatcatgatgcttatacaataaatatgaataaatgttatataaggaaactcacctatttgaaatcatggctatattgtttttattttctagattccaaaaatacaaacactagttgttccagcattgtactttgataagtctgtacattgacgtgtatggactaaatccagggtaaaatcaatgttacaaaatttaagggtatgttaactaaaggatagcatttctaagatattttgaatattagggtcatttggcacttctcagcaagtaggatacttctcatgttttgaaattatatgaatatggaaaaaaatggcttaagaccagcgtctctgtatgacattgtgtggttgaccctctgagataactgttttcatctacagaattgcatttttgcttttaaagaggtcttataatggaactaggaatcaccgttttgagagaacctgcatatataccagtcattatctgtttggtccttatacagttttaacttacttagatttattctagttaagccataagttcaacgtgtaaacttgttttcattaaagaatttttctatcaaa

SEQ ID NO: 65504 - DNA, 3473 bp, Homo sapiens
ggcggcggcagcggcggcgcggttgcgattccgagccgttgagacgcctctgcggcagctggtggcgcaggtggcttgcgtggacgcgggtagaggcgaccggccagcaaccgcagcgtcggcgcccgcggccccggcaggcgcgtcgggacgccccgaggcatcctcccccgcccgcgggcccggtagctgggcccgcgtccgccgcccgcatccccgcgccgccgcatctcctcgccgcctcccgggcttcggacccccggtctcgcccccgaaacatgactcgcgatttcaaacctggagacctcatcttcgccaagatgaaaggttatccccattggccagctcgagtagacgaagttcctgatggagctgtaaagccacccacaaacaaactacccattttcttttttggaactcatgagactgcttttttaggaccaaaggatatatttccttactcagaaaataaggaaaagtatggcaaaccaaataaaagaaaaggttttaatgaaggtttatgggagatagataacaatccaaaagtgaaattttcaagtcaacaggcagcaactaaacaatcaaatgcatcatctgatgttgaagttgaagaaaaggaaactagcgtttcaaaggaagataccgaccatgaagaaaaagccagcaatgaggatgtgactaaagcagttgacataactactccaaaagctgccagaagggggagaaagagaaaggcagaaaaacaagtagaaactgaggaggcaggagtagtgacaacagcaacagcatctgttaatctaaaagtgagtcctaaaagaggacgacctgcagctacagaagtcaagattccaaaaccaagaggcagacccaaaatggtaaaacagccctgtccttcagagagtgacatcattactgaagaggacaaaagtaagaaaaaggggcaagaggaaaaacaacctaaaaagcagcctaagaaggatgaagagggccagaaggaagaagataagccaagaaaagagccggataaaaaagaggggaagaaagaagttgaatcaaaaaggaaaaatttagctaaaacaggggttacttcaacctccgattctgaagaagaaggagatgatcaagaaggtgaaaagaagagaaaaggtgggaggaactttcagactgctcacagaaggaatatgctgaaaggccaacatgagaaagaagcagcagatcgaaaacgcaagcaagaggaacaaatggaaactgagcagcagaataaagatgaaggaaagaagccagaagttaagaaagtggagaagaagcgagaaacatcaatggattctcgacttcaaaggatacatgctgagattaaaaattcactcaaaattgataatcttgatgtgaacagatgcattgaggccttggatgaacttgcttcacttcaggtcacaatgcaacaagctcagaaacacacagagatgattactacactgaaaaaaatacggcgattcaaagttagtcaggtaatcatggaaaagtctacaatgttgtataacaagtttaagaacatgttcttggttggtgaaggagattccgtgatcacccaagtgctgaataaatctcttgctgaacaaagacagcatgaggaagcgaataaaaccaaagatcaagggaagaaagggccaaacaaaaagctagagaaggaacaaacagggtcaaagactctaaatggaggatctgatgctcaagatggtaatcagccacaacataacggggagagcaatgaagacagcaaagacaaccatgaagccagcacgaagaaaaagccatccagtgaagagagagagactgaaatatctctgaaggattctacactagataactaggttgacatacctggaatatagagaacacttgagaagtttgtaatggttttcatttgaaatagactgctgaaagttttaaatttttataagcataggtttgatgttgaaaacttgttttgagggagaaaatccctttgttttaaagtaaagtaaacattatcgctaagtgtacttgtgcagtattaacagctacattatacagtaaatgtgggataaaatccatttagaaaatgttaaactgcttttccagacatggttgtagcatattttcaattagtgtgtgtatgttaatgtgtaattgatagtagaacaaagttacatttttaaaactgctacttgtataaaccttgcctcttttcccaaatactgtgggttttgtgcatagtttttacaaaccttggatttaccagactgtcttttcactgtttgtgggttttgtagaagttacacatttttatggtagataaaatgttacttctatacaagtactcactccctttttatcaaaagttaattttaatctcacagtctacattgtgctacattatccagcttctttggaacaatgtgtgctctgtatggttttttttggtatgacaactaattaagcaactgacattgaactgagaattctacaaactataaaacattaatttttgaaggtaatttagttttgtggctgggcattcagtgaagtcttaggacttctttgcagacaactgactgggtatatataggaatgaatctggctttagggttaaatcatttaaggtccttttataggcaggcactagtaactaaaactgaaaactaagtaagtttatttttgaggaatgttgttaaaaatgtctttaggaagtcactaaaacttaattggaagaaaaaatcatgatgcttatacaataaatatgaataaatgttatataaggaaactcacctatttgaaatcatggctatattgtttttattttctagattccaaaaatacaaacactagttgttccagcattgtactttgataagtctgtacattgacgtgtatggactaaatccagggtaaaatcaatgttacaaaatttaagggtatgttaactaaaggatagcatttctaagatattttgaatattagggtcatttggcacttctcagcaagtaggatacttctcatgttttgaaattatatgaatatggaaaaaaatggcttaagaccagcgtctctgtatgacattgtgtggttgaccctctgagataactgttttcatctacagaattgcatttttgcttttaaagaggtcttataatggaactaggaatcaccgttttgagagaacctgcatatataccagtcattatctgtttggtccttatacagttttaacttacttagatttattctagttaagccataagttcaacgtgtaaacttgttttcattaaagaatttttctatcaaactctgctagtaaattactttcttgctatttacaagagtaagtgatggaattctgggtttgctgccaaggaaataatttcttagttaactggtcacagaggttgtgctgttttgggaaacggggtaactaaacagtaagctcaagatga

SEQ ID NO: 65505 - DNA, 3097 bp, Homo sapiens
ggcggcggcagcggcggcgcggttgcgattccgagccgttgagacgcctctgcggcagctggtggcgcaggtggcttgcgtggacgcgggtagaggcgaccggccagcaaccgcagcgtcggcgcccgcggccccggcaggcgcgtcgggacgccccgaggcatcctcccccgcccgcgggcccggtagctgggcccgcgtccgccgcccgcatccccgcgccgccgcatctcctcgccgcctcccgggcttcggacccccggtctcgcccccgaaacatgactcgcgatttcaaacctggagacctcatcttcgccaagatgaaaggttatccccattggccagctcgagtagacgaagttcctgatggagctgtaaagccacccacaaacaaactacccattttcttttttggaactcatgagactgcttttttaggaccaaaggatatatttccttactcagaaaataaggaaaagtatggcaaaccaaataaaagaaaaggttttaatgaaggtttatgggagatagataacaatccaaaagtgaaattttcaagtcaacaggcagcaactaaacaatcaaatgcatcatctgatgttgaagttgaagaaaaggaaactagcgtttcaaaggaagataccgaccatgaagaaaaagccagcaatgaggatgtgactaaagcagttgacataactactccaaaagctgccagaagggggagaaagagaaaggcagaaaaacaagtagaaactgaggaggcaggagtagtgacaacagcaacagcatctgttaatctaaaagtgagtcctaaaagaggacgacctgcagctacagaagtcaagattccaaaaccaagaggcagacccaaaatggtaaaacagccctgtccttcagagagtgacatcattactgaagaggacaaaagtaagaaaaaggggcaagaggaaaaacaacctaaaaagcagcctaagaaggatgaagagggccagaaggaagaagataagccaagaaaagagccggataaaaaagaggggaagaaagaagttgaatcaaaaaggaaaaatttagctaaaacaggggttacttcaacctccgattctgaagaagaaggagatgatcaagaaggtgaaaagaagagaaaaggtgggaggaactttcagactgctcacagaaggaatatgctgaaaggccaacatgagaaagaagcagcagatcgaaaacgcaagcaagaggaacaaatggaaactgagcagcagaataaagatgaaggaaagaagccagaagttaagaaagtggagaagaagcgagaaacatcaatggattctcgacttcaaaggatacatgctgagattaaaaattcactcaaaattgataatcttgatgtgaacagatgcattgaggccttggatgaacttgcttcacttcaggtcacaatgcaacaagctcagaaacacacagagatgattactacactgaaaaaaatacggcgattcaaagttagtcaggtaatcatggaaaagtctacaatgttgtataacaagtttaagaacatgttcttggttggtgaaggagattccgtgatcacccaagtgctgaataaatctcttgctgaacaaagacagcatgaggaagcgaataaaaccaaagatcaagggaagaaagggccaaacaaaaagctagagaaggaacaaacagggtcaaagactctaaatggaggatctgatgctcaagatggtaatcagccacaacataacggggagagcaatgaagacagcaaagacaaccatgaagccagcacgaagaaaaagccatccagtgaagagagagagactgaaatatctctgaaggattctacactagataactaggttgacatacctggaatatagagaacacttgagaagtttgtaatggttttcatttgaaatagactgctgaaagttttaaatttttataagcataggtttgatgttgaaaacttgttttgagggagaaaatccctttgttttaaagtaaagtaaacattatcgctaagtgtacttgtgcagtattaacagctacattatacagtaaatgtgggataaaatccatttagaaaatgttaaactgcttttccagacatggttgtagcatattttcaattagtgtgtgtatgttaatgtgtaattgatagtagaacaaagttacatttttaaaactgctacttgtataaaccttgcctcttttcccaaatactgtgggttttgtgcatagtttttacaaaccttggatttaccagactgtcttttcactgtttgtgggttttgtagaagttacacatttttatggtagataaaatgttacttctatacaagtactcactccctttttatcaaaagttaattttaatctcacagtctacattgtgctacattatccagcttctttggaacaatgtgtgctctgtatggttttttttggtatgacaactaattaagcaactgacattgaactgagaattctacaaactataaaacattaatttttgaaggtaatttagttttgtggctgggcattcagtgaagtcttaggacttctttgcagacaactgactgggtatatataggaatgaatctggctttagggttaaatcatttaaggtccttttataggcaggcactagtaactaaaactgaaaactaagtaagtttatttttgaggaatgttgttaaaaatgtctttaggaagtcactaaaacttaattggaagaaaaaatcatgatgcttatacaataaatatgaataaatgttatataaggaaactcacctatttgaaatcatggctatattgtttttattttctagattccaaaaatacaaacactagttgttccagcattgtactttgataagtctgtacattgacgtgtatggactaaatccagggtaaaatcaatgttacaaaatttaagggtatgttaactaaaggatagcatttctaagatattttgaatattagggtcatttggcacttctcagcaagtaggatacttctcatgttttgaaattatatgaatatggaaaaaaatgagaagtatcctaagttcagagccagg

SEQ ID NO: 65506 - DNA, 2957 bp, Homo sapiens
tggctatttggttatgcggttcccttggactcccctgtgtgatagagcccccgtttgggctctcggacccccccctggaatttgttcacaggacgcctctggtgtccccccgcgcgtttttttatgggggggaatccccgcgccttgttctctggccccggttttctcctttgggcccgcgtgtggcgccgcgtcgcccgtacccatactggggcccccggcccccaccagaaggtgttaagaaaagtttttccgagggcccaaggccggcgccaaaagtgtgtttcttcttctttcttttgcctcttgttttacccggctcttttcttggcttatcttcttggatctgcccatcttctatcttctaatttataccaaaaggatgttctgtgacagaattccttttatgattggatagtgaagacactctttttactttgttttagatttgcctttaaattaaaaattatagcttactgatatctaaaatactattatagttgaatgacaagtatacattgttatgttctctaaaatagcattactgaagaggacaaaagtaagaaaaaggggcaagaggaaaaacaacctaaaaagcagcctaagaaggatgaagagggccagaaggaagaagataagccaagaaaagagccggataaaaaagaggggaagaaagaagttgaatcaaaaaggaaaaatttagctaaaacaggggttacttcaacctccgattctgaagaagaaggagatgatcaagaaggtgaaaagaagagaaaaggtgggaggaactttcagactgctcacagaaggaatatgctgaaaggccaacatgagaaagaagcagcagatcgaaaacgcaagcaagaggaacaaatggaaactgagcagcagaataaagatgaaggaaagaagccagaagttaagaaagtggagaagaagcgagaaacatcaatggattctcgacttcaaaggatacatgctgagattaaaaattcactcaaaattgataatcttgatgtgaacagatgcattgaggccttggatgaacttgcttcacttcaggtcacaatgcaacaagctcagaaacacacagagatgattactacactgaaaaaaatacggcgattcaaagttagtcaggtaatcatggaaaagtctacaatgttgtataacaagtttaagaacatgttcttggttggtgaaggagattccgtgatcacccaagtgctgaataaatctcttgctgaacaaagacagcatgaggaagcgaataaaaccaaagatcaagggaagaaagggccaaacaaaaagctagagaaggaacaaacagggtcaaagactctaaatggaggatctgatgctcaagatggtaatcagccacaacataacggggagagcaatgaagacagcaaagacaaccatgaagccagcacgaagaaaaagccatccagtgaagagagagagactgaaatatctctgaaggattctacactagataactaggttgacatacctggaatatagagaacacttgagaagtttgtaatggttttcatttgaaatagactgctgaaagttttaaatttttataagcataggtttgatgttgaaaacttgttttgagggagaaaatccctttgttttaaagtaaagtaaacattatcgctaagtgtacttgtgcagtattaacagctacattatacagtaaatgtgggataaaatccatttagaaaatgttaaactgcttttccagacatggttgtagcatattttcaattagtgtgtgtatgttaatgtgtaattgatagtagaacaaagttacatttttaaaactgctacttgtataaaccttgcctcttttcccaaatactgtgggttttgtgcatagtttttacaaaccttggatttaccagactgtcttttcactgtttgtgggttttgtagaagttacacatttttatggtagataaaatgttacttctatacaagtactcactccctttttatcaaaagttaattttaatctcacagtctacattgtgctacattatccagcttctttggaacaatgtgtgctctgtatggttttttttggtatgacaactaattaagcaactgacattgaactgagaattctacaaactataaaacattaatttttgaaggtaatttagttttgtggctgggcattcagtgaagtcttaggacttctttgcagacaactgactgggtatatataggaatgaatctggctttagggttaaatcatttaaggtccttttataggcaggcactagtaactaaaactgaaaactaagtaagtttatttttgaggaatgttgttaaaaatgtctttaggaagtcactaaaacttaattggaagaaaaaatcatgatgcttatacaataaatatgaataaatgttatataaggaaactcacctatttgaaatcatggctatattgtttttattttctagattccaaaaatacaaacactagttgttccagcattgtactttgataagtctgtacattgacgtgtatggactaaatccagggtaaaatcaatgttacaaaatttaagggtatgttaactaaaggatagcatttctaagatattttgaatattagggtcatttggcacttctcagcaagtaggatacttctcatgttttgaaattatatgaatatggaaaaaaatggcttaagaccagcgtctctgtatgacattgtgtggttgaccctctgagataactgttttcatctacagaattgcatttttgcttttaaagaggtcttataatggaactaggaatcaccgttttgagagaacctgcatatataccagtcattatctgtttggtccttatacagttttaacttacttagatttattctagttaagccataagttcaacgtgtaaacttgttttcattaaagaatttttctatcaaa

SEQ ID NO: 65507 - DNA, 3289 bp, Homo sapiens
ggcggcggcagcggcggcgcggttgcgattccgagccgttgagacgcctctgcggcagctggtggcgcaggtggcttgcgtggacgcgggtagaggcgaccggccagcaaccgcagcgtcggcgcccgcggccccggcaggcgcgtcgggacgccccgaggcatcctcccccgcccgcgggcccggtagctgggcccgcgtccgccgcccgcatccccgcgccgccgcatctcctcgccgcctcccgggcttcggacccccggtctcgcccccgaaacatgactcgcgatttcaaacctggagacctcatcttcgccaagatgaaaggttatccccattggccagctcgagtagacgaagttcctgatggagctgtaaagccacccacaaacaaactacccattttcttttttggaactcatgagactgcttttttaggaccaaaggatatatttccttactcagaaaataaggaaaagtatggcaaaccaaataaaagaaaaggttttaatgaaggtttatgggagatagataacaatccaaaagtgaaattttcaagtcaacaggcagcaactaaacaatcaaatgcatcatctgatgttgaagttgaagaaaaggaaactagcgtttcaaaggaagataccgaccatgaagaaaaagccagcaatgaggatgtgactaaagcagttgacataactactccaaaagctgccagaagggggagaaagagaaaggcagaaaaacaagtagaaactgaggaggcaggagtagtgacaacagcaacagcatctgttaatctaaaagtgagtcctaaaagaggacgacctgcagctacagaagtcaagattccaaaaccaagaggcagacccaaaatggtaaaacagccctgtccttcagagagtgacatcattactgaagaggacaaaagtaagaaaaaggggcaagaggaaaaacaacctaaaaagcagcctaagaaggatgaagagggccagaaggaagaagataagccaagaaaagagccggataaaaaagaggggaagaaagaagttgaatcaaaaaggaaaaatttagctaaaacaggggttacttcaacctccgattctgaagaagaaggagatgatcaagaaggtgaaaagaagagaaaaggtgggaggaactttcagactgctcacagaaggaatatgctgaaaggccaacatgagaaagaagcagcagatcgaaaacgcaagcaagaggaacaaatggaaactgagcagcagaataaagatgaaggaaagaagccagaagttaagaaagtggagaagaagcgagaaacatcaatggattctcgacttcaaaggatacatgctgagattaaaaattcactcaaaattgataatcttgatgtgaacagatgcattgaggccttggatgaacttgcttcacttcaggtcacaatgcaacaagctcagaaacacacagagatgattactacactgaaaaaaatacggcgattcaaagttagtcaggtaatcatggaaaagtctacaatgttgtataacaagtttaagaacatgttcttggttggtgaaggagattccgtgatcacccaagtgctgaataaatctcttgctgaacaaagacagcatgaggaagcgaataaaaccaaagatcaagggaagaaagggccaaacaaaaagctagagaaggaacaaacagggtcaaagactctaaatggaggatctgatgctcaagatggtaatcagccacaacataacggggagagcaatgaagacagcaaagacaaccatgaagccagcacgaagaaaaagccatccagtgaagagagagagactgaaatatctctgaaggattctacactagataactaggttgacatacctggaatatagagaacacttgagaagtttgtaatggttttcatttgaaatagactgctgaaagttttaaatttttataagcataggtttgatgttgaaaacttgttttgagggagaaaatccctttgttttaaagtaaagtaaacattatcgctaagtgtacttgtgcagtattaacagctacattatacagtaaatgtgggataaaatccatttagaaaatgttaaactgcttttccagacatggttgtagcatattttcaattagtgtgtgtatgttaatgtgtaattgatagtagaacaaagttacatttttaaaactgctacttgtataaaccttgcctcttttcccaaatactgtgggttttgtgcatagtttttacaaaccttggatttaccagactgtcttttcactgtttgtgggttttgtagaagttacacatttttatggtagataaaatgttacttctatacaagtactcactccctttttatcaaaagttaattttaatctcacagtctacattgtgctacattatccagcttctttggaacaatgtgtgctctgtatggttttttttggtatgacaactaattaagcaactgacattgaactgagaattctacaaactataaaacattaatttttgaagttaggacttctttgcagacaactgactgggtatatataggaatgaatctggctttagggttaaatcatttaaggtccttttataggcaggcactagtaactaaaactgaaaactaagtaagtttatttttgaggaatgttgttaaaaatgtctttaggaagtcactaaaacttaattggaagaaaaaatcatgatgcttatacaataaatatgaataaatgttatataaggaaactcacctatttgaaatcatggctatattgtttttattttctagattccaaaaatacaaacactagttgttccagcattgtactttgataagtctgtacattgacgtgtatggactaaatccagggtaaaatcaatgttacaaaatttaagggtatgttaactaaaggatagcatttctaagatattttgaatattagggtcatttggcacttctcagcaagtaggatacttctcatgttttgaaattatatgaatatggaaaaaaatggcttaagaccagcgtctctgtatgacattgtgtggttgaccctctgagataactgttttcatctacagaattgcatttttgcttttaaagaggtcttataatggaactaggaatcaccgttttgagagaacctgcatatataccagtcattatctgtttggtccttatacagttttaacttacttagatttattctagttaagccataagttcaacgtgtaaacttgttttcattaaagaatttttctatcaaa

SEQ ID NO: 65508 - DNA, 2060 bp, Homo sapiens
ttacagctgtgagccaacatgcccggccatcacaggctattttttaatacccaccctaaaataggctatggagccatagttgaagtcttggtttgttccactgtgtatctgaaggagttagatagaagcatcccttctaattctgaaattgagggaaatcttgttgtctatgtgtgtatcaacctctctttttattaagattttgaaatatgttggtatcacagatataaaacattctcatgttctttaaagagaattcacttttatgctagaaatgatggaaagggcttggtccatgacactttgctgagttattttgcttcatctgcatattactttgggaagaagatacaacatggtaaaataacagttttgaagaagaaaaaaataataatgactgttctaataacaagtcaagtttttcttttgtttggttggtttcagtcttttcatgggtttaaaaatataatgcagacttaatgtctttttttccttcatcaggagaaaatcctaattccagttgtacctttcccccttttcttcaggccatccagtgaagagagagagactgaaatatctctgaaggattctacactagataactaggttgacatacctggaatatagagaacacttgagaagtttgtaatggttttcatttgaaatagactgctgaaagttttaaatttttataagcataggtttgatgttgaaaacttgttttgagggagaaaatccctttgttttaaagtaaagtaaacattatcgctaagtgtacttgtgcagtattaacagctacattatacagtaaatgtgggataaaatccatttagaaaatgttaaactgcttttccagacatggttgtagcatattttcaattagtgtgtgtatgttaatgtgtaattgatagtagaacaaagttacatttttaaaactgctacttgtataaaccttgcctcttttcccaaatactgtgggttttgtgcatagtttttacaaaccttggatttaccagactgtcttttcactgtttgtgggttttgtagaagttacacatttttatggtagataaaatgttacttctatacaagtactcactccctttttatcaaaagttaattttaatctcacagtctacattgtgctacattatccagcttctttggaacaatgtgtgctctgtatggttttttttggtatgacaactaattaagcaactgacattgaactgagaattctacaaactataaaacattaatttttgaaggtaatttagttttgtggctgggcattcagtgaagtcttaggacttctttgcagacaactgactgggtatatataggaatgaatctggctttagggttaaatcatttaaggtccttttataggcaggcactagtaactaaaactgaaaactaagtaagtttatttttgaggaatgttgttaaaaatgtctttaggaagtcactaaaacttaattggaagaaaaaatcatgatgcttatacaataaatatgaataaatgttatataaggaaactcacctatttgaaatcatggctatattgtttttattttctagattccaaaaatacaaacactagttgttccagcattgtactttgataagtctgtacattgacgtgtatggactaaatccagggtaaaatcaatgttacaaaatttaagggtatgttaactaaaggatagcatttctaagatattttgaatattagggtcatttggcacttctcagcaagtaggatacttctcatgttttgaaattatatgaatatggaaaaaaatggcttaagaccagcgtctctgtatgacattgtgtggttgaccctctgagataactgttttcatctacagaattgcatttttgcttttaaagaggtcttataatggaactaggaatcaccgttttgagagaacctgcatatataccagtcattatctgtttggtccttatacagttttaacttacttagatttattctagttaagccataagttcaacgtgtaaacttgttttcattaaagaatttttctatcaaa

SEQ ID NO: 65509 - DNA, 2415 bp, Homo sapiens
ggcggcggcagcggcggcgcggttgcgattccgagccgttgagacgcctctgcggcagctggtggcgcaggtggcttgcgtggacgcgggtagaggcgaccggccagcaaccgcagcgtcggcgcccgcggccccggcaggcgcgtcgggacgccccgaggcatcctcccccgcccgcgggcccggtagctgggcccgcgtccgccgcccgcatccccgcgccgccgcatctcctcgccgcctcccgggcttcggacccccggtctcgcccccgaaacatgactcgcgatttcaaacctggagacctcatcttcgccaagatgaaaggttatccccattggccagctcgagtagacgaagttcctgatggagctgtaaagccacccacaaacaaactacccattttcttttttggaactcatgagactgcttttttaggaccaaaggatatatttccttactcagaaaataaggaaaagtatggcaaaccaaataaaagaaaaggttttaatgaaggtttatgggagatagataacaatccaaaagtgaaattttcaagtcaacaggcagcaactaaacaatcaaatgcatcatctgatgttgaagttgaagaaaaggaaactagcgtttcaaaggaagataccgaccatgaagaaaaagccagcaatgaggatgtgactaaagcagttgacataactactccaaaagctgccagaagggggagaaagagaaaggcagaaaaacaagtagaaactgaggaggcaggagtagtgacaacagcaacagcatctgttaatctaaaagtgagtcctaaaagaggacgacctgcagctacagaagtcaagattccaaaaccaagaggcagacccaaaatggtaaaacagccctgtccttcagagagtgacatcattactgaagaggacaaaagtaagaaaaaggggcaagaggaaaaacaacctaaaaagcagcctaagaaggatgaagagggccagaaggaagaagataagccaagaaaagagccggataaaaaagaggggaagaaagaagttgaatcaaaaaggaaaaatttagctaaaacaggggttacttcaacctccgattctgaagaagaaggagatgatcaagaaggtgaaaagaagagaaaaggtgggaggaactttcagactgctcacagaaggaatatgctgaaaggccaacatgagaaagaagcagcagatcgaaaacgcaagcaagaggaacaaatggaaactgagcagcagaataaagatgaaggaaagaagccagaagttaagaaagtggagaagaagcgagaaacatcaatggattctcgacttcaaaggatacatgctgagattaaaaattcactcaaaattgataatcttgatgtgaacagatgcattgaggccttggatgaacttgcttcacttcaggtcacaatgcaacaagctcagaaacacacagagatgattactacactgaaaaaaatacggcgattcaaagttagtcaggtaatcatggaaaagtctacaatgttgtataacaagtttaagaacatgttcttggttggtgaaggagattccgtgatcacccaagtgctgaataaatctcttgctgaacaaagacagcatgaggaagcgaataaaaccaaagatcaagggaagaaagggccaaacaaaaagctagagaaggaacaaacagggtcaaagactctaaatggaggatctgatgctcaagatggtaatcagccacaacataacggggagagcaatgaagacagcaaagacaaccatgaagccagcacgaagaaaaagccatccagtgaagagagagagactgaaatatctctgaaggattctacactagataactaggttgacatacctggaatatagagaacacttgagaagtttgtaatggttttcatttgaaatagactgctgaaagttttaaatttttataagcataggtttgatgttgaaaacttgttttgagggagaaaatccctttgttttaaagtaaagtaaacattatcgctaagtgtacttgtgcagtattaacagctacattatacagtaaatgtgggataaaatccatttagaaaatgttaaactgcttttccagacatggttgtagcatattttcaattagtgtgtgtatgttaatgtgtaattgatagtagaacaaagttacatttttaaaactgctacttgtataaaccttgcctcttttcccaaatactgtgggttttgtgcatagtttttacaaaccttggatttaccagactgtcttttcactgtttgtgggttttgtagaagttacacatttatggggagaaaaaggtcattatacacaggctcactctcttttattgagtaatttaactcccaggtactggcgtcacttacttcttttgac

SEQ ID NO: 65510 - DNA, 3623 bp, Homo sapiens
ggcggcggcagcggcggcgcggttgcgattccgagccgttgagacgcctctgcggcagctggtggcgcaggtggcttgcgtggacgcgggtagaggcgaccggccagcaaccgcagcgtcggcgcccgcggccccggcaggcgcgtcgggacgccccgaggcatcctcccccgcccgcgggcccggtagctgggcccgcgtccgccgcccgcatccccgcgccgccgcatctcctcgccgcctcccgggcttcggacccccggtctcgcccccgaaacatgactcgcgatttcaaacctggagacctcatcttcgccaagatgaaaggttatccccattggccagctcgagtagacgaagttcctgatggagctgtaaagccacccacaaacaaactacccattttcttttttggaactcatgagactgcttttttaggaccaaaggatatatttccttactcagaaaataaggaaaagtatggcaaaccaaataaaagaaaaggttttaatgaaggtttatgggagatagataacaatccaaaagtgaaattttcaagtcaacaggcagcaactaaacaatcaaatgcatcatctgatgttgaagttgaagaaaaggaaactagcgtttcaaaggaagataccgaccatgaagaaaaagccagcaatgaggatgtgactaaagcagttgacataactactccaaaagctgccagaagggggagaaagagaaaggcagaaaaacaagtagaaactgaggaggcaggagtagtgacaacagcaacagcatctgttaatctaaaagtgagtcctaaaagaggacgacctgcagctacagaagtcaagattccaaaaccaagaggcagacccaaaatggtaaaacagccctgtccttcagagagtgacatcattactgaagaggacaaaagtaagaaaaaggggcaagaggaaaaacaacctaaaaagcagcctaagaaggatgaagagggccagaaggaagaagataagccaagaaaagagccggataaaaaagaggggaagaaagaagttgaatcaaaaaggaaaaatttagctaaaacaggggttacttcaacctccgattctgaagaagaaggagatgatcaagaaggtgaaaagaagagaaaaggtgggaggaactttcagactgctcacagaaggaatatgctgaaaggccaacatgagaaagaagcagcagatcgaaaacgcaagcaagaggaacaaatggaaactgagcagcagaataaagatgaaggaaagaagccagaagttaagaaagtggagaagaagcgagaaacatcaatggattctcgacttcaaaggatacatgctgagattaaaaattcactcaaaattgataatcttgatgtgaacagatgcattgaggccttggatgaacttgcttcacttcaggtcacaatgcaacaagctcagaaacacacagagatgattactacactgaaaaaaatacggcgattcaaagttagtcaggtaatcatggaaaagtctacaatgttgtataacaagtttaagaacatgttcttggttggtgaaggagattccgtgatcacccaagtgctgaataaatctcttgctgaacaaagacagcatgaggaagcgaataaaaccaaagatcaagggaagaaagggccaaacaaaaagctagagaaggaacaaacagggtcaaagactctaaatggaggatctgatgctcaagatggtaatcagccacaacataacggggagagcaatgaagacagcaaagacaaccatgaagccagcacgaagaaaaagccatccagtgaagagagagagactgaaatatctctgaaggattctacactagataactaggttgacatacctggttacagatgttaggtcaagatgaggtctgcatctaatcctgtataagagcagagatttttcatagggtgctgtgagggctttgctaactctattttgtccgattggccagaaaaaggatgctctaatggaaatagcaaacctgtatcattaaactctttagaaacaaagaaactggtttaataggcagaaatgtgtttatgtttgtgtcgtgtaattctgcaacacaatgttagagatgactgacctttctcctagtaaaactagaatgtctaattgtccttaaatggtactgatgcctgaagaatgtttaaagaaatagctattgcttctctagtaacttctgtgcatgtgtatccactattatataaaagtcaaattcaactaccaagcaggttgacatgttcatgacaacattttcagttgcctatcttcattagctaatgtgttacatgtaatttgacaggcgtgttacatttgattgaaataagcataaagaaaagctgcctcgaaaaaagagaaaagctgtcttaaatcaggggttttatagctccagaaatatacaaagttaggaatttcttttgacttgaacttggtgggatacctgtataactgatacataacacacgggcaaactgtgggagtaacctggttgattaacttttctcctcagtttcaccagggaacaataataggtacctgagtctttgatgaaaaacttaaccttaagaactagcaaaataacattctcaaataattaataaagaatcccagtagcagaaatgttttaactggcatgtttcttctttgtccgctaaaatgtattgacaccacacatggaataatgcattatgacaataattaactttttgaagtttggtgttttgagagtatgaaatgaatgaataagataaaatatccttgcatatgcatgtaagacctataaggaacgcagtattgaaaataaaggaatcaaaatttttacccatggaattttagggttgggtaaatcattcatttatcttaaatctatggtttgctggcagttatcaatctgctcaattttagcattgttgtatacaagaaagtaaaaatttaggtataacataagccagcctcttaagttctctatagtgattatctgtgtactgactgaatcagtgaatgagaacactagacataccagaaactcgtgcttgtcatctccaagccaatggacttaactgtttgtggcatttaagtccataaaacatacttcactgtcaaacacataggcttataggtttcgtcagttttccatgtgtaagataaatgtctgttcttagccatccagatattcagtcaaatttaaatacaaccttggagagagaaagtggaatttatttattttaaatgatgcatttgaaatctatagtattcctaaaagtcttctaaacagtattaaatgttctacccataaaggttcccagaaaatatttgagtaaatctatctgatggtctagacctgaaaataaagaaagtttattttgctgggcgctgtggttcatgcctgtaatcgcagcactctgggaggccaaggcggatggatcacttgaggtcaggagttcgagactattctgcgcaacatagtgaaaccctgtatctacaagaaataaaaaaattagcccgccatggtggcctgtgccccatgtttctcagctactcggtaggctgaggtgggaggatcacctgagcctaggg

SEQ ID NO: 65511 - DNA, 3614 bp, Homo sapiens
ggcggcggcagcggcggcgcggttgcgattccgagccgttgagacgcctctgcggcagctggtggcgcaggtggcttgcgtggacgcgggtagaggcgaccggccagcaaccgcagcgtcggcgcccgcggccccggcaggcgcgtcgggacgccccgaggcatcctcccccgcccgcgggcccggtagctgggcccgcgtccgccgcccgcatccccgcgccgccgcatctcctcgccgcctcccgggcttcggacccccggtctcgcccccgaaacatgactcgcgatttcaaacctggagacctcatcttcgccaagatgaaaggttatccccattggccagctcgagtagacgaagttcctgatggagctgtaaagccacccacaaacaaactacccattttcttttttggaactcatgagactgcttttttaggaccaaaggatatatttccttactcagaaaataaggaaaagtatggcaaaccaaataaaagaaaaggttttaatgaaggtttatgggagatagataacaatccaaaagtgaaattttcaagtcaacaggcagcaactaaacaatcaaatgcatcatctgatgttgaagttgaagaaaaggaaactagcgtttcaaaggaagataccgaccatgaagaaaaagccagcaatgaggatgtgactaaagcagttgacataactactccaaaagctgccagaagggggagaaagagaaaggcagaaaaacaagtagaaactgaggaggcaggagtagtgacaacagcaacagcatctgttaatctaaaagtgagtcctaaaagaggacgacctgcagctacagaagtcaagattccaaaaccaagaggcagacccaaaatggtaaaacagccctgtccttcagagagtgacatcattactgaagaggacaaaagtaagaaaaaggggcaagaggaaaaacaacctaaaaagcagcctaagaaggatgaagagggccagaaggaagaagataagccaagaaaagagccggataaaaaagaggggaagaaagaagttgaatcaaaaaggaaaaatttagctaaaacaggggttacttcaacctccgattctgaagaagaaggagatgatcaagaaggtgaaaagaagagaaaaggtgggaggaactttcagactgctcacagaaggaatatgctgaaaggccaacatgagaaagaagcagcagatcgaaaacgcaagcaagaggaacaaatggaaactgagcagcagaataaagatgaaggaaagaagccagaagttaagaaagtggagaagaagcgagaaacatcaatggattctcgacttcaaaggatacatgctgagattaaaaattcactcaaaattgataatcttgatgtgaacagatgcattgaggccttggatgaacttgcttcacttcaggtcacaatgcaacaagctcagaaacacacagagatgattactacactgaaaaaaatacggcgattcaaagttagtcaggtaatcatggaaaagtctacaatgttgtataacaagtttaagaacatgttcttggttggtgaaggagattccgtgatcacccaagtgctgaataaatctcttgctgaacaaagacagcatgaggaagcgaataaaaccaaagatcaagggaagaaagggccaaacaaaaagctagagaaggaacaaacagggtcaaagactctaaatggaggatctgatgctcaagatggtaatcagccacaacataacggggagagcaatgaagacagcaaagacaaccatgaagccagcacgaagaaaaagccatccagtgaagagagagagactgaaatatctctgaaggattctacactagataactaggttgacatacctggttacagatgttaggtcaagatgaggtctgcatctaatcctgtataagagcagagatttttcatagggtgctgtgagggctttgctaactctattttgtccgattggccagaaaaaggatgctctaatggaaatagcaaacctgtatcattaaactctttagaaacaaagaaactggtttaataggcagaaatgtgtttatgtttgtgtcgtgtaattctgcaacacaatgttagagatgactgacctttctcctagtaaaactagaatgtctaattgtccttaaatggtactgatgcctgaagaatgtttaaagaaatagctattgcttctctagtaacttctgtgcatgtgtatccactattatataaaagtcaaattcaactaccaagcaggttgacatgttcatgacaacattttcagttgcctatcttcattagctaatgtgttacatgtaatttgacaggcgtgttacatttgattgaaataagcataaagaaaagctgcctcgaaaaaagagaaaagctgtcttaaatcaggggttttatagctccagaaatatacaaagttaggaatttcttttgacttgaacttggtgggatacctgtataactgatacataacacacgggcaaactgtgggagtaacctggttgattaacttttctcctcagtttcaccagggaacaataataggtacctgagtctttgatgaaaaacttaaccttaagaactagcaaaataacattctcaaataattaataaagaatcccagtagcagaaatgttttaactggcatgtttcttctttgtccgctaaaatgtattgacaccacacatggaataatgcattatgacaataattaactttttgaagtttggtgttttgagagtatgaaatgaatgaataagataaaatatccttgcatatgcatgtaagacctataaggaacgcagtattgaaaataaaggaatcaaaatttttacccatggaattttagggttgggtaaatcattcatttatcttaaatctatggtttgctggcagttatcaatctgctcaattttagcattgttgtatacaagaaagtaaaaatttaggtataacataagccagcctcttaagttctctatagtgattatctgtgtactgactgaatcagtgaatgagaacactagacataccagaaactcgtgcttgtcatctccaagccaatggacttaactgtttgtggcatttaagtccataaaacatacttcactgtcaaacacataggcttataggtttcgtcagttttccatgtgtaagataaatgtctgttcttagccatccagatattcagtcaaatttaaatacaaccttggagagagaaagtggaatttatttattttaaatgatgcatttgaaatctatagtattcctaaaagtcttctaaacagtattaaatgttctacccataaaggttcccagaaaatatttgagtaaatctatctgatggtagaaccgactattctctagttttagctaagatacacctggaacactgacaagtcatcacttacatagaataatgtgaagtaaattttttgaaaaataaattttagtggaacaatcctgaaggataacaccagaagaatagcaggttaccagtaaggtgtcagccaatttgttccagtcacttttgaatccatgttctataatctaaaattacctctctgcctaagctgagagc

SEQ ID NO: 65512 - DNA, 2358 bp, Homo sapiens
ttacagctgtgagccaacatgcccggccatcacaggctattttttaatacccaccctaaaataggctatggagccatagttgaagtcttggtttgttccactgtgtatctgaaggagttagatagaagcatcccttctaattctgaaattgagggaaatcttgttgtctatgtgtgtatcaacctctctttttattaagattttgaaatatgttggtatcacagatataaaacattctcatgttctttaaagagaattcacttttatgctagaaatgatggaaagggcttggtccatgacactttgctgagttattttgcttcatctgcatattactttgggaagaagatacaacatggtaaaataacagttttgaagaagaaaaaaataataatgactgttctaataacaagtcaagtttttcttttgtttggttggtttcagtcttttcatgggtttaaaaatataatgcagacttaatgtctttttttccttcatcaggagaaaatcctaattccagttgtacctttcccccttttcttcaggccatccagtgaagagagagagactgaaatatctctgaaggattctacactagataactaggttgacatacctggttacagatgttaggtcaagatgaggtctgcatctaatcctgtataagagcagagatttttcatagggtgctgtgagggctttgctaactctattttgtccgattggccagaaaaaggatgctctaatggaaatagcaaacctgtatcattaaactctttagaaacaaagaaactggtttaataggcagaaatgtgtttatgtttgtgtcgtgtaattctgcaacacaatgttagagatgactgacctttctcctagtaaaactagaatgtctaattgtccttaaatggtactgatgcctgaagaatgtttaaagaaatagctattgcttctctagtaacttctgtgcatgtgtatccactattatataaaagtcaaattcaactaccaagcaggttgacatgttcatgacaacattttcagttgcctatcttcattagctaatgtgttacatgtaatttgacaggcgtgttacatttgattgaaataagcataaagaaaagctgcctcgaaaaaagagaaaagctgtcttaaatcaggggttttatagctccagaaatatacaaagttaggaatttcttttgacttgaacttggtgggatacctgtataactgatacataacacacgggcaaactgtgggagtaacctggttgattaacttttctcctcagtttcaccagggaacaataataggtacctgagtctttgatgaaaaacttaaccttaagaactagcaaaataacattctcaaataattaataaagaatcccagtagcagaaatgttttaactggcatgtttcttctttgtccgctaaaatgtattgacaccacacatggaataatgcattatgacaataattaactttttgaagtttggtgttttgagagtatgaaatgaatgaataagataaaatatccttgcatatgcatgtaagacctataaggaacgcagtattgaaaataaaggaatcaaaatttttacccatggaattttagggttgggtaaatcattcatttatcttaaatctatggtttgctggcagttatcaatctgctcaattttagcattgttgtatacaagaaagtaaaaatttaggtataacataagccagcctcttaagttctctatagtgattatctgtgtactgactgaatcagtgaatgagaacactagacataccagaaactcgtgcttgtcatctccaagccaatggacttaactgtttgtggcatttaagtccataaaacatacttcactgtcaaacacataggcttataggtttcgtcagttttccatgtgtaagataaatgtctgttcttagccatccagatattcagtcaaatttaaatacaaccttggagagagaaagtggaatttatttattttaaatgatgcatttgaaatctatagtattcctaaaagtcttctaaacagtattaaatgttctacccataaaggttcccagaaaatatttgagtaaatctatctgatggtctagacctgaaaataaagaaagtttattttgctgggcgctgtggttcatgcctgtaatcgcagcactctgggaggccaaggcggatggatcacttgaggtcaggagttcgagactattctgcgcaacatagtgaaaccctgtatctacaagaaataaaaaaattagcccgccatggtggcctgtgccccatgtttctcagctactcggtaggctgaggtgggaggatcacctgagcctaggg

SEQ ID NO: 65513 - DNA, 699 bp, Homo sapiens
tgagctatcaccctatagaagaactaatgttagtataagtaactaaaactgaaaactaagtaagtttatttttgaggaatgttgttaaaaatgtctttaggaagtcactaaaacttaattggaagaaaaaatcatgatgcttatacaataaatatgaataaatgttatataaggaaactcacctatttgaaatcatggctatattgtttttattttctagattccaaaaatacaaacactagttgttccagcattgtactttgataagtctgtacattgacgtgtatggactaaatccagggtaaaatcaatgttacaaaatttaagggtatgttaactaaaggatagcatttctaagatattttgaatattagggtcatttggcacttctcagcaagtaggatacttctcatgttttgaaattatatgaatatggaaaaaaatggcttaagaccagcgtctctgtatgacattgtgtggttgaccctctgagataactgttttcatctacagaattgcatttttgcttttaaagaggtcttataatggaactaggaatcaccgttttgagagaacctgcatatataccagtcattatctgtttggtccttatacagttttaacttacttagatttattctagttaagccataagttcaacgtgtaaacttgttttcattaaagaatttttctatcaaa

SEQ ID NO: 65514 - DNA, 1893 bp, Homo sapiens
atctgaatctgagaactgactgggatttggtatgtgaacaactggagagaaccatacactttataattaatattatatccagtgatttcaaataatatgatagattttgctgatacagtactgctgtctgtgttcctactcatacacttacctggttacagatgttaggtcaagatgaggtctgcatctaatcctgtataagagcagagatttttcatagggtgctgtgagggctttgctaactctattttgtccgattggccagaaaaaggatgctctaatggaaatagcaaacctgtatcattaaactctttagaaacaaagaaactggtttaataggcagaaatgtgtttatgtttgtgtcgtgtaattctgcaacacaatgttagagatgactgacctttctcctagtaaaactagaatgtctaattgtccttaaatggtactgatgcctgaagaatgtttaaagaaatagctattgcttctctagtaacttctgtgcatgtgtatccactattatataaaagtcaaattcaactaccaagcaggttgacatgttcatgacaacattttcagttgcctatcttcattagctaatgtgttacatgtaatttgacaggcgtgttacatttgattgaaataagcataaagaaaagctgcctcgaaaaaagagaaaagctgtcttaaatcaggggttttatagctccagaaatatacaaagttaggaatttcttttgacttgaacttggtgggatacctgtataactgatacataacacacgggcaaactgtgggagtaacctggttgattaacttttctcctcagtttcaccagggaacaataataggtacctgagtctttgatgaaaaacttaaccttaagaactagcaaaataacattctcaaataattaataaagaatcccagtagcagaaatgttttaactggcatgtttcttctttgtccgctaaaatgtattgacaccacacatggaataatgcattatgacaataattaactttttgaagtttggtgttttgagagtatgaaatgaatgaataagataaaatatccttgcatatgcatgtaagacctataaggaacgcagtattgaaaataaaggaatcaaaatttttacccatggaattttagggttgggtaaatcattcatttatcttaaatctatggtttgctggcagttatcaatctgctcaattttagcattgttgtatacaagaaagtaaaaatttaggtataacataagccagcctcttaagttctctatagtgattatctgtgtactgactgaatcagtgaatgagaacactagacataccagaaactcgtgcttgtcatctccaagccaatggacttaactgtttgtggcatttaagtccataaaacatacttcactgtcaaacacataggcttataggtttcgtcagttttccatgtgtaagataaatgtctgttcttagccatccagatattcagtcaaatttaaatacaaccttggagagagaaagtggaatttatttattttaaatgatgcatttgaaatctatagtattcctaaaagtcttctaaacagtattaaatgttctacccataaaggttcccagaaaatatttgagtaaatctatctgatggtctagacctgaaaataaagaaagtttattttgctgggcgctgtggttcatgcctgtaatcgcagcactctgggaggccaaggcggatggatcacttgaggtcaggagttcgagactattctgcgcaacatagtgaaaccctgtatctacaagaaataaaaaaattagcccgccatggtggcctgtgccccatgtttctcagctactcggtaggctgaggtgggaggatcacctgagcctaggg

SEQ ID NO: 65515 - DNA, 2279 bp, Homo sapiens
ggcggcggcagcggcggcgcggttgcgattccgagccgttgagacgcctctgcggcagctggtggcgcaggtggcttgcgtggacgcgggtagaggcgaccggccagcaaccgcagcgtcggcgcccgcggccccggcaggcgcgtcgggacgccccgaggcatcctcccccgcccgcgggcccggtagctgggcccgcgtccgccgcccgcatccccgcgccgccgcatctcctcgccgcctcccgggcttcggacccccggtctcgcccccgaaacatgactcgcgatttcaaacctggagacctcatcttcgccaagatgaaaggttatccccattggccagctcgagtagacgaagttcctgatggagctgtaaagccacccacaaacaaactacccattttcttttttggaactcatgagactgcttttttaggaccaaaggatatatttccttactcagaaaataaggaaaagtatggcaaaccaaataaaagaaaaggttttaatgaaggtttatgggagatagataacaatccaaaagtgaaattttcaagtcaacaggcagcaactaaacaatcaaatgcatcatctgatgttgaagttgaagaaaaggaaactagcgtttcaaaggaagataccgaccatgaagaaaaagccagcaatgaggatgtgactaaagcagttgacataactactccaaaagctgccagaagggggagaaagagaaaggcagaaaaacaagtagaaactgaggaggcaggagtagtgacaacagcaacagcatctgttaatctaaaagtgagtcctaaaagaggacgacctgcagctacagaagtcaagattccaaaaccaagaggcagacccaaaatggtaaaacagccctgtccttcagagagtgacatcattactgaagaggacaaaagtaagaaaaaggggcaagaggaaaaacaacctaaaaagcagcctaagaaggatgaagagggccagaaggaagaagataagccaagaaaagagccggataaaaaagaggggaagaaagaagttgaatcaaaaaggaaaaatttagctaaaacaggggttacttcaacctccgattctgaagaagaaggagatgatcaagaaggtgaaaagaagagaaaaggtgggaggaactttcagactgctcacagaaggaatatgctgaaaggccaacatgagaaagaagcagcagatcgaaaacgcaagcaagaggaacaaatggaaactgagcagcagaataaagatgaaggaaagaagccagaagttaagaaagtggagaagaagcgagaaacatcaatggattctcgacttcaaaggatacatgctgagattaaaaattcactcaaaattgataatcttgatgtgaacagatgcattgaggccttggatgaacttgcttcacttcaggtcacaatgcaacaagctcagaaacacacagagatgattactacactgaaaaaaatacggcgattcaaagttagtcaggtaatcatggaaaagtctacaatgttgtataacaagtttaagaacatgttcttggttggtgaaggagattccgtgatcacccaagtgctgaataaatctcttgctgaacaaagacagcatgaggaagcgaataaaaccaaagatcaagggaagaaagggccaaacaaaaagctagagaaggaacaaacagggtcaaagactctaaatggaggatctgatgctcaagatggtaatcagccacaacataacggggagagcaatgaagacagcaaagacaaccatgaagccagcacgaagaaaaagtgaggaataggttttaatgggtcttgtgtgttttttattattcaggtttttaatcacagttctgttccaaggttatcttactataataagcagttatcttttgatcacccaattcctgaattcagtaagcaagttacaattcaaaaaggaagaagagtaaaaaccttttattgacagtgactttgccactgaattcaagggaatggaactagctgggaacccagttaaaaagaaaatatttgctcctggactacttttactgagatactgttagtaatgacttgcattcacactttcttgaattgtgaaaggataattgtaaaaagttagatggagaatcacagttttgttgttgttgttttttctttgagacagagtttcactcttgttgctcaggctggagtgcagtggcacgatcgtgctcactgcaacctccacttcctgggttcaagcgattctcctgcctca

SEQ ID NO: 65516 - DNA, 437 bp, Homo sapiens
  misc_feature (6)..(6): n is a, c, g, or t
gtattntttgggaatctagaaaataaaaacactagttgtaacattgattttaccctggatttaagggtatgttaactaaaggatagcatttctaagatattttgaatattagggtcatttggcacttctcagcaagtaggatacttctcatgttttgaaattatatgaatatggaaaaaaatggcttaagaccagcgtctctgtatgacattgtgtggttgaccctctgagataactgttttcatctacagaattgcatttttgcttttaaagaggtcttataatggaactaggaatcaccgttttgagagaacctgcatatataccagtcattatctgtttggtccttatacagttttaacttacttagatttattctagttaagccataagttcaacgtgtaaacttgttttcattaaagaatttttctatcaaa

SEQ ID NO: 65517 - DNA, 372 bp, Homo sapiens
ggaaacgatctttagaaacagattgtttaagtgttaagataattaacagctatgaaattactgttttgtcatgaaggatgtgaacagatgcattgaggccttggatgaacttgcttcacttcaggtcacaatgcaacaagctcagaaacacacagagatgattactacactgaaaaaagtaagtgatttcaagtcatgtggattctttgaattttgtcattacttcatttaaaaattgtttaaaaaatcaattaggaaaacaattatgatgaatgtatattgttttctcagatacggcgattcaaagttagtcaggtaatcatggaaaagtctacaatgttgtataacaagtttaagaacatgttcttggtt

SEQ ID NO: 65518 - DNA, 241 bp, Homo sapiens
ggaaatgcatttttctcactttataatgttgagacacaatgtttttaatttcagaactctacagagcaaaacagatttccccaatgctttcagttaaacgtgcttgtaacttttagtttaacaaggtttctttcattcctggaataatttattcagtattcagttttcttttttcttttttaggatgtgactaaagcagttgacataactactccaaaagctgccagaagggggagaaaga

SEQ ID NO: 65519 - DNA, 3325 bp, Homo sapiens
ggcggcggcagcggcggcgcggttgcgattccgagccgttgagacgcctctgcggcagctggtggcgcaggtggcttgcgtggacgcgggtagaggcgaccggccagcaaccgcagcgtcggcgcccgcggccccggcaggcgcgtcgggacgccccgaggcatcctcccccgcccgcgggcccggtagctgggcccgcgtccgccgcccgcatccccgcgccgccgcatctcctcgccgcctcccgggcttcggacccccggtctcgcccccgaaacatgactcgcgatttcaaacctggagacctcatcttcgccaagatgaaaggttatccccattggccagctcgagtagacgaagttcctgatggagctgtaaagccacccacaaacaaactacccattttcttttttggaactcatgagactgcttttttaggaccaaaggatatatttccttactcagaaaataaggaaaagtatggcaaaccaaataaaagaaaaggttttaatgaaggtttatgggagatagataacaatccaaaagtgaaattttcaagtcaacaggcagcaactaaacaatcaaatgcatcatctgatgttgaagttgaagaaaaggaaactagcgtttcaaaggaagataccgaccatgaagaaaaagccagcaatgaggatgtgactaaagcagttgacataactactccaaaagctgccagaagggggagaaagagaaaggcagaaaaacaagtagaaactgaggaggcaggagtagtgacaacagcaacagcatctgttaatctaaaagtgagtcctaaaagaggacgacctgcagctacagaagtcaagattccaaaaccaagaggcagacccaaaatggtaaaacagccctgtccttcagagagtgacatcattactgaagaggacaaaagtaagaaaaaggggcaagaggaaaaacaacctaaaaagcagcctaagaaggatgaagagggccagaaggaagaagataagccaagaaaagagccggataaaaaagaggggaagaaagaagttgaatcaaaaaggaaaaatttagctaaaacaggggttacttcaacctccgattctgaagaagaaggagatgatcaagaaggtgaaaagaagagaaaaggtgggaggaactttcagactgctcacagaaggaatatgctgaaaggccaacatgagaaagaagcagcagatcgaaaacgcaagcaagaggaacaaatggaaactgagcagcagaataaagatgaaggaaagaagccagaagttaagaaagtggagaagaagcgagaaacatcaatggattctcgacttcaaaggatacatgctgagattaaaaattcactcaaaattgataatcttgatgtgaacagatgcattgaggccttggatgaacttgcttcacttcaggtcacaatgcaacaagctcagaaacacacagagatgattactacactgaaaaaaatacggcgattcaaagttagtcaggtaatcatggaaaagtctacaatgttgtataacaagtttaagaacatgttcttggttggtgaaggagattccgtgatcacccaagtgctgaataaatctcttgctgaacaaagacagcatgaggaagcgaataaaaccaaagatcaagggaagaaagggccaaacaaaaagctagagaaggaacaaacagggtcaaagactctaaatggaggatctgatgctcaagatggtaatcagccacaacataacggggagagcaatgaagacagcaaagacaaccatgaagccagcacgaagaaaaagccatccagtgaagagagagagactgaaatatctctgaaggattctacactagataactaggttgacatacctggaatatagagaacacttgagaagtttgtaatggttttcatttgaaatagactgctgaaagttttaaatttttataagcataggtttgatgttgaaaacttgttttgagggagaaaatccctttgttttaaagtaaagtaaacattatcgctaagtgtacttgtgcagtattaacagctacattatacagtaaatgtgggataaaatccatttagaaaatgttaaactgcttttccagacatggttgtagcatattttcaattagtgtgtgtatgttaatgtgtaattgatagtagaacaaagttacatttttaaaactgctacttgtataaaccttgcctcttttcccaaatactgtgggttttgtgcatagtttttacaaaccttggatttaccagactgtcttttcactgtttgtgggttttgtagaagttacacatttttatggtagataaaatgttacttctatacaagtactcactccctttttatcaaaagttaattttaatctcacagtctacattgtgctacattatccagcttctttggaacaatgtgtgctctgtatggttttttttggtatgacaactaattaagcaactgacattgaactgagaattctacaaactataaaacattaatttttgaaggtaatttagttttgtggctgggcattcagtgaagtcttaggacttctttgcagacaactgactgggtatatataggaatgaatctggctttagggttaaatcatttaaggtccttttataggcaggcactagtaactaaaactgaaaactaagtaagtttatttttgaggaatgttgttaaaaatgtctttaggaagtcactaaaacttaattggaagaaaaaatcatgatgcttatacaataaatatgaataaatgttatataaggaaactcacctatttgaaatcatggctatattgtttttattttctagattccaaaaatacaaacactagttgttccagcattgtactttgataagtctgtacattgacgtgtatggactaaatccagggtaaaatcaatgttacaaaatttaagggtatgttaactaaaggatagcatttctaagatattttgaatattagggtcatttggcacttctcagcaagtaggatacttctcatgttttgaaattatatgaatatggaaaaaaatggcttaagaccagcgtctctgtatgacattgtgtggttgaccctctgagataactgttttcatctacagaattgcatttttgcttttaaagaggtcttataatggaactaggaatcaccgttttgagagaacctgcatatataccagtcattatctgtttggtccttatacagttttaacttacttagatttattctagttaagccataagttcaacgtgtaaacttgttttcattaaagaatttttctatcaaa

SEQ ID NO: 65520 - DNA, 3423 bp, Homo sapiens
ggcggcggcagcggcggcgcggttgcgattccgagccgttgagacgcctctgcggcagctggtggcgcaggtggcttgcgtggacgcgggtagaggcgaccggccagcaaccgcagcgtcggcgcccgcggccccggcaggcgcgtcgggacgccccgaggcatcctcccccgcccgcgggcccggtagctgggcccgcgtccgccgcccgcatccccgcgccgccgcatctcctcgccgcctcccgggcttcggacccccggtctcgcccccgaaacatgactcgcgatttcaaacctggagacctcatcttcgccaagatgaaaggttatccccattggccagctcgagtagacgaagttcctgatggagctgtaaagccacccacaaacaaactacccattttcttttttggaactcatgagactgcttttttaggaccaaaggatatatttccttactcagaaaataaggaaaagtatggcaaaccaaataaaagaaaaggttttaatgaaggtttatgggagatagataacaatccaaaagtgaaattttcaagtcaacaggcagcaactaaacaatcaaatgcatcatctgatgttgaagttgaagaaaaggaaactagcgtttcaaaggaagataccgaccatgaagaaaaagccagcaatgaggatgtgactaaagcagttgacataactactccaaaagctgccagaagggggagaaagagaaaggcagaaaaacaagtagaaactgaggaggcaggagtagtgacaacagcaacagcatctgttaatctaaaagtgagtcctaaaagaggacgacctgcagctacagaagtcaagattccaaaaccaagaggcagacccaaaatggtaaaacagccctgtccttcagagagtgacatcattactgaagaggacaaaagtaagaaaaaggggcaagaggaaaaacaacctaaaaagcagcctaagaaggatgaagagggccagaaggaagaagataagccaagaaaagagccggataaaaaagaggggaagaaagaagttgaatcaaaaaggaaaaatttagctaaaacaggggttacttcaacctccgattctgaagaagaaggagatgatcaagaaggtgaaaagaagagaaaaggtgggaggaactttcagactgctcacagaaggaatatgctgaaaggccaacatgagaaagaagcagcagatcgaaaacgcaagcaagaggaacaaatggaaactgagcagcagaataaagatgaaggaaagaagccagaagttaagaaagtggagaagaagcgagaaacatcaatggattctcgacttcaaaggatacatgctgagattaaaaattcactcaaaattgataatcttgatgtgaacagatgcattgaggccttggatgaacttgcttcacttcaggtcacaatgcaacaagctcagaaacacacagagatgattactacactgaaaaaaatacggcgattcaaagttagtcaggtaatcatggaaaagtctacaatgttgtataacaagtttaagaacatgttcttggttggtgaaggagattccgtgatcacccaagtgctgaataaatctcttgctgaacaaagacagcatgaggaagcgaataaaaccaaagatcaagggaagaaagggccaaacaaaaagctagagaaggaacaaacagggtcaaagactctaaatggaggatctgatgctcaagatggtaatcagccacaacataacggggagagcaatgaagacagcaaagacaaccatgaagccagcacgaagaaaaagccatccagtgaagagagagagactgaaatatctctgaaggattctacactagataactaggttgacatacctggttacagatgttaggtcaagatgaggtctgcatctaatcctgtataagagcagagatttttcatagggtgctgtgagggctttgctaactctattttgtccgattggccagaaaaaggatgctctaatggaaatagcaaacctgtatcattaaactctttagaaacaaagaaactggtttaataggcagaaatgtgtttatgtttgtgtcgtgtaattctgcaacacaatgttagagatgactgacctttctcctagtaaaactagaatgtctaattgtccttaaatggtactgatgcctgaagaatgtttaaagaaatagctattgcttctctagtaacttctgtgcatgtgtatccactattatataaaagtcaaattcaactaccaagcaggttgacatgttcatgacaacattttcagttgcctatcttcattagctaatgtgttacatgtaatttgacaggcgtgttacatttgattgaaataagcataaagaaaagctgcctcgaaaaaagagaaaagctgtcttaaatcaggggttttatagctccagaaatatacaaagttaggaatttcttttgacttgaacttggtgggatacctgtataactgatacataacacacgggcaaactgtgggagtaacctggttgattaacttttctcctcagtttcaccagggaacaataataggtacctgagtctttgatgaaaaacttaaccttaagaactagcaaaataacattctcaaataattaataaagaatcccagtagcagaaatgttttaactggcatgtttcttctttgtccgctaaaatgtattgacaccacacatggaataatgcattatgacaataattaactttttgaagtttggtgttttgagagtatgaaatgaatgaataagataaaatatccttgcatatgcatgtaagacctataaggaacgcagtattgaaaataaaggaatcaaaatttttacccatggaattttagggttgggtaaatcattcatttatcttaaatctatggtttgctggcagttatcaatctgctcaattttagcattgttgtatacaagaaagtaaaaatttaggtataacataagccagcctcttaagttctctatagtgattatctgtgtactgactgaatcagtgaatgagaacactagacataccagaaactcgtgcttgtcatctccaagccaatggacttaactgtttgtggcatttaagtccataaaacatacttcactgtcaaacacataggcttataggtttcgtcagttttccatgtgtaagataaatgtctgttcttagccatccagatattcagtcaaatttaaatacaaccttggagagagaaagtggaatttatttattttaaatgatgcatttgaaatctatagtattcctaaaagtcttctaaacagtattaaatgttctacccataaaggttcccagaaaatatttgagtaaatctatctgatggtagaaccgactagtcggttctaccatagcgacagcaggcaggg

SEQ ID NO: 65521 - DNA, 1867 bp, Homo sapiens
  misc_feature (1835)..(1835): n is a, c, g, or t
  misc_feature (1842)..(1842): n is a, c, g, or t
ggcggcggcagcggcggcgcggttgcgattccgagccgttgagacgcctctgcggcagctggtggcgcaggtggcttgcgtggacgcgggtagaggcgaccggccagcaaccgcagcgtcggcgcccgcggccccggcaggcgcgtcgggacgccccgaggcatcctcccccgcccgcgggcccggtagctgggcccgcgtccgccgcccgcatccccgcgccgccgcatctcctcgccgcctcccgggcttcggacccccggtctcgcccccgaaacatgactcgcgatttcaaacctggagacctcatcttcgccaagatgaaaggttatccccattggccagctcgagtagacgaagttcctgatggagctgtaaagccacccacaaacaaactacccattttcttttttggaactcatgagactgcttttttaggaccaaaggatatatttccttactcagaaaataaggaaaagtatggcaaaccaaataaaagaaaaggttttaatgaaggtttatgggagatagataacaatccaaaagtgaaattttcaagtcaacaggcagcaactaaacaatcaaatgcatcatctgatgttgaagttgaagaaaaggaaactagcgtttcaaaggaagataccgaccatgaagaaaaagccagcaatgaggatgtgactaaagcagttgacataactactccaaaagctgccagaagggggagaaagagaaaggcagaaaaacaagtagaaactgaggaggcaggagtagtgacaacagcaacagcatctgttaatctaaaagtgagtcctaaaagaggacgacctgcagctacagaagtcaagattccaaaaccaagaggcagacccaaaatggtaaaacagccctgtccttcagagagtgacatcattactgaagaggacaaaagtaagaaaaaggggcaagaggaaaaacaacctaaaaagcagcctaagaaggatgaagagggccagaaggaagaagataagccaagaaaagagccggataaaaaagaggggaagaaagaagttgaatcaaaaaggaaaaatttagctaaaacaggggttacttcaacctccgattctgaagaagaaggagatgatcaagaaggtgaaaagaagagaaaaggtgggaggaactttcagactgctcacagaaggaatatgctgaaaggccaacatgagaaagaagcagcagatcgaaaacgcaagcaagaggaacaaatggaaactgagcagcagaataaagatgaaggaaagaagccagaagttaagaaagtggagaagaagcgagaaacatcaatggattctcgacttcaaaggatacatgctgagattaaaaattcactcaaaattgataatcttgatgtgaacagatgcattgaggccttggatgaacttgcttcacttcaggtcacaatgcaacaagctcagaaacacacagagatgattactacactgaaaaaaatacggcgattcaaagttagtcaggtaatcatggaaaagtctacaatgttgtataacaagtttaagaacatgttcttggttggtgaaggagattccgtgatcacccaagtgctgaataaatctcttgctgaacaaagacagcatgaggaagcgaataaaaccaaagatcaagggaagaaagggccaaacaaaaagctagagaaggaacaaacagggtcaaagactctaaatggaggatctgatgctcaagatggtaatcagccacaacataacggggagagcaatgaagacagcaaagacaaccatgaagccagcacgaagaaaaacaccagtgaagagaagagctgaatncctgagntcacacagtacagtgcatctgatat

SEQ ID NO: 65522 - DNA, 1016 bp, Homo sapiens
  misc_feature (426)..(426): n is a, c, g, or t
  misc_feature (1013)..(1013): n is a, c, g, or t
tcttataaatacagtgacgctccagcctctggaagcctctgtcagctcagcctccaaaggagccagcctctccccagttcctgaaatcctgagtgttgcctgccagtcgccatgagaacttcctaccttctgctgtttactctctgcttacttttgtctgagatggcctcaggtggtaactttctcacaggccttggccacagatctgatcattacaattgcgtcagcagtggagggcaatgtctctattctgcctgcccgatctttaccaaaattcaaggcacctgttacagagggaaggccaagtgctgcaagtgagctgggagtgaccagaagaaatgacgcagaagtgaaatgaactttttataagcattcttttaataaaggaaaattgcttttgaagtataaaaaaaaaaaaaaaaaaanaaaaaaaaaaaaaaaaaaaaaaaaaaaaaaaaaaaaaaagaaaaaagaagagagggggcggcgcgcccacaaaagaatcctccccgcagggggcgcgccaaagaataagcgaggcacccacagtttttgtgagcaacacaagggcggcgccactaaaagaggagggcgtattaaataaacaggaagcgcagcgggggcgggtataaaccaagtgttagtggtggtgggggagaaatgtgcgtgtttgtgtgtgtggagacatacttgtgtgggagaagagaaagacacaataatcattacggagggggggggcaacaaaaatgtggtgggggaaaaataatactcctgacgaggagaaattataataaggccgctctcgagaggagaatatttacacaacactttacacacggtggattaagagggtgttgtgtaacaccacagccggcggagtaatatgctgtgtgacgtgacggcgagtaaaaaaaatgttgtgaggcccaacgaaggaaatgtaatagatttttggacgacacaaaatatatattcaaccccgagcgaagtgtgtgtgaaagcatataaacggngtg

SEQ ID NO: 65523 - DNA, 404 bp, Homo sapiens
ttcagacacctcatttcatgagtagccccaaagatcaatcatgggccaatttcttggaagagaagactctccggtgttttgcagttatttgttctgctttcgcgagatgttctcaaatcgttgcagctacaagccatgagtctgaagtgtttgtgttccctccttacaggtggtaactttctcacaggccttggccacagatctgatcattacaattgcgtcagcagtggagggcaatgtctctattctgcctgcccgatctttaccaaaattcaaggcacctgttacagagggaaggccaagtgctgcaagtgagctgggagtgaccagaagaaatgacgcagaagtgaaatgaactttttataagcattcttttaataaaggaaaattgcttttgaagtata

SEQ ID NO: 65524 - DNA, 445 bp, Homo sapiens
gctagacacagggtgctgattggtgtgtttacaaaccttgagctagatacagagtgacaatttgtgtatttacaatcccttagctagacataaaggttctcaaagtccccaccagactcaggagcccagctggcttcagcaagtgggtcccacatgggggccgcaggtgagctgcctgccagtcccgtgccctgtgctggcactcctcaggtggtaactttctcacaggccttggccacagatctgatcattacaattgcgtcagcagtggagggcaatgtctctattctgcctgcccgatctttaccaaaattcaaggcacctgttacagagggaaggccaagtgctgcaagtgagctgggagtgaccagaagaaatgacgcagaagtgaaatgaactttttataagcattcttttaataaaggaaaattgcttttgaagtata

SEQ ID NO: 65525 - DNA, 407 bp, Homo sapiens
tcttataaatacagtgacgctccagcctctggaagcctctgtcagctcagcctccaaaggagccagcctctccccagttcctgaaatcctgagtgttgcctgccagtcgccatgagaacttcctaccttctgctgtttactctctgcttacttttgtctgagatggcctcaggtggtaactttctcacaggccttggccacagatctgatcattacaattgcgtcagcagtggagggcaatgtctctattctgcctgcccgatctttaccaaaattcaaggcacctgttacagagggaaggccaagtgctgcaagtgagctgggagtgaccagaagaaatgacgcagaagtgaaatgaactttttataagcattcttttaataaaggaaaattgcttttgaagtata

SEQ ID NO: 65526 - DNA, 383 bp, Homo sapiens
gtaggaataggctaggcatggtgtttcagacctgtaatttcagcatttcgggagactgagttaggaggattgcttgtgtaacatttagtacttaaccttacgtaattatgaatgcaagttttttgtcctgggtgcaagattatatttatttgagcgtatcaagtgaacaagtttacatttaaaggcgagagttataggtcagccctggcaacatagtgagaccctatatctacaaaaattttaaaaaattagctgggcgtggtggctcatgactatagtcccaaatactcaggaggctgaggcaggaggatcacctgagcccagaagttcgaaggttgctatgaatgtgccggtgcactctagcctgggcagtagagggagat

SEQ ID NO: 65527 - DNA, 408 bp, Homo sapiens
caagttggtattcaacaattcaattcaattctgacactaactaccctcagtcagtgtggaccccatagcttaagggctcagttccacaacactggccccaactacaaatgccggtcacaagtcccagacctcctattcttctgatggactgtttataaatcaaggttcttgcgacccattcctcaggtcaaccaagaactctggaacacacttcactgacatttactggtctattagaaaggatttgataaggggcacaaatgaagctgttggagaggcacatagtgggggcctgaacacagaagcttctgtccccacggggttgggggcaccaccctcatggcacagagatgtggtcatcaaccagggagctcttggaacctcaccacggagaaggttttatggagg

SEQ ID NO: 65528 - DNA, 370 bp, Homo sapiens
ttgagcccccatagggactagcactgggtctttaaattcgagctactaagtactttttaaatctatgccctcctgtccaaaaacaatactacaatttaaacctccattatcttctgcctgaactatcctaatggaagcagaattgatttcattctttctaatccagaatgacctttcaaaatacaaacctgaacatgtcatttctcaagtacaggacagactctaatctcttggcttagaaattgttttgatccagctttcactacctacacagctaccacctccagtctctgatccttcctaatgcatcccatattcccaccttacccaattgtccatcacttcccaaccataccatgctcctgtatct

SEQ ID NO: 65529 - DNA, 500 bp, Homo sapiens
ccagttggagagtagcagcactggggaaaaaaaatacctaacgtgacaaagtgctgtaaattagcctcagagaaatacaatggacagatgcaaagaaatctatctcatgtgatttgagttatgccactgagcagaagacatgaaaatccttatttcttggcaatgtttacctgtaagtttttacctactcctggcgtatttacagtttagggtgaaaagaatttgaaaagcaaaaattgcaaggaaacattacaatccaagtaattgcagcactagactaatagatcagtgtctgaggaggcgatcagataggcagaagaacagctctctaaatcctcccttcggacacagtggagttcctcgctgtcttttgaaggcttcataccaatccctccttcctcggcagcaggggctacttctctccctctctcccaaaggcgaagtgagtccactcagagcacctctttccactctcagtcatggccaatttagggccctta

SEQ ID NO: 65530 - DNA, 245 bp, Homo sapiens
caagaaatgaagaaggtgagctgggggatgcagctgggactcagaagactgcacgtgatagactcatgagctgaagatctcgtgcttagtctggagaagctcatcaagtctagctcactttggaataagttggtgctggagaatgaattcatgctaaccaaattcaccaagagcctgatttacaaatgagagagccaaggccttaagtttagagcaaaagacaaacttccaatgactttagtttt

SEQ ID NO: 65531 - DNA, 488 bp, Homo sapiens
gggcaggggctgttacaagaggcttatagtctagtggcagagacaaaaaccacactcaaatcattagtgtacggtatgcactgctcagggactcaaatatgtgacaggaggctccaaacaagagcggagacaaggcgtaaatagccccctgtggactggatgttctgactcctggatggcctccagaaggatgccttttacggtctgtgaaagagctcagggaccaagatgctcaaagcccttcatgcccaagagcccctcctcaggctgggacacgggaagcagagctcggaggtggaactcgtgactgtgtatgggcacatgtgagtgcgtgtgtgtggacagccaggcttagtgtagacaacgtgtgaggctcagaccccaagtgctgactacacctatgcacatccccacctgcgtgtgaaagaagatgctagaaaagaacaaaaataacttaaaaaataaatccaataagatggctggaacat

SEQ ID NO: 65532 - DNA, 344 bp, Homo sapiens
atagtctatatgttgtgtatagtaagggttacattacattatttttaagaatccaaagaactgtatacctaaaaagagtgaattttgccatatgtacattatacctcaaaaagcatgaatgtttaaaaagtgtgatcaagagagtcgctgaagatacatgagaacataacagatagtgataaaaattctactggatttgtcaaaagttttaaaaattattttctaataatttcagaagtcaaatatgcatactgaataatatataatctagtaattttctagcactatcaagtaagactacctaaaattttgagtttgggttaagcttagcaatatttgcctta

SEQ ID NO: 65533 - DNA, 330 bp, Homo sapiens
cccaggaggcagaggttgcagtgagccgagaccacaccattgcgctccagcctgggcaacaaaagtgaaactccgtctcaaaaaataaaataaaattacagtgctgtatactcttttctctttagagaagtagaggtgtattattggccttctgttgcactggtaatagtggattacttacttatttgattgcttgtttctacctgcatacatggaattcaattttaagtgtagggcgaggtttgttgcctaaacaataagtaagtagcaatagaaatttatgagatgtttgtggggaataaacaattgcatgtattcctatttagtaaa

SEQ ID NO: 65534 - DNA, 889 bp, Homo sapiens
aggagacccttttctccttgaggatagggataggtaaggtaaacttgtaaaaaggatgtcacagaagtcactttttaattaagtcatgattgagatactgaactcttccatctcattcttctttcccattttcctattatgtttgataattatatgtatttttaaaaactgtgagaggaaaaattagtcataacccttttgggttatccacttaaatttaggtattttcatattactcaggtaaagatggaaatgacagagcacagacatttattttttaaattgatagggtagaaaatgaaatgtacttctgtttattcttaatactatatatatatatacacacatagttttagcaaattggaaataatatattcatttgtatggcaagataaatgcagtcatcttaatactagtctatacatttttgccaaatggcgcaaatatacctccatttatattttgtatcttaaaatgtagtttaaaaataggaccatgtatgagacacttttttacaaaaagtgccgtatatacatatgtaacaggtgagtgtgtgtttaacataatttataattatttctgtcagtacagcgtatatggaaaattcaagttgtttttaacatattcaagtatgttcagtataaaataagttaatcccatttcataatgtaaatcatatttttgttatttgccatattttatttgaagtgataaaattttataactcaaatttgaatgtcatagtacattgtgtgctaaccatggcaagcaaacatttacatttgttttttacaataaatttcttttaaaatatactttctatttttctgtactgacatatgcaataaattggtacattaaaaatttgattaatgtcttcaaatagttt

SEQ ID NO: 65535 - DNA, 855 bp, Homo sapiens
tgtatttgagactgtttccttagatgggtaagaggtggaaaacaaacttagtatcaggggtccatgaagcccatggcatcatttttgaaaatatttctagttttgtagccaaagcaattggttttagtaaaatgagacttcttcaggagtcactcctttactgtggacccattgcttagtgggaatggaagtatatgtatctatcttgtgtattaacttctgacttatttatacaagagcagctataggagtttacaaaagaactttaagttattaagttactataaatttggggatcctagagtgatcttaaatatggcaagatacagctcatttagaataaaatctcacatccattattttaaagggaatgattggggggaaaaactggtgaaaaagaaatataaaaaggaccctaaaaagaattctgcaaaataagagaagaaataatttgtgacaggtaatagaatactagtaggatagaaacaactagaaaggaaagtgtgacacagtttttaaatttagatgtagaaaataatgaattaatgagattggtgaaaggaaatcatgcaaaacatttgaatgcaaagcatttctaacaaaaagtgactggagcacttgccattgcaacaaccctgtttttgcaattaggtttttgactgttaaaatggatattttcataaacacttgatatttacatagattacagctttggtaatatgtcactggagtaattacgctgtaatacctgttgagaattcataccatctgatgcttatatattaatttcttatgtttgtaagtttggctttgtgggaataggtgtggagaaattaaagagtgaaggccatattt

SEQ ID NO: 65536 - DNA, 668 bp, Homo sapiens
aaggaaatcatgcaaaacatttgaatgcaaagcatttctaacaaaaagtgactggagcacttgccattgcaacaaccctgtttttgcaattaggtttttgactgttaaaatggatattttcataaaaatggtgttctgaattttgctacagggctgcttaaatttatgattacctgtagacacttgatatttacatagattacagctttggtaatatgtcactggagtaattacgctgtaatacctgttgagaattcataccatctgatgcttatatattaatttcttatgtttgtaagtttggctttgtgggaataggtgtggagaaattaaagagtgaaggccatatttcattttttataaattatctttcaagctcagatagcttaagagcagtttatattaaggagacccttttctccttgaggatagggataggtaaggtaaacttgtaaaaaggatgtcacagaagtcactttttaattaagtcatgattgagatactgaactcttccatctcattcttctttcccattttcctattatgtttgataattatatgtatttttaaaaactgtgagaggaaaaattagtcataacccttttgggttatccacttaaatttaggtattttcatattactcaggtaaagatggaaatgacagagca

SEQ ID NO: 65537 - DNA, 887 bp, Homo sapiens
  misc_feature (880)..(883): n is a, c, g, or t
  misc_feature (885)..(887): n is a, c, g, or t
ggagggatcaaccatttcttgtgtggttgagagaaccagaggagctctggattatgtgcatgttttttacaccatttcacagattgaaactgatggcattaattaccttgttgatgactttgctaatgccagtggaactattacattccttccttggcagagatcagagcttttgattgaagtgtcgcttcccattattatttacaactgtaactgatacattagaatttgcttcaaacatgtctgctgtaaaacctttatcaggttctgaatatatatgttcttgatgatgatattcctgaacttaatgagtatttccgtgtgacattggtttctgcaattcctggagatgggaagctaggctcaactcctaccagtggtgcaagcatagatcctgaaaaggaaacgactgatatcaccatcaaagctagtgatcatccatatggcttgctgcagttctccacagggctgcctcctcagcctaaggacgcaatgaccctgcctgcaagcagcgttccacatatcactgtggaggaggaagatggagaaatcaggttattggtcatccgtgcacagggacttctgggaagggtgactgcggaatttagaacagtgtccttgacagcattcagtcctgaggattaccagaatgttgctggcacattagaatttcaaccaggagaaagatataaatacattttcataaacatcactgataattctattcctgaactggaaaaatcttttaaagttgagttgttaaacttggaaggaggagctctgctagatctatctacagatataacgctgtaaaatctggtccttttggatgatctataatgagttgattattaataaaagaagtcaacaataccttaannnnannn

SEQ ID NO: 65538 - DNA, 323 bp, Homo sapiens
aaggacatccaaaagggagagcttgcactgaagcagggaggcataagaaatcctgatgagtcaaggaaatggggttttaggatgaatggacttctgagtgtgagatagagaaaggctagagactggtgtgttggatccagattgcagtggccttccgtgtagcctaagaagttttgaacactgcattcaattatttttttatcatttatactctgccttgtttcagaaaggttttaagggccagaagtttgaactaatgtttttttcaataatagggagctaatggaggtttcttaattggaaaacacttggtcagctaattg

SEQ ID NO: 65539 - DNA, 348 bp, Homo sapiens
gccaaagaaagagagacaggagtgtccccctaccctacattgaaaaaaacaaactcaaacaaaaacagaaggaaaaattagattatttgccagatgggttttatccttaaatagaaaaatattgtccagaaatacttaggtgtatttaatatgctcttgccttgttactgctgtagggagaaaaaaggtcatggctcctgctgtgcaggtcagaccatggacctcttattttgctgctcagccatgaacaagtagtatagagtaagcatcctgggtgagacaactgtctaccaagaaaaccctgccagagtgttctggattagaaacaccacaacctctcataatact

SEQ ID NO: 65540 - DNA, 409 bp, Homo sapiens
tccttacccattgccctggccacttcccttcaatgcaacagactcagatgtccagagctgtggagagttctttctaaaggtagaataactgctttgtccaactccccaatccctctcctctgagcagatgactttcagatacctgagagataagttgtagtttggcttcagaatgttgataaaggagaggagcgttctcttcaagagcaaacaccctgaggtttgggcaaaacctcggggtattgggcaatgagagtgatcaaatgatacaatttcattatctttgcccgtctgcatggatctattggctttgggaggccaagaagaagagtttcaaaagaatagttttaaaaaaatcatcaaacagccaattcacagctgtgtcctggatggtagaccaggtggtaaa

SEQ ID NO: 65541 - DNA, 425 bp, Homo sapiens
aaaagaaccttcgccgagaaggctgctaatgaattcagactgcatagttctcaaaatctgatgttttgcaatgatgacattagcgtggcggccgagggtccgagcccagaaagtctgcgcagtgctcggcgctttgagcgccgggacaatgggcgcagtgttcggcctcggcctctccaggccatttgcataccccgttctgcctgagtgaccggcggactgcggcagggagcagcattgtccacgggtcacttcaagatgagcgagatgacaagagccagaaacaccattttgaaaagttgcaactgaggccccttggccggcaaatctgagctgcagaagcgcctgaattccggacgttaaacctccaatcaccagccagggcagctccggctgggacagcgcgggcgcgcggcccctccacc

SEQ ID NO: 65542 - DNA, 3070 bp, Homo sapiens
tggtctctcgctgcagccggcgctccacgtctagtcttcactgctctgcgtcctgtgctgataaaggctcgccgctgtgaccctgttacctgcaagaacttggaggttcacagctaagacgccaggaccccctggaagcctagaaatgggaccactgacatttagggatgtgaaaatagaattctctctagaggaatggcaatgcctggacactgcgcagcggaatttatatagagatgtgatgttagagaactacagaaacctggtcttccttgttatgtgttctcattttgcccaagatgtttggccagagcacagcataaaagattctttccaaaaagtgatactgagaacatatggaaaatatggacatgagaatttacagctaagaaaagaccataaaagtgtggatgcatgtaaggtgtacaaaggaggttataatggacttaaccagtgtttgacaactactgacagcaagatatttcagtgtgataaatatgtgaaagtctttcataaatttccaaatgtaaatagaaataagataagacatactggaaagaaacctttcaaatgtaaaaaccgtggcaaatcattttgcatgctttcacaattaactcaacataagaaaattcatactagagagtattcttacaaatgtgaagaatgtggtaaagcctttaactggtcctcaacccttactaaacataagataattcatactggagaaaaaccctacaaatgtgaagaatgtggcaaagcttttaaccggtcctcaaatcttactaaacataaaataattcatactggagagaaaccctacaaatgtgaagaatgtggcaaagcttttaaccggtcctcaacccttactaaacataaaagaattcatacagaagagaaaccctacaaatgtgaagaatgtggcaaggcctttaaccagttctcgattcttaataaacataagagaattcatatggaagataaaccctacaaatgtgaagaatgtggcaaagcctttagagtattctcaattcttaaaaaacataagataatccatactggggaaaaaccatacaaatgtgaagaatgtggcaaagcctttaaccagttctcaaaccttactaaacataagataattcatactggagagaaaccctacaaatgtgatgaatgtggcaaagcctttaaccagtcctcaacccttactaaacataaaagaattcatacgggagaaaaaccctacaaatgtgaagaatgtggcaaagcttttaaacagtcctcaacccttactgaacataagataattcatactggagagaaaccctacaaatgtgaaaaatgtggcaaggcctttagctggtcctcagcttttactaaacataagagaaatcatatggaagataaaccctacaaatgtgaagaatgtggcaaagcctttagtgtattctcaacccttactaaacataaaataattcatactagagaaaaaccctacaaatgtgaagaatgtggcaaagcctttaaccagtcctcaatttttactaaacataagataattcacactgaagggaaatcctacaaatgtgaaaaatgtggcaatgcttttaaccagtcctcaaaccttactgcacgtaagataatttatactggagagaaaccctacaaatatgaagaatgtgacaaagcctttaacaagttctcaacccttattacacatcagataatttatactggagagaaaccctgcaaacatgaatgtggcagagcctttaacaaatcctcaaattatactaaagagaaactacaaacctgaaagatgtgacaatgattttcactacacctcaaacttttctaaacataaaccatattggtgccctagaaatgtgaggaatatgacaaggactttaaatggttgtcacgcttgattgtaggtaagataatttatattggagaaaaatcctccaagtatgaagaatgtggcaaacttttaaccaatcctcacaccttattgcacaggaaagcatttatacttgagaaaaattgtataaagaatatggaaaagccatttatatctgctcacatgtaaaaacatcagttcatacttaataaaatgcaattaccgtcaaatctttcagaaaatataagcctttaatacgaggaagagtattcttaagatgaacattacaaatagaaagagggttgtagtacctttagttttatgatagatcttattgtacacattttgtaccagaggaaaaccctaaagcattagttgctcaaactttgttcgacatcagggaatttgtattggagaaaaaccctgcaaatgtaataaatatggaaaaacattttttcaaaaactacagcttggaaaacatcagagagttcatactaaaatatatttttgcagatgcagtaaatatgaaaaatatttaatcccaaattaagtctatgtaaatatcagaattcacagtagaaatcataaggcataaggcactgatacttcagacattacactaaattagagtgttgagtataggagatccaaaactaaaattgttaggtaagttatttatatataactttaaaagaagtagaagattttttggagatttataattacattcaaagtatacttttttcttgaaaaaaattacagattttttgaaaagcaattgatgtaatttaactctcaaattcatgtttttcttcattcctattatattcacatgtgaaagcaagtgatctgttgttgctgaatcagagatatgagagattcttttttataggtgggcattatttatgcccctttctgtggaagagtaagaaaattaaaatacaagatgcatgaggaaaatgtagagatgctctttgtgattaacttagaatattaagtgctacttgaggtacatgttcagactaacattcttttgcagtatagtgagaaaaaaacattttaaaattaattatcattttgttgattgtgcttttatgtaataaaatgcagtactttaaaacatttagattgtgtgtgaacttaattttgtaattaaacatttttttaagcatgcta

SEQ ID NO: 65543 - DNA, 3166 bp, Homo sapiens
tggtctctcgctgcagccggcgctccacgtctagtcttcactgctctgcgtcctgtgctgataaaggctcgccgctgtgaccctgttacctgcaagaacttggaggttcacagctaagacgccaggaccccctggaagcctagaaatgggaccactgacatttagggatgtgaaaatagaattctctctagaggaatggcaatgcctggacactgcgcagcggaatttatatagagatgtgatgttagagaactacagaaacctggtcttccttggtattgctgtctctaagccagacctgatcacctggctggagcaaggaaaagagccctggaatctgaagagacatgagatggtagacaaaaccccagttatgtgttctcattttgcccaagatgtttggccagagcacagcataaaagattctttccaaaaagtgatactgagaacatatggaaaatatggacatgagaatttacagctaagaaaagaccataaaagtgtggatgcatgtaaggtgtacaaaggaggttataatggacttaaccagtgtttgacaactactgacagcaagatatttcagtgtgataaatatgtgaaagtctttcataaatttccaaatgtaaatagaaataagataagacatactggaaagaaacctttcaaatgtaaaaaccgtggcaaatcattttgcatgctttcacaattaactcaacataagaaaattcatactagagagtattcttacaaatgtgaagaatgtggtaaagcctttaactggtcctcaacccttactaaacataagataattcatactggagaaaaaccctacaaatgtgaagaatgtggcaaagcttttaaccggtcctcaaatcttactaaacataaaataattcatactggagagaaaccctacaaatgtgaagaatgtggcaaagcttttaaccggtcctcaacccttactaaacataaaagaattcatacagaagagaaaccctacaaatgtgaagaatgtggcaaggcctttaaccagttctcgattcttaataaacataagagaattcatatggaagataaaccctacaaatgtgaagaatgtggcaaagcctttagagtattctcaattcttaaaaaacataagataatccatactggggaaaaaccatacaaatgtgaagaatgtggcaaagcctttaaccagttctcaaaccttactaaacataagataattcatactggagagaaaccctacaaatgtgatgaatgtggcaaagcctttaaccagtcctcaacccttactaaacataaaagaattcatacgggagaaaaaccctacaaatgtgaagaatgtggcaaagcttttaaacagtcctcaacccttactgaacataagataattcatactggagagaaaccctacaaatgtgaaaaatgtggcaaggcctttagctggtcctcagcttttactaaacataagagaaatcatatggaagataaaccctacaaatgtgaagaatgtggcaaagcctttagtgtattctcaacccttactaaacataaaataattcatactagagaaaaaccctacaaatgtgaagaatgtggcaaagcctttaaccagtcctcaatttttactaaacataagataattcacactgaagggaaatcctacaaatgtgaaaaatgtggcaatgcttttaaccagtcctcaaaccttactgcacgtaagataatttatactggagagaaaccctacaaatatgaagaatgtgacaaagcctttaacaagttctcaacccttattacacatcagataatttatactggagagaaaccctgcaaacatgaatgtggcagagcctttaacaaatcctcaaattatactaaagagaaactacaaacctgaaagatgtgacaatgattttcactacacctcaaacttttctaaacataaaccatattggtgccctagaaatgtgaggaatatgacaaggactttaaatggttgtcacgcttgattgtaggtaagataatttatattggagaaaaatcctccaagtatgaagaatgtggcaaacttttaaccaatcctcacaccttattgcacaggaaagcatttatacttgagaaaaattgtataaagaatatggaaaagccatttatatctgctcacatgtaaaaacatcagttcatacttaataaaatgcaattaccgtcaaatctttcagaaaatataagcctttaatacgaggaagagtattcttaagatgaacattacaaatagaaagagggttgtagtacctttagttttatgatagatcttattgtacacattttgtaccagaggaaaaccctaaagcattagttgctcaaactttgttcgacatcagggaatttgtattggagaaaaaccctgcaaatgtaataaatatggaaaaacattttttcaaaaactacagcttggaaaacatcagagagttcatactaaaatatatttttgcagatgcagtaaatatgaaaaatatttaatcccaaattaagtctatgtaaatatcagaattcacagtagaaatcataaggcataaggcactgatacttcagacattacactaaattagagtgttgagtataggagatccaaaactaaaattgttaggtaagttatttatatataactttaaaagaagtagaagattttttggagatttataattacattcaaagtatacttttttcttgaaaaaaattacagattttttgaaaagcaattgatgtaatttaactctcaaattcatgtttttcttcattcctattatattcacatgtgaaagcaagtgatctgttgttgctgaatcagagatatgagagattcttttttataggtgggcattatttatgcccctttctgtggaagagtaagaaaattaaaatacaagatgcatgaggaaaatgtagagatgctctttgtgattaacttagaatattaagtgctacttgaggtacatgttcagactaacattcttttgcagtatagtgagaaaaaaacattttaaaattaattatcattttgttgattgtgcttttatgtaataaaatgcagtactttaaaacatttagattgtgtgtgaacttaattttgtaattaaacatttttttaagcatgcta

SEQ ID NO: 65544 - DNA, 3039 bp, Homo sapiens
tggtctctcgctgcagccggcgctccacgtctagtcttcactgctctgcgtcctgtgctgataaaggctcgccgctgtgaccctgttacctgcaagaacttggaggttcacagctaagacgccaggaccccctggaagcctagaaatggtattgctgtctctaagccagacctgatcacctggctggagcaaggaaaagagccctggaatctgaagagacatgagatggtagacaaaaccccagttatgtgttctcattttgcccaagatgtttggccagagcacagcataaaagattctttccaaaaagtgatactgagaacatatggaaaatatggacatgagaatttacagctaagaaaagaccataaaagtgtggatgcatgtaaggtgtacaaaggaggttataatggacttaaccagtgtttgacaactactgacagcaagatatttcagtgtgataaatatgtgaaagtctttcataaatttccaaatgtaaatagaaataagataagacatactggaaagaaacctttcaaatgtaaaaaccgtggcaaatcattttgcatgctttcacaattaactcaacataagaaaattcatactagagagtattcttacaaatgtgaagaatgtggtaaagcctttaactggtcctcaacccttactaaacataagataattcatactggagaaaaaccctacaaatgtgaagaatgtggcaaagcttttaaccggtcctcaaatcttactaaacataaaataattcatactggagagaaaccctacaaatgtgaagaatgtggcaaagcttttaaccggtcctcaacccttactaaacataaaagaattcatacagaagagaaaccctacaaatgtgaagaatgtggcaaggcctttaaccagttctcgattcttaataaacataagagaattcatatggaagataaaccctacaaatgtgaagaatgtggcaaagcctttagagtattctcaattcttaaaaaacataagataatccatactggggaaaaaccatacaaatgtgaagaatgtggcaaagcctttaaccagttctcaaaccttactaaacataagataattcatactggagagaaaccctacaaatgtgatgaatgtggcaaagcctttaaccagtcctcaacccttactaaacataaaagaattcatacgggagaaaaaccctacaaatgtgaagaatgtggcaaagcttttaaacagtcctcaacccttactgaacataagataattcatactggagagaaaccctacaaatgtgaaaaatgtggcaaggcctttagctggtcctcagcttttactaaacataagagaaatcatatggaagataaaccctacaaatgtgaagaatgtggcaaagcctttagtgtattctcaacccttactaaacataaaataattcatactagagaaaaaccctacaaatgtgaagaatgtggcaaagcctttaaccagtcctcaatttttactaaacataagataattcacactgaagggaaatcctacaaatgtgaaaaatgtggcaatgcttttaaccagtcctcaaaccttactgcacgtaagataatttatactggagagaaaccctacaaatatgaagaatgtgacaaagcctttaacaagttctcaacccttattacacatcagataatttatactggagagaaaccctgcaaacatgaatgtggcagagcctttaacaaatcctcaaattatactaaagagaaactacaaacctgaaagatgtgacaatgattttcactacacctcaaacttttctaaacataaaccatattggtgccctagaaatgtgaggaatatgacaaggactttaaatggttgtcacgcttgattgtaggtaagataatttatattggagaaaaatcctccaagtatgaagaatgtggcaaacttttaaccaatcctcacaccttattgcacaggaaagcatttatacttgagaaaaattgtataaagaatatggaaaagccatttatatctgctcacatgtaaaaacatcagttcatacttaataaaatgcaattaccgtcaaatctttcagaaaatataagcctttaatacgaggaagagtattcttaagatgaacattacaaatagaaagagggttgtagtacctttagttttatgatagatcttattgtacacattttgtaccagaggaaaaccctaaagcattagttgctcaaactttgttcgacatcagggaatttgtattggagaaaaaccctgcaaatgtaataaatatggaaaaacattttttcaaaaactacagcttggaaaacatcagagagttcatactaaaatatatttttgcagatgcagtaaatatgaaaaatatttaatcccaaattaagtctatgtaaatatcagaattcacagtagaaatcataaggcataaggcactgatacttcagacattacactaaattagagtgttgagtataggagatccaaaactaaaattgttaggtaagttatttatatataactttaaaagaagtagaagattttttggagatttataattacattcaaagtatacttttttcttgaaaaaaattacagattttttgaaaagcaattgatgtaatttaactctcaaattcatgtttttcttcattcctattatattcacatgtgaaagcaagtgatctgttgttgctgaatcagagatatgagagattcttttttataggtgggcattatttatgcccctttctgtggaagagtaagaaaattaaaatacaagatgcatgaggaaaatgtagagatgctctttgtgattaacttagaatattaagtgctacttgaggtacatgttcagactaacattcttttgcagtatagtgagaaaaaaacattttaaaattaattatcattttgttgattgtgcttttatgtaataaaatgcagtactttaaaacatttagattgtgtgtgaacttaattttgtaattaaacatttttttaagcatgcta

SEQ ID NO: 65545 - DNA, 1628 bp, Homo sapiens
tggtctctcgctgcagccggcgctccacgtctagtcttcactgctctgcgtcctgtgctgataaaggctcgccgctgtgaccctgttacctgcaagaacttggaggttcacagctaagacgccaggaccccctggaagcctagaaatgggaccactgacatttagggatgtgaaaatagaattctctctagaggaatggcaatgcctggacactgcgcagcggaatttatatagagatgtgatgttagagaactacagaaacctggtcttccttgttatgtgttctcattttgcccaagatgtttggccagagcacagcataaaagattctttccaaaaagtgatactgagaacatatggaaaatatggacatgagaatttacagctaagaaaagaccataaaagtgtggatgcatgtaaggtgtacaaaggaggttataatggacttaaccagtgtttgacaactactgacagcaagatatttcagtgtgataaatatgtgaaagtctttcataaatttccaaatgtaaatagaaataagataagacatactggaaagaaacctttcaaatgtaaaaaccgtggcaaatcattttgcatgctttcacaattaactcaacataagaaaattcatactagagagtattcctacaaatgtgaagaatgtggcaaagcctttaaccagtcctcaatttttactaaacataagataattcacactgaagggaaatcctacaaatgtgaaaaatgtggcaatgcttttaaccagtcctcaaaccttactgcacgtaagataatttatacagaggaaaaccctaaagcattagttgctcaaactttgttcgacatcagggaatttgtattggagaaaaaccctgcaaatgtaataaatatggaaaaacattttttcaaaaactacagcttggaaaacatcagagagttcatactaaaatatatttttgcagatgcagtaaatatgaaaaatatttaatcccaaattaagtctatgtaaatatcagaattcacagtagaaatcataaggcataaggcactgatacttcagacattacactaaattagagtgttgagtataggagatccaaaactaaaattgttaggtaagttatttatatataactttaaaagaagtagaagattttttggagatttataattacattcaaagtatacttttttcttgaaaaaaattacagattttttgaaaagcaattgatgtaatttaactctcaaattcatgtttttcttcattcctattatattcacatgtgaaagcaagtgatctgttgttgctgaatcagagatatgagagattcttttttataggtgggcattatttatgcccctttctgtggaagagtaagaaaattaaaatacaagatgcatgaggaaaatgtagagatgctctttgtgattaacttagaatattaagtgctacttgaggtacatgttcagactaacattcttttgcagtatagtgagaaaaaaacattttaaaattaattatcattttgttgattgtgcttttatgtaataaaatgcagtactttaaaacatttagattgtgtgtgaacttaattttgtaattaaacatttttttaagcatgcta

SEQ ID NO: 65546 - DNA, 2943 bp, Homo sapiens
tggtctctcgctgcagccggcgctccacgtctagtcttcactgctctgcgtcctgtgctgataaaggctcgccgctgtgaccctgttacctgcaagaacttggaggttcacagctaagacgccaggaccccctggaagcctagaaatgttatgtgttctcattttgcccaagatgtttggccagagcacagcataaaagattctttccaaaaagtgatactgagaacatatggaaaatatggacatgagaatttacagctaagaaaagaccataaaagtgtggatgcatgtaaggtgtacaaaggaggttataatggacttaaccagtgtttgacaactactgacagcaagatatttcagtgtgataaatatgtgaaagtctttcataaatttccaaatgtaaatagaaataagataagacatactggaaagaaacctttcaaatgtaaaaaccgtggcaaatcattttgcatgctttcacaattaactcaacataagaaaattcatactagagagtattcttacaaatgtgaagaatgtggtaaagcctttaactggtcctcaacccttactaaacataagataattcatactggagaaaaaccctacaaatgtgaagaatgtggcaaagcttttaaccggtcctcaaatcttactaaacataaaataattcatactggagagaaaccctacaaatgtgaagaatgtggcaaagcttttaaccggtcctcaacccttactaaacataaaagaattcatacagaagagaaaccctacaaatgtgaagaatgtggcaaggcctttaaccagttctcgattcttaataaacataagagaattcatatggaagataaaccctacaaatgtgaagaatgtggcaaagcctttagagtattctcaattcttaaaaaacataagataatccatactggggaaaaaccatacaaatgtgaagaatgtggcaaagcctttaaccagttctcaaaccttactaaacataagataattcatactggagagaaaccctacaaatgtgatgaatgtggcaaagcctttaaccagtcctcaacccttactaaacataaaagaattcatacgggagaaaaaccctacaaatgtgaagaatgtggcaaagcttttaaacagtcctcaacccttactgaacataagataattcatactggagagaaaccctacaaatgtgaaaaatgtggcaaggcctttagctggtcctcagcttttactaaacataagagaaatcatatggaagataaaccctacaaatgtgaagaatgtggcaaagcctttagtgtattctcaacccttactaaacataaaataattcatactagagaaaaaccctacaaatgtgaagaatgtggcaaagcctttaaccagtcctcaatttttactaaacataagataattcacactgaagggaaatcctacaaatgtgaaaaatgtggcaatgcttttaaccagtcctcaaaccttactgcacgtaagataatttatactggagagaaaccctacaaatatgaagaatgtgacaaagcctttaacaagttctcaacccttattacacatcagataatttatactggagagaaaccctgcaaacatgaatgtggcagagcctttaacaaatcctcaaattatactaaagagaaactacaaacctgaaagatgtgacaatgattttcactacacctcaaacttttctaaacataaaccatattggtgccctagaaatgtgaggaatatgacaaggactttaaatggttgtcacgcttgattgtaggtaagataatttatattggagaaaaatcctccaagtatgaagaatgtggcaaacttttaaccaatcctcacaccttattgcacaggaaagcatttatacttgagaaaaattgtataaagaatatggaaaagccatttatatctgctcacatgtaaaaacatcagttcatacttaataaaatgcaattaccgtcaaatctttcagaaaatataagcctttaatacgaggaagagtattcttaagatgaacattacaaatagaaagagggttgtagtacctttagttttatgatagatcttattgtacacattttgtaccagaggaaaaccctaaagcattagttgctcaaactttgttcgacatcagggaatttgtattggagaaaaaccctgcaaatgtaataaatatggaaaaacattttttcaaaaactacagcttggaaaacatcagagagttcatactaaaatatatttttgcagatgcagtaaatatgaaaaatatttaatcccaaattaagtctatgtaaatatcagaattcacagtagaaatcataaggcataaggcactgatacttcagacattacactaaattagagtgttgagtataggagatccaaaactaaaattgttaggtaagttatttatatataactttaaaagaagtagaagattttttggagatttataattacattcaaagtatacttttttcttgaaaaaaattacagattttttgaaaagcaattgatgtaatttaactctcaaattcatgtttttcttcattcctattatattcacatgtgaaagcaagtgatctgttgttgctgaatcagagatatgagagattcttttttataggtgggcattatttatgcccctttctgtggaagagtaagaaaattaaaatacaagatgcatgaggaaaatgtagagatgctctttgtgattaacttagaatattaagtgctacttgaggtacatgttcagactaacattcttttgcagtatagtgagaaaaaaacattttaaaattaattatcattttgttgattgtgcttttatgtaataaaatgcagtactttaaaacatttagattgtgtgtgaacttaattttgtaattaaacatttttttaagcatgcta

SEQ ID NO: 65547 - DNA, 2103 bp, Homo sapiens
tggtctctcgctgcagccggcgctccacgtctagtcttcactgctctgcgtcctgtgctgataaaggctcgccgctgtgaccctgttacctgcaagaacttggaggttcacagctaagacgccaggaccccctggaagcctagaaatgttatgtgttctcattttgcccaagatgtttggccagagcacagcataaaagattctttccaaaaagtgatactgagaacatatggaaaatatggacatgagaatttacagctaagaaaagaccataaaagtgtggatgcatgtaaggtgtacaaaggaggttataatggacttaaccagtgtttgacaactactgacagcaagatatttcagtgtgataaatatgtgaaagtctttcataaatttccaaatgtaaatagaaataagataagacatactggaaagaaacctttcaaatgtaaaaaccgtggcaaatcattttgcatgctttcacaattaactcaacataagaaaattcatactagagagtattcctacaaatgtgaagaatgtggcaaagcctttaaccagtcctcaatttttactaaacataagataattcacactgaagggaaatcctacaaatgtgaaaaatgtggcaatgcttttaaccagtcctcaaaccttactgcacgtaagataatttatactggagagaaaccctacaaatatgaagaatgtgacaaagcctttaacaagttctcaacccttattacacatcagataatttatactggagagaaaccctgcaaacatgaatgtggcagagcctttaacaaatcctcaaattatactaaagagaaactacaaacctgaaagatgtgacaatgattttcactacacctcaaacttttctaaacataaaccatattggtgccctagaaatgtgaggaatatgacaaggactttaaatggttgtcacgcttgattgtaggtaagataatttatattggagaaaaatcctccaagtatgaagaatgtggcaaacttttaaccaatcctcacaccttattgcacaggaaagcatttatacttgagaaaaattgtataaagaatatggaaaagccatttatatctgctcacatgtaaaaacatcagttcatacttaataaaatgcaattaccgtcaaatctttcagaaaatataagcctttaatacgaggaagagtattcttaagatgaacattacaaatagaaagagggttgtagtacctttagttttatgatagatcttattgtacacattttgtaccagaggaaaaccctaaagcattagttgctcaaactttgttcgacatcagggaatttgtattggagaaaaaccctgcaaatgtaataaatatggaaaaacattttttcaaaaactacagcttggaaaacatcagagagttcatactaaaatatatttttgcagatgcagtaaatatgaaaaatatttaatcccaaattaagtctatgtaaatatcagaattcacagtagaaatcataaggcataaggcactgatacttcagacattacactaaattagagtgttgagtataggagatccaaaactaaaattgttaggtaagttatttatatataactttaaaagaagtagaagattttttggagatttataattacattcaaagtatacttttttcttgaaaaaaattacagattttttgaaaagcaattgatgtaatttaactctcaaattcatgtttttcttcattcctattatattcacatgtgaaagcaagtgatctgttgttgctgaatcagagatatgagagattcttttttataggtgggcattatttatgcccctttctgtggaagagtaagaaaattaaaatacaagatgcatgaggaaaatgtagagatgctctttgtgattaacttagaatattaagtgctacttgaggtacatgttcagactaacattcttttgcagtatagtgagaaaaaaacattttaaaattaattatcattttgttgattgtgcttttatgtaataaaatgcagtactttaaaacatttagattgtgtgtgaacttaattttgtaattaaacatttttttaagcatgcta

SEQ ID NO: 65548 - DNA, 1946 bp, Homo sapiens
ggaagcggcgagtctccatggcggtggcggcggcagctgcggcgggacccgtgttctggaggcgactgctgggcctcctgcctggccgcccagggctggccgcgctcctgggacgcctgtccgaccgcctcggcaggaaccgggaccgccagcgcaggaggggcagataagagtagccaagaggcgggtcgtgatggcatccctctacctggggacaggtcctttggaacaggagctggtggactgcctggaaagtactctagaaaagtcactccaagcaaagtttccttcaaatctcaaggtctccattctcttagacttcacgcggggctcacgaggtcggaagaactcccgcacaatgctgctcccactcctgcggaggttcccagagcaggtccgagtctccctctttcacacgccgcacctccgtgggctgcttcggctcctcatccctgagcgcttcaacgagaccatcggcctccagcacattaaggtgtacctcttcgacaacagcgtcatcttgagcgggactgtgcggagattgccgacttcttcacggagctggtggacgcggtgggggatgtgtccctgcagctgcagggggacgacacggtgcaggtggtggatgggatggtgcatccttacaaaggggaccgggccgagtactgcaaggcagccaataagagggtcatggatgtgatcaactcagccaggacccgccagcagatgctgcatgcccagaccttccacagcaactctcttttgacccaggaagatgcagcagctgctggggatcgcagaccagcccctgacacctggatttatccgctgattcagatgaagcccttcgagattcaaatcgatgagattgtcactgagaccctgttgactgaggcggagcgcggggcaaaggtctacctcaccactggctatttcaacctgacccaggcctacatggacctggtcttgggcactcgggctgagtaccagatcctgctggcctcaccagaggtgaatggcttctttggggccaagggggtggccggcgccatcccagcggcctatgtgcacatcgagcgacagttcttcagtgaggtgtgcagcctgggacagcaggagcgggtccagcttcaggagtactggcggaggggctggacgttccacgccaaaggcctctggctgtacctggcagggagcagcctgccctgtctcacgctgattggctctcctaattttgggtacaggtcagttcaccgggacctggaggcccagattgcgatcgtgacggagaaccaggccctgcagcagcagcttcaccaggagcaagagcagctctacctgaggtcaggtgtggtgtcctctgccaccttcgagcagccgagtcgccaggtgaagctgtgggtgaagatggtgactccactgatcaagaacttcttctgaggacagacaggaatggccttgatgaagatgacaggcatggccggggtcagctctttcagccgcgcttcagcgatgactccagtctgggtgtcccagcgagcccctgcagggacagtatggctgagggtcaggtgtgctgccagtaagtgagggaggggctggcaggaagggtggggtcctcacactccccgccctttgcagagctgggctctaccccaaaaggcttcaggccagctgccacagctggaagcagaggccttcgtaggtgatggcctgcatgttgtaactaccccgtcccgctgggctcaaggaacagctcagctaaagccctcgggttccatccgtttaaatctgtggcattttcagagcctcatctgtcagccttaatgtcagtggcaggaagtcataactccagctaaaaattacagagtaaagttccctgattcttaatgtgtaatgtctgccctatgtgtacatacacaatataattatacatctgtgcatat

SEQ ID NO: 65549 - DNA, 4618 bp, Homo sapiens
  misc_feature (1909)..(1910): n is a, c, g, or t
  misc_feature (1925)..(1925): n is a, c, g, or t
  misc_feature (1944)..(1944): n is a, c, g, or t
  misc_feature (1958)..(1958): n is a, c, g, or t
  misc_feature (1966)..(1966): n is a, c, g, or t
  misc_feature (2003)..(2003): n is a, c, g, or t
  misc_feature (2009)..(2009): n is a, c, g, or t
ggaagcggcgagtctccatggcggtggcggcggcagctgcggcgggacccgtgttctggaggcgactgctgggcctcctgcctggccgcccagggctggccgcgctcctgggacgcctgtccgaccgcctcggcaggaaccgggaccgccagcgcaggaggtcaccatggctgttattggctcccttgctgtccccagctgttccccaggtcacctccccaccttgctgcctgtgtccagaaggcgtgcaccggttccagtggatcagaaacctggttccagaatttggagtctccagttctcacgttagggtgctttcttccccggcagagtttttcgagctcatgaaggtggactgcctggaaagtactctagaaaagtcactccaagcaaagtttccttcaaatctcaaggtctccattctcttagacttcacgcggggctcacgaggtcggaagaactcccgcacaatgctgctcccactcctgcggaggttcccagagcaggtccgagtctccctctttcacacgccgcacctccgtgggctgcttcggctcctcatccctgagcgcttcaacgagaccatcggcctccagcacattaaggtgtacctcttcgacaacagcgtcatcttgagcggtgcaaacctgagtgactcctacttcaccaaccgccaggaccgctacgtgttcctgcaggactgtgcggagattgccgacttcttcacggagctggtggacgcggtgggggatgtgtccctgcagctgcagggggacgacacggtgcaggtggtggatgggatggtgcatccttacaaaggggaccgggccgagtactgcaaggcagccaataagagggtcatggatgtgatcaactcagccaggacccgccagcagatgctgcatgcccagaccttccacagcaactctcttttgacccaggaagatgcagcagctgctggggatcgcagaccagcccctgacacctggatttatccgctgattcagatgaagcccttcgagattcaaatcgatgagattgtcactgagaccctgttgactgaggcggagcgcggggcaaaggtctacctcaccactggctatttcaacctgacccaggcctacatggacctggtcttgggcactcgggctgagtaccagatcctgctggcctcaccagaggtgaatggcttctttggggccaagggggtggccggcgccatcccagcggcctatgtgcacatcgagcgacagttcttcagtgaggtgtgcagcctgggacagcaggagcgggtccagcttcaggagtactggcggaggggctggacgttccacgccaaaggcctctggctgtacctggcagggagcagcctgccctgtctcacgctgattggctctcctaattttgggtacaggtcagttcaccgggacctggaggcccagattgcgatcgtgacggagaaccaggccctgcagcagcagcttcaccaggagcaagagcagctctacctgaggtcaggtgtggtgtcctctgccaccttcgagcagccgagtcgccaggtgaagctgtgggtgaagatggtgactccactgatcaagaacttcttctgaggacagacaggtgctgtctctagcatcacctctcagcacgattttcccgagagttcacaggtggggcaggtggttgttctgactcaaccagagcttccagagggctctttgatccctttctcagttaaacacagagcagcatcttcaggggtatggcagctgtcctcaaagttagaagctggatgctaaattaggcagtctgttcactttccatctggtacccactccactaagtcccaaggcgcctgtgctggggtcggcagtggcagcctgtagtccccttctgctctcccttcccnnggggtcctgaagaanccctggggcaagggctcanggatgagggggcanaaaggcanattgagcccctccaagctgagcacactggtgcagganatgtanacgtgggaggaggggagcacgtttgctcgtgagagtggctctggcttgctgccctggccggctgtagtgcacagggtggggcgtcggtagagccagaccgtgggctgctgcctggacgcctcgctgacatccctgtgctgcggttacagagctgcgcccttctagactctggaagttgagtaacaggacctgctctgcccacccaggaggggcctgccgcttcaccagaggcaccagtggggtcccacagtcacctgaggtacccctggactgtcttgacgcctagaggtccgggcagggggtggctgccattaaaggtggggtctttgctgagtgaccttttgtgtcctggatccctcagggcctggactgcactccgggtggggtcaggctcccgaggcccctgctctctggttctggatgttgtgggtagttctgttgctttggatggctgggcctttggatggtggcttgtggggaagggacggtgaggagtcaaagatgagccaggacccatgtggccggcacatgcgctagtgccggcatctcatgtgtgcagcgtgggctcccttagtgcctggcaccttagtgctctgctaagtctcattgtttaaaaatgtgtagtttatctgcagcttttcctagttattttaattacttttcattttatttgaatagtgtgtgcaaatgtagagagtaaaacaatactgcggccatttcctgccctcccttcccccaggcagccactcttggcttgtttcttctgatgtgcacacgtgtccgtatttctaaataacgtgcatatcctgctgtcttcccccaaaatgtgtacttaaccaaaacagcaccagtgtcactcctgaaacaaaaattaccaagaatgtcttagtatcatcaaatacctaaatggtgttcacaattccacttgccttaaaattaattttttcgattatttgacttgaagtccaattaaggactacaccttgtgattgttttttccctagcaatttattttttgaagaatgaactttatttttattggatctacttaaaacatttttgtgtcacctagtagcaggggattttgaatacatgtcatgtgtgtttataaagccagctctccatatcccccagtgtctccaggagctgcttttgtgacctcactgcctgatctctttatcatcttcaggtgcttgacccttgcacagagagaagcttcctgggctacagggcatggcagcctgtcctttcggggagtgagattagatttagtccctgcactttgcctctctagaagcagcttctcgcctttccctcccgagggctggcaggagtcactgtcagtcacccttcatggggtctgaaaggttgcatgggctcacctggtcttagacaaggacagttgcagcttccgcaccaggcagacctgcagtttgagtggctggggataggtggagcggcggcctggccacagtgccctggacagcagcacatcacatcagttaacactgtttgccttccaactagttattacggtgtcctgtgggacaattagactggaggagccaaaggaatgtgcaggggcactgggtttctgtttggagagaggctctcggtaaacagagttcgcattcctccagattctgtgggaccagagtaaatatcattatgccacagccaggcttaagcaatctatctgcagtgccgttcccgcagcgcacactgctccctctgtctctgccgatgaccttcgaggctgtcctaggcaggttctccctgaggagctccccacaccaagcctccctaactctgcaaagcagccggagcaacagagagcagcgggcggcgggcggcggccgcagtcctcccggctttctaggtgcgcggggctgtcgtgttccagtccgtgttccccgtcgctggagtgcagcttaagtgcgaatcatttcttggaaagtttagagataattttgtcaactacccacaatatgtatgtgtggactagattactttcttatttcaggatctaaaggcaaaatggaaaaacgtcacattttgtggttattaccagggactgaagtgagttgcccggtggcccctggtggctttagctcccctggtcacctgaagggctgcagtgacccctcctggccagcagaggtattggcccagccaggctgggggaggctgaaactgcttcccttctctgcagccacaaagggctggattccttgggcgccaggaggggaggatttttcttttccctccgatagccctactgggcgctaagattgttgtgaatcattaccctcagaatttggactttctagatgcttcttaacccatgatttaggtgagtaaacttggaaaaatgtttttgcaaaacttgatgatcaagctgaacgtagaacgatattcctaatgggtgtgtttgccttttttcccccttttgagacagggtctcactctgtcacccaggctggagtgagtggcatgatcatgcctcgctgcgtacttgagcccaggaggtggaggttgcaacgtgagccgagattgcgtcattgcactccagcctgggcgacaagagtgaaactctcactctccctcga

SEQ ID NO: 65550 - DNA, 3652 bp, Homo sapiens
  misc_feature (943)..(944): n is a, c, g, or t
  misc_feature (959)..(959): n is a, c, g, or t
  misc_feature (978)..(978): n is a, c, g, or t
  misc_feature (992)..(992): n is a, c, g, or t
  misc_feature (1000)..(1000): n is a, c, g, or t
  misc_feature (1037)..(1037): n is a, c, g, or t
  misc_feature (1043)..(1043): n is a, c, g, or t
aagcagtcgtatcaacgcagagtgcccattacggccgggagatgaagcccttcgagattcaaatcgatgagattgtcactgagaccctgttgactgaggcggagcgcggggcaaaggtctacctcaccactggctatttcaacctgacccaggcctacatggacctggtcttgggcactcgggctgagtaccagatcctgctggcctcaccagaggtgaatggcttctttggggccaagggggtggccggcgccatcccagcggcctatgtgcacatcgagcgacagttcttcagtgaggtgtgcagcctgggacagcaggagcgggtccagcttcaggagtactggcggaggggctggacgttccacgccaaaggcctctggctgtacctggcagggagcagcctgccctgtctcacgctgattggctctcctaattttgggtacaggtcagttcaccgggacctggaggcccagattgcgatcgtgacggagaaccaggccctgcagcagcagcttcaccaggagcaagagcagctctacctgaggtcaggtgtggtgtcctctgccaccttcgagcagccgagtcgccaggtgaagctgtgggtgaagatggtgactccactgatcaagaacttcttctgaggacagacaggtgctgtctctagcatcacctctcagcacgattttcccgagagttcacaggtggggcaggtggttgttctgactcaaccagagcttccagagggctctttgatccctttctcagttaaacacagagcagcatcttcaggggtatggcagctgtcctcaaagttagaagctggatgctaaattaggcagtctgttcactttccatctggtacccactccactaagtcccaaggcgcctgtgctggggtcggcagtggcagcctgtagtccccttctgctctcccttcccnnggggtcctgaagaanccctggggcaagggctcanggatgagggggcanaaaggcanattgagcccctccaagctgagcacactggtgcagganatgtanacgtgggaggaggggagcacgtttgctcgtgagagtggctctggcttgctgccctggccggctgtagtgcacagggtggggcgtcggtagagccagaccgtgggctgctgcctggacgcctcgctgacatccctgtgctgcggttacagagctgcgcccttctagactctggaagttgagtaacaggacctgctctgcccacccaggaggggcctgccgcttcaccagaggcaccagtggggtcccacagtcacctgaggtacccctggactgtcttgacgcctagaggtccgggcagggggtggctgccattaaaggtggggtctttgctgagtgaccttttgtgtcctggatccctcagggcctggactgcactccgggtggggtcaggctcccgaggcccctgctctctggttctggatgttgtgggtagttctgttgctttggatggctgggcctttggatggtggcttgtggggaagggacggtgaggagtcaaagatgagccaggacccatgtggccggcacatgcgctagtgccggcatctcatgtgtgcagcgtgggctcccttagtgcctggcaccttagtgctctgctaagtctcattgtttaaaaatgtgtagtttatctgcagcttttcctagttattttaattacttttcattttatttgaatagtgtgtgcaaatgtagagagtaaaacaatactgcggccatttcctgccctcccttcccccaggcagccactcttggcttgtttcttctgatgtgcacacgtgtccgtatttctaaataacgtgcatatcctgctgtcttcccccaaaatgtgtacttaaccaaaacagcaccagtgtcactcctgaaacaaaaattaccaagaatgtcttagtatcatcaaatacctaaatggtgttcacaattccacttgccttaaaattaattttttcgattatttgacttgaagtccaattaaggactacaccttgtgattgttttttccctagcaatttattttttgaagaatgaactttatttttattggatctacttaaaacatttttgtgtcacctagtagcaggggattttgaatacatgtcatgtgtgtttataaagccagctctccatatcccccagtgtctccaggagctgcttttgtgacctcactgcctgatctctttatcatcttcaggtgcttgacccttgcacagagagaagcttcctgggctacagggcatggcagcctgtcctttcggggagtgagattagatttagtccctgcactttgcctctctagaagcagcttctcgcctttccctcccgagggctggcaggagtcactgtcagtcacccttcatggggtctgaaaggttgcatgggctcacctggtcttagacaaggacagttgcagcttccgcaccaggcagacctgcagtttgagtggctggggataggtggagcggcggcctggccacagtgccctggacagcagcacatcacatcagttaacactgtttgccttccaactagttattacggtgtcctgtgggacaattagactggaggagccaaaggaatgtgcaggggcactgggtttctgtttggagagaggctctcggtaaacagagttcgcattcctccagattctgtgggaccagagtaaatatcattatgccacagccaggcttaagcaatctatctgcagtgccgttcccgcagcgcacactgctccctctgtctctgccgatgaccttcgaggctgtcctaggcaggttctccctgaggagctccccacaccaagcctccctaactctgcaaagcagccggagcaacagagagcagcgggcggcgggcggcggccgcagtcctcccggctttctaggtgcgcggggctgtcgtgttccagtccgtgttccccgtcgctggagtgcagcttaagtgcgaatcatttcttggaaagtttagagataattttgtcaactacccacaatatgtatgtgtggactagattactttcttatttcaggatctaaaggcaaaatggaaaaacgtcacattttgtggttattaccagggactgaagtgagttgcccggtggcccctggtggctttagctcccctggtcacctgaagggctgcagtgacccctcctggccagcagaggtattggcccagccaggctgggggaggctgaaactgcttcccttctctgcagccacaaagggctggattccttgggcgccaggaggggaggatttttcttttccctccgatagccctactgggcgctaagattgttgtgaatcattaccctcagaatttggactttctagatgcttcttaacccatgatttaggtgagtaaacttggaaaaatgtttttgcaaaacttgatgatcaagctgaacgtagaacgatattcctaatgggtgtgtttgccttttttcccccttttgagacagggtctcactctgtcacccaggctggagtgagtggcatgatcatgcctcgctgcgtacttgagcccaggaggtggaggttgcaacgtgagccgagattgcgtcattgcactccagcctgggcgacaagagtgaaactctcactctccctcga

SEQ ID NO: 65551 - DNA, 2252 bp, Homo sapiens
ggaagcggcgagtctccatggcggtggcggcggcagctgcggcgggacccgtgttctggaggcgactgctgggcctcctgcctggccgcccagggctggccgcgctcctgggacgcctgtccgaccgcctcggcaggaaccgggaccgccagcgcaggaggtcaccatggctgttattggctcccttgctgtccccagctgttccccaggtcacctccccaccttgctgcctgtgtccagaaggcgtgcaccggttccagtggatcagaaacctggttccagaatttggagtctccagttctcacgttagggtgctttcttccccggcagagtttttcgagctcatgaaggggcagataagagtagccaagaggcgggtcgtgatggcatccctctacctggggacaggtcctttggaacaggagctggtggactgcctggaaagtactctagaaaagtcactccaagcaaagtttccttcaaatctcaaggtctccattctcttagacttcacgcggggctcacgaggtcggaagaactcccgcacaatgctgctcccactcctgcggaggttcccagagcaggtccgagtctccctctttcacacgccgcacctccgtgggctgcttcggctcctcatccctgagcgcttcaacgagaccatcggcctccagcacattaaggtgtacctcttcgacaacagcgtcatcttgagcggtgcaaacctgagtgactcctacttcaccaaccgccaggaccgctacgtgttcctgcaggactgtgcggagattgccgacttcttcacggagctggtggacgcggtgggggatgtgtccctgcagctgcagggggacgacacggtgcaggtggtggatgggatggtgcatccttacaaaggggaccgggccgagtactgcaaggcagccaataagagggtcatggatgtgatcaactcagccaggacccgccagcagatgctgcatgcccagaccttccacagcaactctcttttgacccaggaagatgcagcagctgctggggatcgcagaccagcccctgacacctggatttatccgctgattcagatgaagcccttcgagattcaaatcgatgagattgtcactgagaccctgttgactgaggcggagcgcggggcaaaggtctacctcaccactggctatttcaacctgacccaggcctacatggacctggtcttgggcactcgggctgagtaccagatcctgctggcctcaccagaggtgaatggcttctttggggccaagggggtggccggcgccatcccagcggcctatgtgcacatcgagcgacagttcttcagtgaggtgtgcagcctgggacagcaggagcgggtccagcttcaggagtactggcggaggggctggacgttccacgccaaaggcctctggctgtacctggcagggagcagcctgccctgtctcacgctgattggctctcctaattttgggtacaggtcagttcaccgggacctggaggcccagattgcgatcgtgacggagaaccaggccctgcagcagcagcttcaccaggagcaagagcagctctacctgaggtcaggtgtggtgtcctctgccaccttcgagcagccgagtcgccaggtgaagctgtgggtgaagatggtgactccactgatcaagaacttcttctgaggacagacaggtgctgtctctagcatcacctctcagcacgattttccccggaagaaagttacacaggacaatggccttgatgaagatgacaggcatggccggggtcagctctttcagccgcgcttcagcgatgactccagtctgggtgtcccagcgagcccctgcagggacagtatggctgagggtcaggtgtgctgccagtaagtgagggaggggctggcaggaagggtggggtcctcacactccccgccctttgcagagctgggctctaccccaaaaggcttcaggccagctgccacagctggaagcagaggccttcgtaggtgatggcctgcatgttgtaactaccccgtcccgctgggctcaaggaacagctcagctaaagccctcgggttccatccgtttaaatctgtggcattttcagagcctcatctgtcagccttaatgtcagtggcaggaagtcataactccagctaaaaattacagagtaaagttccctgattcttaatgtgtaatgtctgccctatgtgtacatacacaatataattatacatctgtgcatat

SEQ ID NO: 65552 - DNA, 4696 bp, Homo sapiens
  misc_feature (1987)..(1988): n is a, c, g, or t
  misc_feature (2003)..(2003): n is a, c, g, or t
  misc_feature (2022)..(2022): n is a, c, g, or t
  misc_feature (2036)..(2036): n is a, c, g, or t
  misc_feature (2044)..(2044): n is a, c, g, or t
  misc_feature (2081)..(2081): n is a, c, g, or t
  misc_feature (2087)..(2087): n is a, c, g, or t
ggaagcggcgagtctccatggcggtggcggcggcagctgcggcgggacccgtgttctggaggcgactgctgggcctcctgcctggccgcccagggctggccgcgctcctgggacgcctgtccgaccgcctcggcaggaaccgggaccgccagcgcaggaggtcaccatggctgttattggctcccttgctgtccccagctgttccccaggtcacctccccaccttgctgcctgtgtccagaaggcgtgcaccggttccagtggatcagaaacctggttccagaatttggagtctccagttctcacgttagggtgctttcttccccggcagagtttttcgagctcatgaaggggcagataagagtagccaagaggcgggtcgtgatggcatccctctacctggggacaggtcctttggaacaggagctggtggactgcctggaaagtactctagaaaagtcactccaagcaaagtttccttcaaatctcaaggtctccattctcttagacttcacgcggggctcacgaggtcggaagaactcccgcacaatgctgctcccactcctgcggaggttcccagagcaggtccgagtctccctctttcacacgccgcacctccgtgggctgcttcggctcctcatccctgagcgcttcaacgagaccatcggcctccagcacattaaggtgtacctcttcgacaacagcgtcatcttgagcggtgcaaacctgagtgactcctacttcaccaaccgccaggaccgctacgtgttcctgcaggactgtgcggagattgccgacttcttcacggagctggtggacgcggtgggggatgtgtccctgcagctgcagggggacgacacggtgcaggtggtggatgggatggtgcatccttacaaaggggaccgggccgagtactgcaaggcagccaataagagggtcatggatgtgatcaactcagccaggacccgccagcagatgctgcatgcccagaccttccacagcaactctcttttgacccaggaagatgcagcagctgctggggatcgcagaccagcccctgacacctggatttatccgctgattcagatgaagcccttcgagattcaaatcgatgagattgtcactgagaccctgttgactgaggcggagcgcggggcaaaggtctacctcaccactggctatttcaacctgacccaggcctacatggacctggtcttgggcactcgggctgagtaccagatcctgctggcctcaccagaggtgaatggcttctttggggccaagggggtggccggcgccatcccagcggcctatgtgcacatcgagcgacagttcttcagtgaggtgtgcagcctgggacagcaggagcgggtccagcttcaggagtactggcggaggggctggacgttccacgccaaaggcctctggctgtacctggcagggagcagcctgccctgtctcacgctgattggctctcctaattttgggtacaggtcagttcaccgggacctggaggcccagattgcgatcgtgacggagaaccaggccctgcagcagcagcttcaccaggagcaagagcagctctacctgaggtcaggtgtggtgtcctctgccaccttcgagcagccgagtcgccaggtgaagctgtgggtgaagatggtgactccactgatcaagaacttcttctgaggacagacaggtgctgtctctagcatcacctctcagcacgattttcccgagagttcacaggtggggcaggtggttgttctgactcaaccagagcttccagagggctctttgatccctttctcagttaaacacagagcagcatcttcaggggtatggcagctgtcctcaaagttagaagctggatgctaaattaggcagtctgttcactttccatctggtacccactccactaagtcccaaggcgcctgtgctggggtcggcagtggcagcctgtagtccccttctgctctcccttcccnnggggtcctgaagaanccctggggcaagggctcanggatgagggggcanaaaggcanattgagcccctccaagctgagcacactggtgcagganatgtanacgtgggaggaggggagcacgtttgctcgtgagagtggctctggcttgctgccctggccggctgtagtgcacagggtggggcgtcggtagagccagaccgtgggctgctgcctggacgcctcgctgacatccctgtgctgcggttacagagctgcgcccttctagactctggaagttgagtaacaggacctgctctgcccacccaggaggggcctgccgcttcaccagaggcaccagtggggtcccacagtcacctgaggtacccctggactgtcttgacgcctagaggtccgggcagggggtggctgccattaaaggtggggtctttgctgagtgaccttttgtgtcctggatccctcagggcctggactgcactccgggtggggtcaggctcccgaggcccctgctctctggttctggatgttgtgggtagttctgttgctttggatggctgggcctttggatggtggcttgtggggaagggacggtgaggagtcaaagatgagccaggacccatgtggccggcacatgcgctagtgccggcatctcatgtgtgcagcgtgggctcccttagtgcctggcaccttagtgctctgctaagtctcattgtttaaaaatgtgtagtttatctgcagcttttcctagttattttaattacttttcattttatttgaatagtgtgtgcaaatgtagagagtaaaacaatactgcggccatttcctgccctcccttcccccaggcagccactcttggcttgtttcttctgatgtgcacacgtgtccgtatttctaaataacgtgcatatcctgctgtcttcccccaaaatgtgtacttaaccaaaacagcaccagtgtcactcctgaaacaaaaattaccaagaatgtcttagtatcatcaaatacctaaatggtgttcacaattccacttgccttaaaattaattttttcgattatttgacttgaagtccaattaaggactacaccttgtgattgttttttccctagcaatttattttttgaagaatgaactttatttttattggatctacttaaaacatttttgtgtcacctagtagcaggggattttgaatacatgtcatgtgtgtttataaagccagctctccatatcccccagtgtctccaggagctgcttttgtgacctcactgcctgatctctttatcatcttcaggtgcttgacccttgcacagagagaagcttcctgggctacagggcatggcagcctgtcctttcggggagtgagattagatttagtccctgcactttgcctctctagaagcagcttctcgcctttccctcccgagggctggcaggagtcactgtcagtcacccttcatggggtctgaaaggttgcatgggctcacctggtcttagacaaggacagttgcagcttccgcaccaggcagacctgcagtttgagtggctggggataggtggagcggcggcctggccacagtgccctggacagcagcacatcacatcagttaacactgtttgccttccaactagttattacggtgtcctgtgggacaattagactggaggagccaaaggaatgtgcaggggcactgggtttctgtttggagagaggctctcggtaaacagagttcgcattcctccagattctgtgggaccagagtaaatatcattatgccacagccaggcttaagcaatctatctgcagtgccgttcccgcagcgcacactgctccctctgtctctgccgatgaccttcgaggctgtcctaggcaggttctccctgaggagctccccacaccaagcctccctaactctgcaaagcagccggagcaacagagagcagcgggcggcgggcggcggccgcagtcctcccggctttctaggtgcgcggggctgtcgtgttccagtccgtgttccccgtcgctggagtgcagcttaagtgcgaatcatttcttggaaagtttagagataattttgtcaactacccacaatatgtatgtgtggactagattactttcttatttcaggatctaaaggcaaaatggaaaaacgtcacattttgtggttattaccagggactgaagtgagttgcccggtggcccctggtggctttagctcccctggtcacctgaagggctgcagtgacccctcctggccagcagaggtattggcccagccaggctgggggaggctgaaactgcttcccttctctgcagccacaaagggctggattccttgggcgccaggaggggaggatttttcttttccctccgatagccctactgggcgctaagattgttgtgaatcattaccctcagaatttggactttctagatgcttcttaacccatgatttaggtgagtaaacttggaaaaatgtttttgcaaaacttgatgatcaagctgaacgtagaacgatattcctaatgggtgtgtttgccttttttcccccttttgagacagggtctcactctgtcacccaggctggagtgagtggcatgatcatgcctcgctgcgtacttgagcccaggaggtggaggttgcaacgtgagccgagattgcgtcattgcactccagcctgggcgacaagagtgaaactctcactctccctcga

SEQ ID NO: 65553 - DNA, 4351 bp, Homo sapiens
  misc_feature (1642)..(1643): n is a, c, g, or t
  misc_feature (1658)..(1658): n is a, c, g, or t
  misc_feature (1677)..(1677): n is a, c, g, or t
  misc_feature (1691)..(1691): n is a, c, g, or t
  misc_feature (1699)..(1699): n is a, c, g, or t
  misc_feature (1736)..(1736): n is a, c, g, or t
  misc_feature (1742)..(1742): n is a, c, g, or t
gcggccgcctactactactaaattcgcggcgggtcgtgatggcatccctctacctggggacaggtcctttggaacaggagctggtggactgcctggaaagtactctagaaaagtcactccaagcaaagtttccttcaaatctcaaggtctccattctcttagacttcacgcggggctcacgaggtcggaagaactcccgcacaatgctgctcccactcctgcggaggttcccagagcaggtccgagtctccctctttcacacgccgcacctccgtgggctgcttcggctcctcatccctgagcgcttcaacgagaccatcggcctccagcacattaaggtgtacctcttcgacaacagcgtcatcttgagcggtgcaaacctgagtgactcctacttcaccaaccgccaggaccgctacgtgttcctgcaggactgtgcggagattgccgacttcttcacggagctggtggacgcggtgggggatgtgtccctgcagctgcagggggacgacacggtgcaggtggtggatgggatggtgcatccttacaaaggggaccgggccgagtactgcaaggcagccaataagagggtcatggatgtgatcaactcagccaggacccgccagcagatgctgcatgcccagaccttccacagcaactctcttttgacccaggaagatgcagcagctgctggggatcgcagaccagcccctgacacctggatttatccgctgattcagatgaagcccttcgagattcaaatcgatgagattgtcactgagaccctgttgactgaggcggagcgcggggcaaaggtctacctcaccactggctatttcaacctgacccaggcctacatggacctggtcttgggcactcgggctgagtaccagatcctgctggcctcaccagaggtgaatggcttctttggggccaagggggtggccggcgccatcccagcggcctatgtgcacatcgagcgacagttcttcagtgaggtgtgcagcctgggacagcaggagcgggtccagcttcaggagtactggcggaggggctggacgttccacgccaaaggcctctggctgtacctggcagggagcagcctgccctgtctcacgctgattggctctcctaattttgggtacaggtcagttcaccgggacctggaggcccagattgcgatcgtgacggagaaccaggccctgcagcagcagcttcaccaggagcaagagcagctctacctgaggtcaggtgtggtgtcctctgccaccttcgagcagccgagtcgccaggtgaagctgtgggtgaagatggtgactccactgatcaagaacttcttctgaggacagacaggtgctgtctctagcatcacctctcagcacgattttcccgagagttcacaggtggggcaggtggttgttctgactcaaccagagcttccagagggctctttgatccctttctcagttaaacacagagcagcatcttcaggggtatggcagctgtcctcaaagttagaagctggatgctaaattaggcagtctgttcactttccatctggtacccactccactaagtcccaaggcgcctgtgctggggtcggcagtggcagcctgtagtccccttctgctctcccttcccnnggggtcctgaagaanccctggggcaagggctcanggatgagggggcanaaaggcanattgagcccctccaagctgagcacactggtgcagganatgtanacgtgggaggaggggagcacgtttgctcgtgagagtggctctggcttgctgccctggccggctgtagtgcacagggtggggcgtcggtagagccagaccgtgggctgctgcctggacgcctcgctgacatccctgtgctgcggttacagagctgcgcccttctagactctggaagttgagtaacaggacctgctctgcccacccaggaggggcctgccgcttcaccagaggcaccagtggggtcccacagtcacctgaggtacccctggactgtcttgacgcctagaggtccgggcagggggtggctgccattaaaggtggggtctttgctgagtgaccttttgtgtcctggatccctcagggcctggactgcactccgggtggggtcaggctcccgaggcccctgctctctggttctggatgttgtgggtagttctgttgctttggatggctgggcctttggatggtggcttgtggggaagggacggtgaggagtcaaagatgagccaggacccatgtggccggcacatgcgctagtgccggcatctcatgtgtgcagcgtgggctcccttagtgcctggcaccttagtgctctgctaagtctcattgtttaaaaatgtgtagtttatctgcagcttttcctagttattttaattacttttcattttatttgaatagtgtgtgcaaatgtagagagtaaaacaatactgcggccatttcctgccctcccttcccccaggcagccactcttggcttgtttcttctgatgtgcacacgtgtccgtatttctaaataacgtgcatatcctgctgtcttcccccaaaatgtgtacttaaccaaaacagcaccagtgtcactcctgaaacaaaaattaccaagaatgtcttagtatcatcaaatacctaaatggtgttcacaattccacttgccttaaaattaattttttcgattatttgacttgaagtccaattaaggactacaccttgtgattgttttttccctagcaatttattttttgaagaatgaactttatttttattggatctacttaaaacatttttgtgtcacctagtagcaggggattttgaatacatgtcatgtgtgtttataaagccagctctccatatcccccagtgtctccaggagctgcttttgtgacctcactgcctgatctctttatcatcttcaggtgcttgacccttgcacagagagaagcttcctgggctacagggcatggcagcctgtcctttcggggagtgagattagatttagtccctgcactttgcctctctagaagcagcttctcgcctttccctcccgagggctggcaggagtcactgtcagtcacccttcatggggtctgaaaggttgcatgggctcacctggtcttagacaaggacagttgcagcttccgcaccaggcagacctgcagtttgagtggctggggataggtggagcggcggcctggccacagtgccctggacagcagcacatcacatcagttaacactgtttgccttccaactagttattacggtgtcctgtgggacaattagactggaggagccaaaggaatgtgcaggggcactgggtttctgtttggagagaggctctcggtaaacagagttcgcattcctccagattctgtgggaccagagtaaatatcattatgccacagccaggcttaagcaatctatctgcagtgccgttcccgcagcgcacactgctccctctgtctctgccgatgaccttcgaggctgtcctaggcaggttctccctgaggagctccccacaccaagcctccctaactctgcaaagcagccggagcaacagagagcagcgggcggcgggcggcggccgcagtcctcccggctttctaggtgcgcggggctgtcgtgttccagtccgtgttccccgtcgctggagtgcagcttaagtgcgaatcatttcttggaaagtttagagataattttgtcaactacccacaatatgtatgtgtggactagattactttcttatttcaggatctaaaggcaaaatggaaaaacgtcacattttgtggttattaccagggactgaagtgagttgcccggtggcccctggtggctttagctcccctggtcacctgaagggctgcagtgacccctcctggccagcagaggtattggcccagccaggctgggggaggctgaaactgcttcccttctctgcagccacaaagggctggattccttgggcgccaggaggggaggatttttcttttccctccgatagccctactgggcgctaagattgttgtgaatcattaccctcagaatttggactttctagatgcttcttaacccatgatttaggtgagtaaacttggaaaaatgtttttgcaaaacttgatgatcaagctgaacgtagaacgatattcctaatgggtgtgtttgccttttttcccccttttgagacagggtctcactctgtcacccaggctggagtgagtggcatgatcatgcctcgctgcgtacttgagcccaggaggtggaggttgcaacgtgagccgagattgcgtcattgcactccagcctgggcgacaagagtgaaactctcactctccctcga

SEQ ID NO: 65554 - DNA, 2675 bp, Homo sapiens
  misc_feature (1987)..(1988): n is a, c, g, or t
  misc_feature (2003)..(2003): n is a, c, g, or t
  misc_feature (2022)..(2022): n is a, c, g, or t
  misc_feature (2036)..(2036): n is a, c, g, or t
  misc_feature (2044)..(2044): n is a, c, g, or t
  misc_feature (2081)..(2081): n is a, c, g, or t
  misc_feature (2087)..(2087): n is a, c, g, or t
ggaagcggcgagtctccatggcggtggcggcggcagctgcggcgggacccgtgttctggaggcgactgctgggcctcctgcctggccgcccagggctggccgcgctcctgggacgcctgtccgaccgcctcggcaggaaccgggaccgccagcgcaggaggtcaccatggctgttattggctcccttgctgtccccagctgttccccaggtcacctccccaccttgctgcctgtgtccagaaggcgtgcaccggttccagtggatcagaaacctggttccagaatttggagtctccagttctcacgttagggtgctttcttccccggcagagtttttcgagctcatgaaggggcagataagagtagccaagaggcgggtcgtgatggcatccctctacctggggacaggtcctttggaacaggagctggtggactgcctggaaagtactctagaaaagtcactccaagcaaagtttccttcaaatctcaaggtctccattctcttagacttcacgcggggctcacgaggtcggaagaactcccgcacaatgctgctcccactcctgcggaggttcccagagcaggtccgagtctccctctttcacacgccgcacctccgtgggctgcttcggctcctcatccctgagcgcttcaacgagaccatcggcctccagcacattaaggtgtacctcttcgacaacagcgtcatcttgagcggtgcaaacctgagtgactcctacttcaccaaccgccaggaccgctacgtgttcctgcaggactgtgcggagattgccgacttcttcacggagctggtggacgcggtgggggatgtgtccctgcagctgcagggggacgacacggtgcaggtggtggatgggatggtgcatccttacaaaggggaccgggccgagtactgcaaggcagccaataagagggtcatggatgtgatcaactcagccaggacccgccagcagatgctgcatgcccagaccttccacagcaactctcttttgacccaggaagatgcagcagctgctggggatcgcagaccagcccctgacacctggatttatccgctgattcagatgaagcccttcgagattcaaatcgatgagattgtcactgagaccctgttgactgaggcggagcgcggggcaaaggtctacctcaccactggctatttcaacctgacccaggcctacatggacctggtcttgggcactcgggctgagtaccagatcctgctggcctcaccagaggtgaatggcttctttggggccaagggggtggccggcgccatcccagcggcctatgtgcacatcgagcgacagttcttcagtgaggtgtgcagcctgggacagcaggagcgggtccagcttcaggagtactggcggaggggctggacgttccacgccaaaggcctctggctgtacctggcagggagcagcctgccctgtctcacgctgattggctctcctaattttgggtacaggtcagttcaccgggacctggaggcccagattgcgatcgtgacggagaaccaggccctgcagcagcagcttcaccaggagcaagagcagctctacctgaggtcaggtgtggtgtcctctgccaccttcgagcagccgagtcgccaggtgaagctgtgggtgaagatggtgactccactgatcaagaacttcttctgaggacagacaggtgctgtctctagcatcacctctcagcacgattttcccgagagttcacaggtggggcaggtggttgttctgactcaaccagagcttccagagggctctttgatccctttctcagttaaacacagagcagcatcttcaggggtatggcagctgtcctcaaagttagaagctggatgctaaattaggcagtctgttcactttccatctggtacccactccactaagtcccaaggcgcctgtgctggggtcggcagtggcagcctgtagtccccttctgctctcccttcccnnggggtcctgaagaanccctggggcaagggctcanggatgagggggcanaaaggcanattgagcccctccaagctgagcacactggtgcagganatgtanacgtgggaggaggggagcacgtttgctcgtgagagtggctctggcttgctgccctggccggctgtagtgcacagggtggggcgtcggtagagccagaccgtgggctgctgcctggacgcctcgctgacatccctgtgctgcggttacagagctgcgcccttctagactctggaagttgagtaacaggacctgctctgcccacccaggaggggcctgccgcttcaccagaggcaccagtggggtcccacagtcacctgaggaatggccttgatgaagatgacaggcatggccggggtcagctctttcagccgcgcttcagcgatgactccagtctgggtgtcccagcgagcccctgcagggacagtatggctgagggtcaggtgtgctgccagagtcgcagcagctggggagtgggtgagactgggccagccagcatgacctggagtctcagtgcagccacaaaacgcacttctgccctgggctgactgctccgtggcagggaaagcctgggcttttcagcgcttttcatcacgtcggagctgctctctcacaagctctgctgttttcattaaagcagaggccaggtga

SEQ ID NO: 65555 - DNA, 107 bp, Homo sapiens
cttgaactttagaactgttactctcaggtgtcaggaaccttaaagaagtttggacttttctttgcagttaggaaatgtaagtgttcattatagataatttataaaat

SEQ ID NO: 65556 - DNA, 332 bp, Homo sapiens
tgagatcagagcttataagcatttcatatcattgtgaggctcttactctaggcaaaattgttgaataaaagcagaaaaagctaattgaaaatgaagtacactggaaatactaaaatcaactgaggtgagagagaagggacatgatggcttcatgaactgtcagttaactcagtgtgtctagtaaaatatcctcattttaaagtatgattagatatttaatgttggattcctttaatatgtcttctgaatttggatgagtcaaataagtcaacagtctttgactgcaccattttggaagctgatcttggatgtgtttctgacactgcagcatt

SEQ ID NO: 65557 - DNA, 476 bp, Homo sapiens
tacttacagctatttggtaggttacagattactacattccaagaaaaagtattttgttactccatgagggggggtagtgatctcagggggttgtatctctggtatggtttggtcctcctattttaattatttatagaaacaaaaggcagacgttgcagatgcctgctgcttgactcaggctgtagccacattcctcccaaggctcggaataaagttccaacagctttaagtttgaattatttaacttccaataactataaagtcattttgtttactaatgtgctaaataaagatatgggctctaggccaggtgcagtggcccaggcctgtaatcccagcactttctggaggccaaggcaggtggatcacctgaggtcaggagttcgagaccagcctggccaacatggtgaaaccccgtctctactaaaaatacaaaaattagccgggcatggtggcaggcacctgtcattccagct

SEQ ID NO: 65558 - DNA, 492 bp, Homo sapiens
tgaggactgattagtgtttatcttgaaaacatgtacttaggctgggcgcggtggctcacgcctgtaatcccagcactttgggaggctgaggtaggtggatcacctgaggtcaggagtttgagaccagcctgaccaaaaaggtcaaactccgtctctactaaaaatacaaaaattagcccagcatggtagcagacgcctgtagttccagctattcaggaggatgagacaggagaattgcttgaacccaggaggtggaggctgcagtaagctgagatcttgccactgcactctagcctgggcaacagagtgagactcttgtctccaaaaaaaagaaagaaaaaagacaaaagaaaacatgtacttaatgggttgtatagaacagtgaagtttctctctctgttttcaacctctcaactgtttgcctctatttcccattacattcaggtctaaggctctttattaataaaatggttgttatttccttctctgtta

SEQ ID NO: 65559 - DNA, 389 bp, Homo sapiens
gattctttccttcatcttgactttagacaacctgatggctgtgtgcccaggtggtaatctttttgcattgaatttcccaggtgttctttgtgcttcttatatttggatatctagatctctagcaagactaggaagtttttcttgattattccctcaaataagtccttaatgaccccactatataacatgaaatatctgttattggtactgaggtgctggccacaaacaattctgtgtgtcctgaaaactcttcagaatattcgtcatctttagcacttgttatcttagtgtttgggcttggcttagagtgatacatctcataacagggcaacagaaagaaccaggaaccaagatttatataacataagtcagtaaaactagaggcacca

SEQ ID NO: 65560 - DNA, 292 bp, Homo sapiens
caggtcaccttttaaagatgtacacaattctgtattcactttttgagtgcataagggtaatagaaaatgacatgggaagcgttaattagaaaaaaaggcattttgtttatgtgcatttgaggatacagtgtttgaagtttctaaataattgttttatgacattttcttggtacatagatattgctaacaattagtttgctgaagtatgtagaaacattttaagaaatgattttagaaatataattgttaaagtacctctgatgtatattaaaaatccttttattttggttta

SEQ ID NO: 65561 - DNA, 299 bp, Homo sapiens
tccttcttcctcaaagtcacaagggagagactttttaataaaatttttcctttccaactaaattcaggcttttgggtggaggacactagcaatatcacctgaaaaacatcattttcctgtacagggtgtgaggtgtaatcagcattccacttactctctgctccatctatcaagtgtaggtcatactggcttacactgaggtcaggaggggttaacgataatgtatgcatgtgcctgtatttggcatgtggtgggggttcaattaaatgacagctaaaaatcatactccttttcagaaa

SEQ ID NO: 65562 - DNA, 297 bp, Homo sapiens
attaattatctcatgggcaagaaaggctgtccaagaagtagacagattggtgtcatcttgagaaaaacttgcagggtgaattatgtagctagagagaatgaaaaaggagaatatattctctctgtcgaggaatggtgaagaggggaattctgaagcctttgggaacacccaaatcaactccatgaaggcttgagcatttgggtgctgctttcatggaggtgtgttattcagccagtgtcagcttagtttcatataaacttgtgatccatagaaaataggctatcatttccggataag

SEQ ID NO: 65563 - DNA, 1696 bp, Homo sapiens
cgggcactatgtctggcacacagtagggtgagagtagttataaatgcttgttgagtaggttcattactgggaggccgaagtctcccaggatttaactctgtgtttcaaatccctaaactgatttcataagcttcattacactcaggttaaatccacatgatcctgactaaactgcactacaactgaaaatgtactcatattcttttaccagctgaagtccatttcaagagtcactatagatcgtacaaaaatggtgaataggccacttgatattttggtatgtgatctaaacaatgtacagattgggttttcaataggttctcaaaaggcaggaagtgaaggagcaagctggtattcacctgtctggtttaggttatgtaggtagttaaactggatagcacaagaccaaaaaaaaaaatttaaacccatttagtgacatgagttctccagactaatccggctgcaacattgctggagtagagaaagttactgctcaataccttttggtttcttatctttatatgggctgaagttagcattaatacctctagagagtaaatgcagatatggggccatacttgagaccagagacaatcttgacttagcggtaaacacaccatatacatccattctctgtcttgagcttacagcaacactaactggaaagtatgataaatatttacattaatactaatatttcttttgcttgtcttaaatgactatgctttttttacaaaaatctcttggtatctctcatgcatgtggaaaaatggactttttagtcactagcatgtcagttgttaactgacccctatccagtttccaaatagaatgtacaatctccctagttcttcgatgtgcatgactggcctttgatgttttaataagtccctgaaatgtatctttaaaaggaaaagggaaatatgcctgggaatagatgcgtgcttctgaaattgtgcataaaatagctatgtaagaaatataagcatcgaaagagtgaaacaccaccttatttctcctctaatcattaatttcaaggtgataagcatttatggttttttctagggcttgtattaaaccactgaacaattgtcttaaagtatactcctcacagaactaaagagtaaaaatagaaaatgttaaaatagtaacaaaatatttacaagatagccttaaaacataatctgtaccataaaacctacaagttaccaattactattcaattaaagttcaaccgtattactgaaatatacttctgattttgaaatgttgagcccaaatatgtgattgcatcttcatgctgcatattcagtgttcactaaaactttaattttaaatgttgcacttcagaaatgtaaaaggatgtccagccaatgtaattttccttcatcacttgtgatattgaccagttttaaagtctttggcctatttttaaaaagtgaggatagctgcatcttttctacttcatatacaacttttctacatgtaaccctcaacttacacattgcctagtgaaacagagccaaaaaatgcagtatcacctgtaccttttaattttattaaacttttttcaatcatgaatttttcaccgtcttccctttataaataaattctagtgacaaatcaagatttggttttattttgatgtaattcacctctcacttttgtcttcaattccttttaacctctctgtacg

SEQ ID NO: 65564 - DNA, 1066 bp, Homo sapiens
gcgtcagaggatcccggaggcaaggaaagtaacggagtatgataaatatttacattaatactaatatttcttttgcttgtcttaaatgactatgctttttttacaaaaatctcttggtatctctcatgcatgtggaaaaatggactttttagtcactagcatgtcagttgttaactgacccctatccagtttccaaatagaatgtacaatctccctagttcttcgatgtgcatgactggcctttgatgttttaataagtccctgaaatgtatctttaaaaggaaaagggaaatatgcctgggaatagatgcgtgcttctgaaattgtgcataaaatagctatgtaagaaatataagcatcgaaagagtgaaacaccaccttatttctcctctaatcattaatttcaaggtgataagcatttatggttttttctagggcttgtattaaaccactgaacaattgtcttaaagtatactcctcacagaactaaagagtaaaaatagaaaatgttaaaatagtaacaaaatatttacaagatagccttaaaacataatctgtaccataaaacctacaagttaccaattactattcaattaaagttcaaccgtattactgaaatatacttctgattttgaaatgttgagcccaaatatgtgattgcatcttcatgctgcatattcagtgttcactaaaactttaattttaaatgttgcacttcagaaatgtaaaaggatgtccagccaatgtaattttccttcatcacttgtgatattgaccagttttaaagtctttggcctatttttaaaaagtgaggatagctgcatcttttctacttcatatacaacttttctacatgtaaccctcaacttacacattgcctagtgaaacagagccaaaaaatgcagtatcacctgtaccttttaattttattaaacttttttcaatcatgaatttttcaccgtcttccctttataaataaattctagtgacaaatcaagatttggttttattttgatgtaattcacctctcacttttgtcttcaattccttttaacctctctgtacg

SEQ ID NO: 65565 - DNA, 337 bp, Homo sapiens
atgatttaatgtatacagatggatatgttcagattacttgcaaatactatgtcattttataccagggacttgagcataattagattttggcatctacgctgtttctggaaggaatcctctgtggatcttgagggacaactgtttttctctattctgaaagttataatcacaaattatagaatacgtaactatgttacttagtatgtataatgatgtgctgggcgtggtggctcacgcctgtaatcccagcactttgggaagccaaggcgggcggctcctgaggtcaggagtttgagaccagcctgaccaatatggagaaaccccatctccactaaaa

SEQ ID NO: 65566 - DNA, 802 bp, Homo sapiens
ctttcttcaaagtcatgggggacttcttgaagcaaagggtggggtaaatgatcaggttcttgtattttaaatatcttgctggctccaatgtggaagctggattgaagtagggcaatagcgaacaagaggagcaatatgggactcaggggaagtttaacaattgcctaagtaatgagtgtaatatggtatcctgaatgaaaccatggaccagaaaaaggacattaggtaaaaactaaagaaatctgaaaagtacagactgtggttaacaactgttttagtccattttgtgttgctataacacaataccacagattggggaatttataaagaaaagaaatgtatttggctcatgattctgcaggctggaaagtccaagagcatggcaccagtatctggcaaggacctttgtgctgtgtcatcccatggcaaaaggtggaagagtaagcgagcatgtgagaaaaaggaaatcaggctgaactcatccttttgtcaggagcccactcctgcaatagctaacctacctcccccatgacagcattaatccatttatgaagacaaagtcctcatgatcaaatcacctcttaataccatcacaatggcaatgaaatttcaacattagttttggaggggacatccaaactatagcaataatgatgtatgaatattagttcattaattgtaaatagtgtatcatctgaatgtaagatgttaacaataggggaaactgggtgtgtggtttgttggagcactctgcactacctttgcaatttttcagtaaatctaagactattctaaaacaaaa

SEQ ID NO: 65567 - DNA, 261 bp, Homo sapiens
aaaataaaatgcttggctccaaaaaactcagtctctggtggatatatacagttgacccttgatcaacgcaggtttgaatgtgagtcaaaacctatttatatgtggattttttttccaatgaaatttacactgaaggttcgtcatggtggctcatgcctgtaatcccagcactttgggaggccgaggggggcagatcacttgaggtcaggagtttgagaccagcctggccaacatggtgaaaccccgtctctactaaaaaca

SEQ ID NO: 65568 - DNA, 6004 bp, Homo sapiens
ccctgcgcccccggctcctccagcgtcagcggctcctgcgcgcgggatgcattgggcaatttttgaaatcctgaagtaggaagagaccccggaggatataagtcgggggtgggggtggagcagagaatctgtgaaagatattcaaagagagaaaaggggaatcctgatcgtttctgcccgtgcttgttttcaacttgagcgtgctagcctttaacttgaagaagtctcattggagcatctagcattctccaggagttattcgaaagctgaaactttcagtggattgtgggcctggggagaagaaggattccgagggtggaattgggaagagcgtgcgtgcgtgtgtgtgtgtgtgtgtgcgcgcgcgcgcgtgggtcggggcgggggcgtcggggggccactgggaattcagtgaagagggcaccctataccatggcagtgcccggcgacgctgcacgagtcaggaacaagcccgtccacagtggggtgagtcaagcccccacggcgggccgggactgccaccatcgtgcggaccccgcatcgccgcgggactcgggctgccgtggctgctggggagacctggtgctgcagccgctccggagctctcggaaactttcctccgcgctgtgcgcgggctccctatcctttctgctggcgctgctggtgaggctggtccgcggggaggtcggctgtgacctggagcagtgtaaggaggcggcggcggcggaggaggaggaagcagccccgggagcagaagggggcgtcttcccggggcctcggggaggtgctcccgggggcggtgcgcggctcagcccctggctgcagccctcggcgctgctcttcagtctcctgtgtgccttcttctggatgggcttgtacctcctgcgcgccggggtgcgcctgcctctggctgtcgcgctgctggccgcctgctgcgggggggaagcgctcgtccagattgggctgggcgtcggggaggatcacttactctcactccccgctgcgggggtggtgctcagctgcttggccgccgcgacatggctggtgctgaggctgaggctgggcgtcctcatgatcgccttgactagcgcggtcaggaccgtgtccctcatttccttagagaggttcaaggtcgcctggagaccttacctggcgtacctggccggcgtgctggggatcctcttggccaggtacgtggaacaaatcttgccgcagtccgcggaggcggctccaagggagcatttggggtcccagctgattgctgggaccaaggaagatatcccggtgtttaagaggaggaggcggtccagctccgtcgtgtccgccgagatgtccggctgcagcagcaagtcccatcggaggacctccctgccctgtataccgagggaacagctcatggggcattcagaatgggaccacaaacgagggccaagaggatcacagtcttcaggaaccagtattactgtggacatcgccgtcatgggcgaagccacggcctcattaccgacctcctggcagacccttctcttccaccaaacgtgtgccacatccttgagagccgtgagcaacttgctcagcacacagctcaccttccaggccattcacaagcccagagtgaatcccgttacttcgctcagtgaaaactatacctgttctgactctgaagagagctctgaaaaagacaagcttgctattccaaagcgcctgagaaggagtttgcctcctggcttgttgagacgagtttcttccacttggaccaccaccacctcggccacaggtctacccaccttggagcctgcaccagtacggagagaccgcagcaccagcatcaaactgcaggaagcaccttcatccagtcctgattcttggaataatccagtgatgatgaccctcaccaaaagcagatcctttacttcatcctatgctatttctgcagctaaccatgtaaaggctaaaaagcaaagtcgaccaggtgccctcgctaaaatttcacctctttcatcgccctgctcctcacctctccaagggactcctgccagcagcctggtcagcaaaatttctgcagtgcagtttccagaatctgctgacacaactgccaaacaaagcctaggttctcacagggccttaacttacactcagagtgccccagacctatcccctcaaatcctgactccacctgttatatgtagcagctgtggcagaccatattcccaagggaatcctgctgatgagcccctggagagaagtggggtagccactcggacaccaagtcgaacagatgacactgctcaagttacctctgattatgaaaccaataacaacagtgacagcagtgacattgtacagaatgaagatgaaacagagtgcctgagagagcctctgaggaaagcatcggcttgcagcacctatgctcctgagaccatgatgtttctggacaaaccaattcttgctcccgaacctcttgtcatggataacctggactcaattatggagcagctaaatacttggaattttccaatttttgatttagtggaaaatataggaagaaaatgtggccgtattcttagtcaggtatcttacagactttttgaagacatgggcctctttgaagcttttaaaattccaattagggaatttatgaattattttcatgctttggagattggatatagggatattccttatcataacagaatccatgccactgatgttttacatgctgtttggtatcttactacacagcctattccaggcctctcaactgtgattaatgatcatggttcaaccagtgattcagattctgacagtggatttacacatggacatatgggatatgtattctcaaaaacgtataatgtgacagatgataaatacggatgtctgtctgggaatatccctgccttggagttgatggcgctgtatgtggctgcagccatgcacgattatgatcatccaggaaggactaatgctttcctggttgcaactagtgctcctcaggcggtgctatataacgatcgttcagttttggagaatcatcacgcagctgctgcatggaatcttttcatgtcccggccagagtataacttcttaattaaccttgaccatgtggaatttaagcatttccgtttccttgtcattgaagcaattttggccactgacctgaagaaacactttgacttcgtagccaaatttaatggcaaggtaaatgatgatgttggaatagattggaccaatgaaaatgatcgtctactggtttgtcaaatgtgtataaagttggctgatatcaatggtccagctaaatgtaaagaactccatcttcagtggacagatggtattgtcaatgaattttatgaacagggtgatgaagaggccagccttggattacccataagccccttcatggatcgttctgctcctcagctggccaaccttcaggaatccttcatctctcacattgtggggcctctgtgcaactcctatgattcagcaggactaatgcctggaaaatgggtggaagacagcgatgagtcaggagatactgatgacccagaagaagaggaggaagaagcaccagcaccaaatgaagaggaaacctgtgaaaataatgaatctccaaaaaagaagactttcaaaaggagaaaaatctactgccaaataactcagcacctcttacagaaccacaagatgtggaagaaagtcattgaagaggagcaacggttggcaggcatagaaaatcaatccctggaccagacccctcagtcgcactcttcagaacagatccaggctatcaaggaagaagaagaagagaaagggaaaccaagaggcgaggagataccaacccaaaagccagaccagtgacaatggatagaatgggctgtgtttccaaacagattgacttgtcaaagactctcttcaagccagcacaagcatttagatcacaacactgtagaaatttgagatgggcaaatggctattgcattttgggattcttcgcattttgtgtgtatatttttacagtgaggtacattgttaaaaactttttgctcaaagaagctttcacattgcaacaccagcttctaaggattttttaaggagggaatatatatgtgtgtgtgtatataagctcccacatagatacatgtaaaacatattcacacccatgcacgcacacacatacacactgaaggccacgattgctggctccacaatttagtaacatttatattaagatatatatatagtggtcactgtgatataataaatcataaaggaaaccaaatcacaaaggagatggtgtggcttagcaaggaaacagtgcaggaaatgtaggttaccaactaagcagcttttgctcttagtactgagggatgaaagttccagagcattatttgaattctgatacatcctgccaacactgtgtgtgtgtgtgtgtgtgtgtgtgtgtgtgtgtgtgtgtgtgaaagagagacagaagggatggtttgagagggtgcttgtgtgcatgtgtgtgcatatgtaaagagatttttgtggtttaagtaactcagaatagctgtagcaaatgactgaatacatgtgaacaaacagaaggaagttcactctggagtgtctttgggaggcagccattccaaatgccctcctccatttagcttcaataaagggccttttgctggtggagggcactcaagggctgggtgagagggccacgtgtttggtattacattactgctatgcaccacttgaaggagctctatcaccagcctcaaacccgaaagactgaggcattttccagtctacttgcctaatgaatgtataggaactgtctatgagtatggatgtcactcaactaagatcaaatcaccatttaaggggatggcattctttatacctaaacacctaagagctgaagtcaggtcttttaatcaggttagaattctaaatgatgccagagaaggcttgggaaattgtacttcagcgtgatagcctgtgtcttcttaatttgctgcaaaatatgtggtagagaaagaaaaggaaacagaaaaatcactctgggttatatagcaagagatgaaggagaatatttcaacacagggtttttgtgttgacataggaaaagcctgattcttggcaactgttgtagtttgtctttcaggggtgaaggtcccactgacaacccctgttgtggtgttccacacgctgtttgttggggtagcttccatcggcagtctggcccattgtcagtcatgcttcttctggccggggagattatagagagattgtttgaagattgggttattattgaaagtctttttttttgtttgttttgttttggtttgtttgtttatctacacttgtttatgctgtgagccaaacctctatttaaaaagttgatactcactttcaatattttatttcatattattatatatgtcatgatagttatcttgatgtaaatatgaagatttttttgtttctgtagatagtaaactctttttttaaaaaaggaaaagggaaacatttttataaagttatattttaatcaccatttttatacattgtagttctctccaagcccagtaagagaatgatgattcatttgcatggaggtcgatggacaaccaatcatctaccttttctaatttaaatgataatctgatatagttttattgccagttaaatgaggatgctgcaaagcatgttttttcactagtaacttttgctaactgaatgaattctgggtccatatctcccagatgaaaaactgttaaccaataccatattttatagttggtgtccatttctttccaacactgtttgttatgattcttccttgagtacttatatacagacctgctcattatctaaacaatcttaccttctaagtaaaccttgattgtgatttccagtttttattttctctgacgtagtagaaaggaatgtttacattaaaaatacttttgtttctcataaatggatattgtactcccccctttcaaagcattat

SEQ ID NO: 65569 - DNA, 5986 bp, Homo sapiens
ccctgcgcccccggctcctccagcgtcagcggctcctgcgcgcgggatgcattgggcaatttttgaaatcctgaagtaggaagagaccccggaggatataagtcgggggtgggggtggagcagagaatctgtgaaagatattcaaagagagaaaaggggaatcctgatcgtttctgcccgtgcttgttttcaacttgagcgtgctagcctttaacttgaagaagtctcattggagcatctagcattctccaggagttattcgaaagctgaaactttcagtggattgtgggcctggggagaagaaggattccgagggtggaattgggaagagcgtgcgtgcgtgtgtgtgtgtgtgtgtgcgcgcgcgcgcgtgggtcggggcgggggcgtcggggggccactgggaattcagtgaagagggcaccctataccatggcagtgcccggcgacgctgcacgagtcaggaacaagcccgtccacagtggggtgagtcaagcccccacggcgggccgggactgccaccatcgtgcggaccccgcatcgccgcgggactcgggctgccgtggctgctggggagacctggtgctgcagccgctccggagctctcggaaactttcctccgcgctgtgcgcgggctccctatcctttctgctggcgctgctggtgaggctggtccgcggggaggtcggctgtgacctggagcagtgtaaggaggcggcggcggcggaggaggaggaagcagccccgggagcagaagggggcgtcttcccggggcctcggggaggtgctcccgggggcggtgcgcggctcagcccctggctgcagccctcggcgctgctcttcagtctcctgtgtgccttcttctggatgggcttgtacctcctgcgcgccggggtgcgcctgcctctggctgtcgcgctgctggccgcctgctgcgggggggaagcgctcgtccagattgggctgggcgtcggggaggatcacttactctcactccccgctgcgggggtggtgctcagctgcttggccgccgcgacatggctggtgctgaggctgaggctgggcgtcctcatgatcgccttgactagcgcggtcaggaccgtgtccctcatttccttagagaggttcaaggtcgcctggagaccttacctggcgtacctggccggcgtgctggggatcctcttggccaggtacgtggaacaaatcttgccgcagtccgcggaggcggctccaagggagcatttggggtcccagctgattgctgggaccaaggaagatatcccggtgtttaagaggaggaggcggtccagctccgtcgtgtccgccgagatgtccggctgcagcagcaagtcccatcggaggacctccctgccctgtataccgagggaacagctcatggggcattcagaatgggaccacaaacgagggccaagaggatcacagtcttcaggaaccagtattactgtggacatcgccgtcatgggcgaagccacggcctcattaccgacctcctggcagacccttctcttccaccaaacgtgtgccacatccttgagagccgtgagcaacttgctcagcacacagctcaccttccaggccattcacaagcccagagtgaatcccgttacttcgctcagtgaaaactatacctgttctgactctgaagagagctctgaaaaagacaagcttgctattccaaagcgcctgagaaggagtttgcctcctggcttgttgagacgagtttcttccacttggaccaccaccacctcggccacaggtctacccaccttggagcctgcaccagtacggagagaccgcagcaccagcatcaaactgcaggaagcaccttcatccagtcctgattcttggaataatccagtgatgatgaccctcaccaaaagcagatcctttacttcatcctatgctatttctgcagctaaccatgtaaaggctaaaaagcaaagtcgaccaggtgccctcgctaaaatttcacctctttcatcgccctgctcctcacctctccaagggactcctgccagcagcctggtcagcaaaatttctgcagtgcagtttccagaatctgctgacacaactgccaaacaaagcctaggttctcacagggccttaacttacactcagagtgccccagacctatcccctcaaatcctgactccacctgttatatgtagcagctgtggcagaccatattcccaagggaatcctgctgatgagcccctggagagaagtggggtagccactcggacaccaagtcgaacagatgacactgctcaagttacctctgattatgaaaccaataacaacagtgacagcagtgacattgtacagaatgaagatgaaacagagtgcctgagagagcctctgaggaaagcatcggcttgcagcacctatgctcctgagaccatgatgtttctggacaaaccaattcttgctcccgaacctcttgtcatggataacctggactcaattatggagcagctaaatacttggaattttccaatttttgatttagtggaaaatataggaagaaaatgtggccgtattcttagtcaggtatcttacagactttttgaagacatgggcctctttgaagcttttaaaattccaattagggaatttatgaattattttcatgctttggagattggatatagggatattccttatcataacagaatccatgccactgatgttttacatgctgtttggtatcttactacacagcctattccaggcctctcaactgtgattaatgatcatggttcaaccagtgattcagattctgacagtggatttacacatggacatatgggatatgtattctcaaaaacgtataatgtgacagatgataaatacggatgtctgtctgggaatatccctgccttggagttgatggcgctgtatgtggctgcagccatgcacgattatgatcatccaggaaggactaatgctttcctggttgcaactagtgctcctcaggcggtgctatataacgatcgttcagttttggagaatcatcacgcagctgctgcatggaatcttttcatgtcccggccagagtataacttcttaattaaccttgaccatgtggaatttaagcatttccgtttccttgtcattgaagcaattttggccactgacctgaagaaacactttgacttcgtagccaaatttaatggcaaggtaaatgatgatgttggaatagattggaccaatgaaaatgatcgtctactggtttgtcaaatgtgtataaagttggctgatatcaatggtccagctaaatgtaaagaactccatcttcagtggacagatggtattgtcaatgaattttatgaacagggtgatgaagaggccagccttggattacccataagccccttcatggatcgttctgctcctcagctggccaaccttcaggaatccttcatctctcacattgtggggcctctgtgcaactcctatgattcagcaggactaatgcctggaaaatgggtggaagacagcgatgagtcaggagatactgatgacccagaagaagaggaggaagaagcaccagcaccaaatgaagaggaaacctgtgaaaataatgaatctccaaaaaagaagactttcaaaaggagaaaaatctactgccaaataactcagcacctcttacagaaccacaagatgtggaagaaagtcattgaagaggagcaacggttggcaggcatagaaaatcaatccctggaccagacccctcagtcgcactcttcagaacagatccaggctatcaaggaagaagaagaagagaaagggaaaccaagaggcgaggagataccaacccaaaagccagaccagtgacaatggatagaatgggctgtgtttccaaacagattgacttgtcaaagactctcttcaagccagcacaagcatttagatcacaacactgtagaaatttgagatgggcaaatggctattgcattttgggattcttcgcattttgtgtgtatatttttacagtgaggtacattgttaaaaactttttgctcaaagaagctttcacattgcaacaccagcttctaaggattttttaaggagggaatatatatgtgtgtgtgtatataagctcccacatagatacatgtaaaacatattcacacccatgcacgcacacacatacacactgaaggccacgattgctggctccacaatttagtaacatttatattaagatatatatatagtggtcactgtgatataataaatcataaaggaaaccaaatcacaaaggagatggtgtggcttagcaaggaaacagtgcaggaaatgtaggttaccaactaagcagcttttgctcttagtactgagggatgaaagttccagagcattatttgaattctgatacatcctgccaacactgtgtgtgtgtgtgtgtgtgtgtgtgtgtgtgtgtgtgtgtgtgaaagagagacagaagggatggtttgagagggtgcttgtgtgcatgtgtgtgcatatgtaaagagatttttgtggtttaagtaactcagaatagctgtagcaaatgactgaatacatgtgaacaaacagaaggaagttcactctggagtgtctttgggaggcagccattccaaatgccctcctccatttagcttcaataaagggccttttgctggtggagggcactcaagggctgggtgagagggccacgtgtttggtattacattactgctatgcaccacttgaaggagctctatcaccagcctcaaacccgaaagactgaggcattttccagtctacttgcctaatgatgagtatggatgtcactcaactaagatcaaatcaccatttaaggggatggcattctttatacctaaacacctaagagctgaagtcaggtcttttaatcaggttagaattctaaatgatgccagagaaggcttgggaaattgtacttcagcgtgatagcctgtgtcttcttaatttgctgcaaaatatgtggtagagaaagaaaaggaaacagaaaaatcactctgggttatatagcaagagatgaaggagaatatttcaacacagggtttttgtgttgacataggaaaagcctgattcttggcaactgttgtagtttgtctttcaggggtgaaggtcccactgacaacccctgttgtggtgttccacacgctgtttgttggggtagcttccatcggcagtctggcccattgtcagtcatgcttcttctggccggggagattatagagagattgtttgaagattgggttattattgaaagtctttttttttgtttgttttgttttggtttgtttgtttatctacacttgtttatgctgtgagccaaacctctatttaaaaagttgatactcactttcaatattttatttcatattattatatatgtcatgatagttatcttgatgtaaatatgaagatttttttgtttctgtagatagtaaactctttttttaaaaaaggaaaagggaaacatttttataaagttatattttaatcaccatttttatacattgtagttctctccaagcccagtaagagaatgatgattcatttgcatggaggtcgatggacaaccaatcatctaccttttctaatttaaatgataatctgatatagttttattgccagttaaatgaggatgctgcaaagcatgttttttcactagtaacttttgctaactgaatgaattctgggtccatatctcccagatgaaaaactgttaaccaataccatattttatagttggtgtccatttctttccaacactgtttgttatgattcttccttgagtacttatatacagacctgctcattatctaaacaatcttaccttctaagtaaaccttgattgtgatttccagtttttattttctctgacgtagtagaaaggaatgtttacattaaaaatacttttgtttctcataaatggatattgtactcccccctttcaaagcattat

SEQ ID NO: 65570 - DNA, 808 bp, Homo sapiens
ctaggtgaggctgggtgggatcggccgaggaactttgcctgtaggaggactgatctcttaatgaaatacagaaaaaccatctcagaaaaaggaaaatgggcaatcgtcatagccagtcgtacaccctctcagaaggcagtcaacagttgcctaaaggggactcccaaccctcgacagtcgtgcagcctctcagccacccatcacggaatggagagccagaggccccacagcctgctaaagcgagcagtcctcagggttttgatgtggatcgagatgccaaaaagctgaacaaagcctgcaaaggaatggggaccaatgaagcagccatcattgaaatcttatcgggcaggacatcagatgagaggcaacaaatcaagcaaaagtacaaggcaacgtacggcaaggagctggaggaagtactcaagagtgagctgagtggaaacttcgagaagacagcgttggcccttctggaccgtcccagcgagtacgccgcccggcagctgcagaaggctatgaagggtctgggcacagatgagtccgtcctcattgaggtcctgtgcacgaggaccaataaggaaatcatcgccattaaagaggcctaccaaaggctatttgataggagcctcgaatcagatgtcaaaggtgatacaagtggaaacctaaaaaaaatcctggtgtctctgctgcaggctaatcgcatgaagggatgccgtggccaagatcagcctggtcggtgccccatctgtttaatccgggaaggccgtgggcagataaactcggtcagagtcggccaaggtccaggtagagc

SEQ ID NO: 65571 - DNA, 363 bp, Homo sapiens
tttctttgcaaaaaaattaaagaatgtgagacatcatggtccatttctattcttcccttttaagttaccacagcaatttgcccttggtgactggaggccttgctttagtcagcacctgtgtgccgtttaccaccagaggcttggccttctccacactttttaaagagacccgttgacagaatcgttacaaccattcagccaggtttgtggacccttggcacattcgtccttggcactgctgacatttgggaccaggctaaagcgagcagtcctcagggttttgatgtggatcgagatgccaaaaagctgaacaaagcctgcaaaggaatggggcctatgaaccgccatcattgaatctcccct

SEQ ID NO: 65572 - DNA, 1500 bp, Homo sapiens
ctaggtgaggctgggtgggatcggccgaggaactttgcctgtaggaggactgatctcttaatgaaatacagaaaaaccatctcagaaaaaggaaaatgggcaatcgtcatgctaaagcgagcagtcctcagggttttgatgtggatcgagatgccaaaaagctgaacaaagcctgcaaaggaatggggaccaatgaagcagccatcattgaaatcttatcgggcaggacatcagatgagaggcaacaaatcaagcaaaagtacaaggcaacgtacggcaaggagctggaggaagtactcaagagtgagctgagtggaaacttcgagaagacagcgttggcccttctggaccgtcccagcgagtacgccgcccggcagctgcagaaggctatgaagggtctgggcacagatgagtccgtcctcattgaggtcctgtgcacgaggaccaataaggaaatcatcgccattaaagaggcctaccaaaggctatttgataggagcctcgaatcagatgtcaaaggtgatacaagtggaaacctaaaaaaaatcctggtgtctctgctgcaggctaatcgcaatgaaggagatgacgtggacaaagatctagctggtcaggatgccaaagatctgtatgatgcaggggaaggccgctggggcactgatgagcttgcgttcaatgaagtcctggccaagaggagctacaagcagttacgagccacctttcaagcctatcaaattctcattggcaaagacatagaagaagccattgaagaagaaacatcaggcgacttgcagaaggcctatttaactctcgtgagatgtgcccaggattgtgaggactattttgctgaacgtctgtacaagtcgatgaagggtgcggggaccgatgaggagacgttgattcgcatagtcgtgaccagggccgaggtggaccttcaggggatcaaagcaaagttccaagagaagtatcagaagtctctctctgacatggttcgctcagatacctccggggacttccggaaactgctagtagccctcttgcactgagccaagccagggcaataggaacacagggtggaaccacctttgtcaagagcacattccaaatcaaacttgcaaatgagactcccgcacgaaaacccttaagagtcccggattactttcttggcagcttaagtggcgcagccaggccaagctgtgtaagttaagggcagtaacgttaagatgcgtgggcagggcaccttgaactctggcttagcaagcatctaggctgcctcttcactttcttttagcatggtaactggatgttttctaaacactaatgaaatcagcagttgatgaaaaaactatgcatttgtaatggcacatttagaaggatatgcatcacacaagtaaggtacaggaaagacaaaattaaacaatttattaattttccttctgtgtgttcaatttgaaagcctcattgttaattaaagttgtggattatgcctctatcagctgc

SEQ ID NO: 65573 - DNA, 624 bp, Homo sapiens
tcagctcggtaccccacctgtgtgtcttcgcatagtcgtgacaggccgaggtggaccttcaggggatcaaagcaaagttccaagagaagtatcagaagtctctctctgacatggttcgctcagatacctccggggacttccggaaactgctagtagccctcttgcactgagccaagccagggcaataggaacacagggtggaaccacctttgtcaagagcacattccaaatcaaacttgcaaatgagactcccgcacgaaaacccttaagagtcccggattactttcttggcagcttaagtggcgcagccaggccaagctgtgtaagttaagggcagtaacgttaagatgcgtgggcagggcaccttgaactctggcttagcaagcatctaggctgcctcttcactttcttttagcatggtaactggatgttttctaaacactaatgaaatcagcagttgatgaaaaaactatgcatttgtaatggcacatttagaaggatatgcatcacacaagtaaggtacaggaaagacaaaattaaacaatttattaattttccttctgtgtgttcaatttgaaagcctcattgttaattaaagttgtggattatgcctctatcagctgc

SEQ ID NO: 65574 - DNA, 854 bp, Homo sapiens
ccacaaaacgtgaaagccctacattctctttttctttgtcctgcccagtgagatgtgcccaggattgtgaggactattttgctgaacgtctgtacaagtcgatgaagggtgcggggaccgatgaggagacgttgattcgcatagtcgtgaccagggccgaggtaagacacactccgactccaaagaggcggctgcaacttcttttttttccaccactgatgtcatcaacaaatagtttctattaagggcctatttacagaaaaagtaaaacagagacggccccttgccttcccagaatttgcagaagacattgtgctctgcttcaatctgtttctttttataaaaatacaataatgatcgttgcttctttttttgtcctctgtggctctggaaagctagtggaggggcgcagaggcaaccatgtcgagcagttctcaggggctgcagctatgcatggctccatgttaaggaagacaaaacaaacacacttaaaaaaggtcaaccagcagcaggaacaaaaagagaatgatttctgaattcctgagtgaggcctttccttaactgaacacactgcagaagcaagcacatcagcataaggcaatggttctcaatctttttaaaaactattgctgttctaaggaacctttttagacacgtgtttcttcattgccatcccttccccacaagaaatgttaacaccagagataatactacaaatctgtttatataccatgtggatatcagtgctttatacataaaaaaattaagggctttttcaccccctaaaaaccaatttgtgcttgctctcggagaatgtgtatgtataagaaagaaaagggagaggaagagccaac

SEQ ID NO: 65575 - DNA, 1616 bp, Homo sapiens
tgtccggggggaaaactgttgtaaactttgcctgtaggaggactgatctcttaatgaaatacagaaaaaccatctcagaaaaaggaaaatgggcaatcgtcatagccagtcgtacaccctctcagaaggcagtcaacagttgcctaaaggggactcccaaccctcgacagtcgtgcagcctctcagccacccatcacggaatggagagccagaggccccacagcctgctaaagcgagcagtcctcagggttttgatgtggatcgagatgccaaaaagctgaacaaagcctgcaaaggaatggggaccaatgaagcagccatcattgaaatcttatcgggcaggacatcagatgagaggcaacaaatcaagcaaaagtacaaggcaacgtacggcaaggagctggaggaagtactcaagagtgagctgagtggaaacttcgagaagacagcgttggcccttctggaccgtcccagcgagtacgccgcccggcagctgcagaaggctatgaagggtctgggcacagatgagtccgtcctcattgaggtcctgtgcacgaggaccaataaggaaatcatcgccattaaagaggcctaccaaaggctatttgataggagcctcgaatcagatgtcaaaggtgatacaagtggaaacctaaaaaaaatcctggtgtctctgctgcaggctaatcgcaatgaaggagatgacgtggacaaagatctagctggtcaggatgccaaagatctgtatgatgcaggggaaggccgctggggcactgatgagcttgcgttcaatgaagtcctggccaagaggagctacaagcagttacgagccacctttcaagcctatcaaattctcattggcaaagacatagaagaagccattgaagaagaaacatcaggcgacttgcagaaggcctatttaactctcgtgagatgtgcccaggattgtgaggactattttgctgaacgtctgtacaagtcgatgaagggtgcggggaccgatgaggagacgttgattcgcatagtcgtgaccagggccgaggtggaccttcaggggatcaaagcaaagttccaagagaagtatcagaagtctctctctgacatggttcgctcagatacctccggggacttccggaaactgctagtagccctcttgcactgagccaagccagggcaataggaacacagggtggaaccacctttgtcaagagcacattccaaatcaaacttgcaaatgagactcccgcacgaaaacccttaagagtcccggattactttcttggcagcttaagtggcgcagccaggccaagctgtgtaagttaagggcagtaacgttaagatgcgtgggcagggcaccttgaactctggcttagcaagcatctaggctgcctcttcactttcttttagcatggtaactggatgttttctaaacactaatgaaatcagcagttgatgaaaaaactatgcatttgtaatggcacatttagaaggatatgcatcacacaagtaaggtacaggaaagacaaaattaaacaatttattaattttccttctgtgtgttcaatttgaaagcctcattgttaattaaagttgtggattatgcctctatcagctgc

SEQ ID NO: 65576 - DNA, 461 bp, Homo sapiens
cccatctctacaaaaaaaaaatacaaaaagaaaatatgcaatactaagtaaactgtgccaagtatatcacatcttttacattagataaggtgatagcctggagtgataggaaaggaatctccgttaggtgtgctgagagatggggagtttcgccttttccttcagtaccagctacagaattctattaatatgcatagaggaatggtgtggtccagtgaagaaattttatattcttggtcagctcatcagctgccacctttcatgcttaatattgaactgctgtcattttctgaagcttttaaaaatcatttatgcttcctcagctctgaagcacagcaaagttaaatatcaggcataatgtccatagcaaacggcacttggaacaaaatagcaagtatgctttggtgactcagagctgatcggaaatctactgaaattttgtctctcagatttgtcaagtt

SEQ ID NO: 65577 - DNA, 2055 bp, Homo sapiens
  misc_feature (925)..(925): n is a, c, g, or t
acctctgggcagagaaacaaagctctatatgcacagcccagcaaagagcagcacacagctgaaagaaaaactcagaagacagagctgaaaaagaaaactggtgatggatctcattccaaactttgccatggaaacatgggttcttgtggctaccagcctggtactcctctatatttatgggacccattcacataaactttttaagaagctgggaattcctgggccaacccctctgccttttctgggaactattttgttctaccttaggggtctttggaattttgacagagaatgtaatgaaaaatacggagaaatgtggggcctttaggtccaatgggatttctgaaaagtgccttaagttttgctgaagatgaagaatggaagagaatacgaacattgctatctccagctttcaccagtgtaaaattcaaggaagtaagaaaataaggtgatttataattagaaacttaaaggatgaatctggagacaggtagtaagtatcatcatagttcctttctaatgggtagtccactgagtttgagctttctaaaaagggtcttttcagctgggcacagtggctcatgcctgtaatcccagcactttgggaggccgaggtgggtggatcacctgaggttaggagattgagaccagcctggccaacatggtgaaaccccaactctactaaaaatacaaaaattagctgggcatggtggcggatgcctataatcctagctgctcagaaggctaaggcagaagaattgtttgaatctagaggcggaggttgcaatgagccaagattgcgccgttgcactccagcctgggcaacaagagcgaaactctgtctcaaaaaaaaggggcagggggcggtcttttctatttatgtcctagaggacatggtgagtcattacaaaatatcatttactgntccatgctgggcaaagccatgtccttctgagactcgagtctgcgtagttaactatgggtggtgttgtgttttagatggtccccatcatttcccaatgtggagatatgttggtgagaagcctgaggcaggaagcagagaacagcaagtccatcaacttgaaagatttctttggggcctacaccatggatgtaatcactggcacattatttggagtgaacttggattctctcaacaatccacaagatccctttctgaaaaatatgaagaagcttttaaaattggattttttggatccctttttactcttaatatcatcgagtagatttctttcaacagatgatcgactcccagaattccaaagaaacaaagtcccataaagctctgtctgatctggagcttgtggcccagtcaattatcatcatttttgctgcctatgacacaactagcaccactctccccttcattatgtatgaactggccactcaccctgatgtccagcagaaactgcaggaggagattgacgcagttttacccaataaggcacctgtcacctacgatgccctggtacagatggagtaccttgacatggtggtgaatgaaacgctcagattattcccagttgttagtagagttacgagagtctgcaagaaagatattgaaatcaatggagtgttcattcccaaagggttagcagtgatggttccaatctatgctcttcaccatgacccaaagtactggacagagcctgagaagttctgccctgaaaggttcagtaagaagaacaaggacagcatagatctttacagatacataccttttggagctggaccccgaaactgcattggcatgaggtttgctctcacaaacataaaacttgctgtcattagagcactgcagaacttctccttcaaaccttgtaaagagactcagatcccactgaaattagacaatctaccaattcttcaaccagaaaaacctattgttctaaaagtgcacttaagagatgggattacaagtggaccctgactttccctaaggacttccactttgttcaagaaagctgtatcccagaacactagacacttcaaattgttttgtgaataaaactcagaaatgaagatgagcttaaa

SEQ ID NO: 65578 - DNA, 1556 bp, Homo sapiens
acctctgggcagagaaacaaagctctatatgcacagcccagcaaagagcagcacacagctgaaagaaaaactcagaagacagagctgaaaaagaaaactggtgatggatctcattccaaactttgccatggaaacatgggttcttgtggctaccagcctggtactcctctatatttatgggacccattcacataaactttttaagaagctgggaattcctgggccaacccctctgccttttctgggaactattttgttctaccttaggggtctttggaattttgacagagaatgtaatgaaaaatacggagaaatgtgggggctgtatgaggggcaacagcccatgctggtcatcatggatcccgacatgatcaaaacagtgttagtgaaagaatgttactctgtcttcacaaaccagatgcctttaggtccaatgggatttctgaaaagtgccttaagttttgctgaagatgaagaatggaagagaatacgaacattgctatctccagctttcaccagtgtaaaattcaaggaaatggtccccatcatttcccaatgtggagatatgttggtgagaagcctgaggcaggaagcagagaacagcaagtccatcaacttgaaagatttctttggggcctacaccatggatgtaatcactggcacattatttggagtgaacttggattctctcaacaatccacaagatccctttctgaaaaatatgaagaagcttttaaaattggattttttggatccctttttactcttaatatcactctttccatttcttaccccagtttttgaagccctaaatatcggtttgtttccaaaagatgttacccattttttaaaaaattccattgaaaggatgaaagaaagtcgcctcaaagataaacaaaagcatcgagtagatttctttcaacagatgatcgactcccagaattccaaagaaacaaagtcccataaagctctgtctgatctggagcttgtggcccagtcaattatcatcatttttgctgcctatgacacaactagcaccactctccccttcattatgtatgaactggccactcaccctgatgtccagcagaaactgcaggaggagattgacgcagttttacccaataaggcacctgtcacctacgatgccctggtacagatggagtaccttgacatggtggtgaatgaaacgctcagattattcccagttgttagtagagttacgagagtctgcaagaaagatattgaaatcaatggagtgttcattcccaaagggttagcagtgatggttccaatctatgctcttcaccatgacccaaagtactggacagagcctgagaagttctgccctgaaagatcccactgaaattagacaatctaccaattcttcaaccagaaaaacctattgttctaaaagtgcacttaagagatgggattacaagtggaccctgactttccctaaggacttccactttgttcaagaaagctgtatcccagaacactagacacttcaaattgttttgtgaataaaactcagaaatgaagatgagcttaaa

SEQ ID NO: 65579 - DNA, 1049 bp, Homo sapiens
gaaccctgaagtctataggtagagaaaattgtaattgttgtaggtaaatttcacatttttcactatgatttattttttctttttctatttaattttcctatagcactctttccatttcttaccccagtttttgaagccctaaatatcggtttgtttccaaaagatgttacccattttttaaaaaattccattgaaaggatgaaagaaagtcgcctcaaagataaacaaaagcatcgagtagatttctttcaacagatgatcgactcccagaattccaaagaaacaaagtcccataaagctctgtctgatctggagcttgtggcccagtcaattatcatcatttttgctgcctatgacacaactagcaccactctccccttcattatgtatgaactggccactcaccctgatgtccagcagaaactgcaggaggagattgacgcagttttacccaataaggcacctgtcacctacgatgccctggtacagatggagtaccttgacatggtggtgaatgaaacgctcagattattcccagttgttagtagagttacgagagtctgcaagaaagatattgaaatcaatggagtgttcattcccaaagggttagcagtgatggttccaatctatgctcttcaccatgacccaaagtactggacagagcctgagaagttctgccctgaaaggttcagtaagaagaacaaggacagcatagatctttacagatacataccttttggagctggaccccgaaactgcattggcatgaggtttgctctcacaaacataaaacttgctgtcattagagcactgcagaacttctccttcaaaccttgtaaagagactcagatcccactgaaattagacaatctaccaattcttcaaccagaaaaacctattgttctaaaagtgcacttaagagatgggattacaagtggaccctgactttccctaaggacttccactttgttcaagaaagctgtatcccagaacactagacacttcaaattgttttgtgaataaaactcagaaatgaagatgagcttaaa

SEQ ID NO: 65580 - DNA, 1719 bp, Homo sapiens
acctctgggcagagaaacaaagctctatatgcacagcccagcaaagagcagcacacagctgaaagaaaaactcagaagacagagctgaaaaagaaaactggtgatggatctcattccaaactttgccatggaaacatgggttcttgtggctaccagcctggtactcctctatatttatgggacccattcacataaactttttaagaagctgggaattcctgggccaacccctctgccttttctgggaactattttgttctaccttaggggtctttggaattttgacagagaatgtaatgaaaaatacggagaaatgtgggggctgtatgaggggcaacagcccatgctggtcatcatggatcccgacatgatcaaaacagtgttagtgaaagaatgttactctgtcttcacaaaccagatgcctttaggtccaatgggatttctgaaaagtgccttaagttttgctgaagatgaagaatggaagagaatacgaacattgctatctccagctttcaccagtgtaaaattcaaggaaatggtccccatcatttcccaatgtggagatatgttggtgagaagcctgaggcaggaagcagagaacagcaagtccatcaacttgaaagatttctttggggcctacaccatggatgtaatcactggcacattatttggagtgaacttggattctctcaacaatccacaagatccctttctgaaaaatatgaagaagcttttaaaattggattttttggatccctttttactcttaatatcactctttccatttcttaccccagtttttgaagccctaaatatcggtttgtttccaaaagatgttacccattttttaaaaaattccattgaaaggatgaaagaaagtcgcctcaaagataaacaaaagcatcgagtagatttctttcaacagatgatcgactcccagaattccaaagaaacaaagtcccataaagctctgtctgatctggagcttgtggcccagtcaattatcatcatttttgctgcctatgacacaactagcaccactctccccttcattatgtatgaactggccactcaccctgatgtccagcagaaactgcaggaggagattgacgcagttttacccaataaggcacctgtcacctacgatgccctggtacagatggagtaccttgacatggtggtgaatgaaacgctcagattattcccagttgttagtagagttacgagagtctgcaagaaagatattgaaatcaatggagtgttcattcccaaagggttagcagtgatggttccaatctatgctcttcaccatgacccaaagtactggacagagcctgagaagttctgccctgaaaggttcagtaagaagaacaaggacagcatagatctttacagatacataccttttggagctggaccccgaaactgcattggcatgaggtttgctctcacaaacataaaacttgctgtcattagagcactgcagaacttctccttcaaaccttgtaaagagactcagatcccactgaaattagacaatctaccaattcttcaaccagaaaaacctattgttctaaaagtgcacttaagagatgggattacaagtggaccctgactttccctaaggacttccactttgttcaagaaagctgtatcccagaacactagacacttcaaattgttttgtgaataaaactcagaaatgaagatgagcttaaa

SEQ ID NO: 65581 - DNA, 1840 bp, Homo sapiens
acctctgggcagagaaacaaagctctatatgcacagcccagcaaagagcagcacacagctgaaagaaaaactcagaagacagagctgaaaaagaaaactggtgatggatctcattccaaactttgccatggaaacatgggttcttgtggctaccagcctggtactcctctatatttatgggacccattcacataaactttttaagaagctgggaattcctgggccaacccctctgccttttctgggaactattttgttctaccttaggggtctttggaattttgacagagaatgtaatgaaaaatacggagaaatgtgggggctgtatgaggggcaacagcccatgctggtcatcatggatcccgacatgatcaaaacagtgttagtgaaagaatgttactctgtcttcacaaaccagatgcctttaggtccaatgggatttctgaaaagtgccttaagttttgctgaagatgaagaatggaagagaatacgaacattgctatctccagctttcaccagtgtaaaattcaaggaaatggtccccatcatttcccaatgtggagatatgttggtgagaagcctgaggcaggaagcagagaacagcaagtccatcaacttgaaagatttctttggggcctacaccatggatgtaatcactggcacattatttggagtgaacttggattctctcaacaatccacaagatccctttctgaaaaatatgaagaagcttttaaaattggattttttggatccctttttactcttaatatacagagtctcgctgtgttgcctaggccggagtgcatggtgcgatctgggctcactgaaacctccacctcctgggttcgagtgattctcctgcctcagcctcctgaggagctgggattacagcactctttccatttcttaccccagtttttgaagccctaaatatcggtttgtttccaaaagatgttacccattttttaaaaaattccattgaaaggatgaaagaaagtcgcctcaaagataaacaaaagcatcgagtagatttctttcaacagatgatcgactcccagaattccaaagaaacaaagtcccataaagctctgtctgatctggagcttgtggcccagtcaattatcatcatttttgctgcctatgacacaactagcaccactctccccttcattatgtatgaactggccactcaccctgatgtccagcagaaactgcaggaggagattgacgcagttttacccaataaggcacctgtcacctacgatgccctggtacagatggagtaccttgacatggtggtgaatgaaacgctcagattattcccagttgttagtagagttacgagagtctgcaagaaagatattgaaatcaatggagtgttcattcccaaagggttagcagtgatggttccaatctatgctcttcaccatgacccaaagtactggacagagcctgagaagttctgccctgaaaggttcagtaagaagaacaaggacagcatagatctttacagatacataccttttggagctggaccccgaaactgcattggcatgaggtttgctctcacaaacataaaacttgctgtcattagagcactgcagaacttctccttcaaaccttgtaaagagactcagatcccactgaaattagacaatctaccaattcttcaaccagaaaaacctattgttctaaaagtgcacttaagagatgggattacaagtggaccctgactttccctaaggacttccactttgttcaagaaagctgtatcccagaacactagacacttcaaattgttttgtgaataaaactcagaaatgaagatgagcttaaa

SEQ ID NO: 65582 - DNA, 1416 bp, Homo sapiens
acctctgggcagagaaacaaagctctatatgcacagcccagcaaagagcagcacacagctgaaagaaaaactcagaagacagagctgaaaaagaaaactggtgatggatctcattccaaactttgccatggaaacatgggttcttgtggctaccagcctggtactcctctatatttatgggacccattcacataaactttttaagaagctgggaattcctgggccaacccctctgccttttctgggaactattttgttctaccttaggggtctttggaattttgacagagaatgtaatgaaaaatacggagaaatgtggggtttctttggggcctacaccatggatgtaatcactggcacattatttggagtgaacttggattctctcaacaatccacaagatccctttctgaaaaatatgaagaagcttttaaaattggattttttggatccctttttactcttaatatcactctttccatttcttaccccagtttttgaagccctaaatatcggtttgtttccaaaagatgttacccattttttaaaaaattccattgaaaggatgaaagaaagtcgcctcaaagataaacaaaagcatcgagtagatttctttcaacagatgatcgactcccagaattccaaagaaacaaagtcccataaagctctgtctgatctggagcttgtggcccagtcaattatcatcatttttgctgcctatgacacaactagcaccactctccccttcattatgtatgaactggccactcaccctgatgtccagcagaaactgcaggaggagattgacgcagttttacccaataaggcacctgtcacctacgatgccctggtacagatggagtaccttgacatggtggtgaatgaaacgctcagattattcccagttgttagtagagttacgagagtctgcaagaaagatattgaaatcaatggagtgttcattcccaaagggttagcagtgatggttccaatctatgctcttcaccatgacccaaagtactggacagagcctgagaagttctgccctgaaaggttcagtaagaagaacaaggacagcatagatctttacagatacataccttttggagctggaccccgaaactgcattggcatgaggtttgctctcacaaacataaaacttgctgtcattagagcactgcagaacttctccttcaaaccttgtaaagagactcagatcccactgaaattagacaatctaccaattcttcaaccagaaaaacctattgttctaaaagtgcacttaagagatgggattacaagtggaccctgactttccctaaggacttccactttgttcaagaaagctgtatcccagaacactagacacttcaaattgttttgtgaataaaactcagaaatgaagatgagcttaaa

SEQ ID NO: 65583 - DNA, 384 bp, Homo sapiens
gacagcctcatgacctaattcctcccaaaggttccacttcctattaccatcgccttgaggatttggttttcaacatgtgaatcttgtcggggacacagatatccagaccataacagtgctgtaggctaagtctcatttgttttaagttgtgtgtgctcagtgcatgtatttatttacatatctagtaaacacagacaccgcagaacctcattacttggcatcatttggagatgaaggttctggagaagtgaatatttttgtgcttcatttatttctgaatcttaataccaccagagtttgatgaaaatcctctaaagtatattacatgcttccctgccttttaacacggaatttaggaaaatacaggttttcttgatggcttaa

SEQ ID NO: 65584 - DNA, 452 bp, Homo sapiens
  misc_feature (448)..(448): n is a, c, g, or t
  misc_feature (450)..(451): n is a, c, g, or t
tagtaatagcaacttcttcatgggttgtttgaagaatttattgacacaactcacataaagcacttaggatggaaactggtgtcttagcatggaaccttagcatggaacctggtatcttagcatggaaccttagcatggaacctggtatcttagcatggaacctggtgtcttagcatggaaccttagcatggaacctggtgccttagcatggaacctggtatcttagtatggaaacttagcatggaacctagtgccttagcatggaatcttatcatggaacctggtgtcttagcatggaatcttatcatggaacctggtgccttagcatggaaccttagcatggaaccctagcctggaacccggtgccttagcatggaatcttagcataaaacctggtgccttagcatgaagactggtgtctaattgcttaataaatgataaccactananna

SEQ ID NO: 65585 - DNA, 585 bp, Homo sapiens
acctagaaattctctcttaggagctgatcaaaatcaaactaagaaattttttacacatgtgagtcttggggacttcagggtcattcaaggcagaatcaggccataaatagtaatgccagagatgacaggatgtgtagagggacaggggaaaaatcttacagtgaaagaagagtaggggagtcttgaagtataagtcctttgggggtcagaggactttagagaagctgatgttgtaaaagaaaacagacttgtcacctctggcaaagcctcaacatatgggtatgtatccgtcagggttcagccagagaagcagaacaactggaagataattagaattatcagcctgtgccacccccatcatgtgtctctaaagaccccagactcagtcagtagaggggagatggcctgactttggggaggagacagcctgacttcagggaagaaatggcctgacttcgggacaaagacctcctgacttcaggggaagacaacgagcggcccttcccatcccctctccaactcccctctccgctgagagctgttttcatcactcaataaaattctctgcccccaccgtccttcaat

SEQ ID NO: 65586 - DNA, 349 bp, Homo sapiens
acctagaaattctctcttaggagctgatcaaaatcaaactaagaaattttttacacatggttcagccagagaagcagaacaactggaagataattagaattatcagcctgtgccacccccatcatgtgtctctaaagaccccagactcagtcagtagaggggagatggcctgactttggggaggagacagcctgacttcagggaagaaatggcctgacttcgggacaaagacctcctgacttcaggggaagacaacgagcggcccttcccatcccctctccaactcccctctccgctgagagctgttttcatcactcaataaaattctctgcccccaccgtccttcaat

SEQ ID NO: 65587 - DNA, 301 bp, Homo sapiens
ggaggcagaagttgcagtgagccgagatcatgccactgcactccagcctaggcgacagagcaagactctgtctcaaaaaataaacaaagacttaggccaataaaggtgaaactctggtaacattctctcttattcaaagctgaatcactgtcaggacagataaggatgaaaaattatgtactggaaatgtacgggagatcagcttctggaaaggagtttttaagaaaggaaacagtaatttaaaattgtcaaagacaactgtttagccaggtattttatacagataaaggggaatgaattc

SEQ ID NO: 65588 - DNA, 383 bp, Homo sapiens
acccgtgaaagccctgaattgatgtggttatgaaagcgcattggccaagctggctttccttcctctgacccccatctaactatggtgaacgccctcgttgggatgaggctcccaggctcctgatagcaggtagaggagagaacgagaccgcaaagagggaagccgagaggagtgatgaagaccctggccctaccatctactcaggctgtctttgcagccacactgtgagcccaggctggttaacgcttcctcctggaggagaaaagctaagagagaaaacaaaatccatgcagcgcgctccccctcggcccctcctctctgtctcctctgtgcgctaacctccaatgcctgcgggaaccaattacagtattctaatgagtgta

SEQ ID NO: 65589 - DNA, 435 bp, Homo sapiens
ggctaaagtgatctgcctgcctgccttggccttccgaagtgctggattacaggcataagccaccacgcctggcctgcattcttaacctctacattatactgcttctcaaaagtactaccaattatttttcttattctatttcttatttcctgaaatgagaattatttactttttacacatgctatgttttcaatagtcatcactactagtaattgattaaataaaattaagtccttttcaatttcaagattaagaaatggatagtttgtaacataactttaagggttgactaattagtaacaaatgcctgatgaatacatttgaagcaacactaaaatttgacttatagtttactttaccttttaaaacaaaagcatctaatagaaaaagcaggcaaaagactatacagcattacttgctaatgttaaatgtata

SEQ ID NO: 65590 - DNA, 317 bp, Homo sapiens
ggttggtgaatgatgcagtggagttggcacttgattaaatgtaatgaacatagtattgaaggctacagggttgatgactgttttgcctttgatcactgaaatgtggagaagcaaccttgacagagaacgtaaatacaatctatggattcaatttactcaacctgttgagtatcaaagtgcctaatctgtgggagtagagaggagacagtccaaatgctatagcttgaatgattttattatcaaaagcatcaagtttaaaaattcattaacttaaccctggtctatctatcacagttattaatttcctatccttggaa

SEQ ID NO: 65591 - DNA, 1568 bp, Homo sapiens
  misc_feature (932)..(933): n is a, c, g, or t
  misc_feature (1416)..(1416): n is a, c, g, or t
ctagaactcagaatcgaagtgtccactgtcatatgtcacatagtagacattagatagtagtaattgttaaactcttggagaacattgtagaattttaaaagctaaatgagaagttgatatgttatccagtgactgttactcaagttctgactataatggagtgaattttaaaaattaacagtttaaaaaaatagaaaaaaggaaatgtaacagaaaactgcagtattttaaaatatttctttatactgaagagatcagtgttagaagtgaggcctaaattatatgaagcagcaagtctgtctgattctgggcataattgccgaaagcaattcagaagaatcttcagattttgaatgtgaagaaagctttgacttaatgtttgtttatgatactaggggaaaatgatgaataaatgtatgcaattgtaggtgaataaaaagtatgcttttaaattatctattcattttggtaatgcttttgttaaatggaaggtggcacttacaactaaaggtttcttagaattgggggaatatggtatacttctctgagtgttatcaagttcaaatgttacaattcatatgaaagagcttagtacgataatggggaaaataatagtaacattgattataaaggcaacaaacttaatgattaagagtgaaagtcctggaatcagacttcttggattttaatcctgttaccaacacttaactaggtgtgtaactttgagtcagttactcagttaatgtcttattttcctcatttgttaaatgggtataatagtatgtgcctcaggttaaatgggcttaatgtgtaagtgcctagactagtacttggagtataggaaatgcttaatgagattcaatgtatgttatttgttatgaagctgtgaaacactgtgtatatgattttaaaatgtgctatttaaattcatnntttacagtttaacttgccattttaaaaagcaacatttgattactgattgaaaaaattttttggtctcatttgtgcagagcttatatttttctccttgcctaagctgttcttcatttgtttgtataaatattggcatgtttatttaccttggactagtccatgtcacctttcactaatcaaagctgttatttctgggttattaatcatcccacccaattgggtggcagcagtaaaccctgagggcttgccatctctcccactttataagttattactgtcattattgtttaaataattaaggagaggtttttttttgccaaattctttgctgtttggaaataaggaatggaacaagtaataaatatgctgaaaatatatgttttcttagttcactttaagaaattgatttatttaggaaatggtgtttgttttaaattacacttgatttttttgaaaaatttgtatgggcatatttcttaaaangttaggtctatagtataaaaagaattaaaacaccaaagatttctattgatttatattctttggttattcttttatatttcttgactggtattctgtatggttcccaaaaccagtcaagaactgtaaaactcttactctacatacttgccagc

SEQ ID NO: 65592 - DNA, 319 bp, Homo sapiens
ggtggatggttcagaaacgtcctgccctccaaccactttgtcagctctggaaacgcaaggcagaaagaatttcaaggccagactcccggagccctgagggccagctcttgcaacagacccaccaatgcagcacatctggacaaacacagcagcccaccatgtgctctccaccagcatctcacttctgcctcaccagagccttgaccctggggatactgtccctattttgcagacacagaaatggatgttactcagctgggaaggagaggaccccggacttaaccccagatgtcttagctccaaatccactctgcctcag

SEQ ID NO: 65593 - DNA, 435 bp, Homo sapiens
atatcagctttagcggtcgacaaagatttgaaattactggttcgaactgaacagtcctagcccagtgacgcaaatgacccaaggataaggttttcataggtttggcctgaacatacgcatttcctcctcctactcagtggttttaggtgagacagtctgagggtcttgaccggcacacccgttagggagagatgaagtaaaagagtttcacgctgcacttttacctgtctttaggatcctaattatcgttaaatggtttaatcaaatttttgtcctaaaaaagcataataggttagctgaccaatgattaaaacattatagatccggaacgaactagagaaggcatgcaaaattcagatgagaaagtttctaagtgatagctccagctgtcgacgcggccgcggtcgacgcggccgcgaatttagtagtagtaaa

SEQ ID NO: 65594 - DNA, 1476 bp, Homo sapiens
cttttattatgaggccaacattaccctgttaccaaagccagacaaagatattatgagaaaagaaaactacaaaccagtatcccttatgaacactgatgtaaaaattttcaacagaatactagcaaaccaaatttagcagcatattaaaaggattatacaccatgaccaaatggcatttattcccagactgcaagaatggttcaaaatgtgaaaatcaatcagtgtaatatatcatataaacagattgtagggggaaaaaaaccccacgtgatcatctgaatcgaagcagaaaaatcattttgacaaaattcaataccctttcatgacaaaaatcactgaacacataaggaataaaaagaaactacttcaacatagtaaaagccatatatgaaaaacccatagctaacatcttactggtgaaagaccaaaagcttttcctttaagattgaggatgagataaggatgcctgcttttcaccacttctattcaacatactactgaagttctagctagaccatttaggcaagaaaaagaaataaaaggcacacaaattggaaaggaagaggtaaaattatctctgttcatagatgatatgaccttgtagatagaaaatcctaaagatcccacaaaaaactatcaatgctaataactgaattaaacaaagtattggggcacaacgtgaatacacaaaaatccgttgcatttttatacacaaacaaacagtgaacaatctgaaaaggaaattacaaaaacaattccatccaaaagaataaaatacttaggaattaacaaggaggttaaaaacttaacaatgaaaagcagaaaaacattgctgaaagaaattaaaggcaacataaataagtggaaacatatcccatgttcgtgaactggaagatttaatattgttaagatgtcattacctacccaaaggcctctacagattcaatgcgttccctatcaaaatcgcaatgatgtttttttgcagaaaaggaaaaaaaaatctaaaatttatatggaatcttgagggactccaaatagctaaagttatcttgaaaaataacatagctggatgactcaatgtgctgatttcaaaatttgctaagaagctactgtgaccaaaacagtgtgttactggcataaagacagacatatagaccaatggaatcaacgggaaagtccagaagtaaaacctcacctatatggtcgaatgattttcgatgggggtgccaagacctttcaatggagaaagcacagtcaattcaacaaatggtgccaggacaactgggtatccatatgcaaaagaatgaagttggacctttatctaagtttgtatacaaaaatcaactcaaaatggatcaaagacctaaatgtaagaccccaaactataaaactcctagaaaacatagggcagaagcttcatgacattggatttgtcagtggtatcttgggaatgacaccaaaggaacaggcagctaa

SEQ ID NO: 65595 - DNA, 497 bp, Homo sapiens
ctcagcctctggaatagctgggactaacaggtgtgtgccaccacgtcctgctaatttatttttattttttgtagaaatgggggtctcactatgttactcaagcttgtcttgaactcctgggatcaagcaatcctcctgcctcagcctcccaaagtgctgggattacaggcatgagccatcggtggctggctttcaccctacctcttatctgtctgtcttatctatccatctatcatctaactccatttctgttgttttgttttgcttgaaccattttcagtagatgaaagacatcttgacctttctcccataaatacttgacagtttcctgcccaaatgcagtgccatgatcacccagggatttcacattaattcagcgatgtcatctaagattcagctcataatcagatttccctagttgtcataacattgatgtttctgaggagtccaggccagttgtcctatagactgtcccatcacctggatgtgtctgtttc

SEQ ID NO: 65596 - DNA, 1168 bp, Homo sapiens
actagaagaagatggatcttgaagaagaaaaaagatcagtttacctcattcaaccttcactgcaatcaaggaggaagctttatcatccctatctgacagaactgaggacatggctgaaggagattaaaagcacatttggaaataccgctttagatactctacaagttaaccttggaataaaccagactatcagagggcattgtcactcactgacggatttctttcattcctctctgctttggcattaggcagtcagccacatcaagagacttcataagaaacagccctgtaactcatttgttgctttcctgtaagaatgttgtcaaggacattatttacttcattacaaagggtcttctttgtgctggagaaacttctctcagatctctgtgccaggaagaatggtgtttctctcaaacactgggtttgatattacagatagtataaactatatatccaggcacatcctcctttagtgagtatatacaaactggcttcacttcatttttttcatcttccaacttctccataataatatttacttttaaaaatgttcttaacaatgaatatgaccaagacaatttgaggaaaccaatcataaactttgtgtcaatatagtaagcatgtttcctgcagggagataccactgttcccactaaaatagaacacaacaaaaggaggcaggagagaaatgaatgacttaggacctgtctaggttgaaaaggcaaactagaagtggggcacacctaacttgtttaaaaagactttgtcaactattatttgtgtactcttggcatttctgtgttctcctcattcctatttcattcctattcccctttaatatttcctttacatacctgataccttccctcccaaaaatggtgtgtgtctatgtagttccttgatgattttgtcaacgaataataaaccctgggttttggataaggaggtgaaaagaaagggctctgcttgattctgcacagggctatacaccacagggcgaggaaaaaaggaaaatccaaatatgtttagtcaggatgttttcctaaactattgaagaaatcttatctggcctcctcttaaaatatgtaagaactgtttccagctgcttgttatttggctgtgcttattttagaccaaagccaataaaaaaaatgagactcttaca

SEQ ID NO: 65597 - DNA, 539 bp, Homo sapiens
catttgctgaataaatgaatgaaccctcatcttctcttaacccacaccttataaaatctttctcaactactccaattttccctattacttttttttttaaactaatccctctgttcactctcaacactccttatttttcagtgtttggtgctttgaggggaaaacaaaatatgttcttcagttttacaatagttgggaaagaaaaaggagcatttttattgttttgtttcatctgtgttccttttctcttggattccacatggcatcatgtaatcaattttttgctgccttgcactgattgctcacagtctcatatgttgcttctccaaactaacaatgtgagtacagtgtctgtgtctccctcctctgtggcatatccaccccgctccatgaactgaaagcattccaattctgaggcactctgaactcttccataaaaagtggctattttcatggcctcttcgcaaagtgtaattctgtcttctctttcaagtaatattaataaaactagtttttaaaatttctttgacaaacattgt

SEQ ID NO: 65598 - DNA, 546 bp, Homo sapiens
aacgacctcactaaaggggatttggcccctcaaggccaagaattcggcccccaggtaaggcgggaaggcctactgggaaaatatgagctgcctggacagcttacggttggagtttatgaatttctataaagcaactttaaaacaatttttaaaaaatcactgaaacagccttttgtgttttcaaaaccagtattaaataggatcctgcatttaacgcactatttcttgcctggttcctttcctgaagtgcttctctttcctctttccaccgcgcccccactctagttggctagtagagaagatttttccagcttcagacaaaccacttttccaagaatacatggaacagattacagaagcaagtaacagcctgcttacttccccttctgcacttgtatgtacgttcagctggagttctgaaaagaggaagtcgggagaacatttttttctttttaaaagaaagattggagaaccacggagcacaagcaggtagaaatattgaaggaaagagaaagaagagaaaatggaaaaaatactgaaaaaaaa

SEQ ID NO: 65599 - DNA, 281 bp, Homo sapiens
atattctaactaaccacagtacctaaagtttggctaacttggttaattcacatagatgctacaaatattcattgtactttagcagcattttggtatacataagatggaagatacatggcatctgagagaatatttttactcttgaactattttctcctattttcagttatcgattcacttatccaattataaaattgtagccctgaaaggaaactgactttaagtgctaacgaaatttattactaaatatttattactaaatatttgaatatatttggttt

SEQ ID NO: 65600 - DNA, 402 bp, Homo sapiens
  misc_feature (43)..(45): n is a, c, g, or t
cgcggccgcgtcgaccgacagcttgaggagtttcatgaacttnnnatcatctggtggtccctagtctgaattcttgatagaaaataacctagtatgttcatgtatacatactgccaatttcaccgacagcttgaggagtttcatgaacttgccatcatctggtggtccctagtctgaattcttgatagaaaataacctagtatgttcatgtatacatatgtaactaacctgcacattgtgcacatgtacactaaaacttaaagtataataataataaaataaaaaaaaaagaaaagaacctagtgtgttaaaccttaaatgcccttagaaataacctagaccagtgtttcttaaactgtggtcatgagatcagttgaatggattatgaccaacattgaaaag

SEQ ID NO: 65601 - DNA, 659 bp, Homo sapiens
agtgtagaaacaagtgataaaatgcctattggaaagaaattttaggagtaaaatgtagcagtagacatcaggctgctatccttttttacccttcaacccagtgggtgatgtttctgggttacagactcaacagatggagttttaactatttatgtttaatcaaggaggaaaagaagccataatttgtatttaatgtagtagactatagaaatgaaagaataaagtgataccaaaatttcgtatattcaaatcaatcttatagttttataacattttaaccctaacattttattgtattttgggttgcaattactcatggcagatgaaagccatggcttctttttctagaaaaataaatgcacacatactgccaatttcaccgacagcttgaggagtttcatgaacttgccatcatctggtggtccctagtctgaattcttgatagaaaataacctagtatgttcatgtatacatatgtaactaacctgcacattgtgcacatgtacactaaaacttaaagtataataataataaaataaaaaaaaaagaaaagaacctagtgtgttaaaccttaaatgcccttagaaataacctagaccagtgtttcttaaactgtggtcatgagatcagttgaatggattatgaccaacattgaaaag

SEQ ID NO: 65602 - DNA, 777 bp, Homo sapiens
agctaaaattaagtttgccattccttctagagttctggcccaaggtgacttaaaaacagttttaataaacatttagaccatcatgtattttgtaatacagttgggtcactgttgattcctaagataaatgtgtttaaacagaagctttctcattcatcagcagcctcagctttcatccaaatttatttaatgatgatgcaagcccatagcgttggtgttgcagttcgtcaccatggaagtgtttctgtcaacaaatcctcgctttactatcatgaaattgattttgcaggggaaaggaggataattgtgaaagcttccttttattcttaaagatcttcacagtttgcctggatgtctaaatgaattgtatttaaaatcaataactggcaataaaattaaccacactaaattaacaattatgaggttagaaaaagggaaatggcaataagctactttgtctgaaatcggtcgttttggaatgtgacttggggaccatacttgtaatttaaatgttccctgaaagctgttgttctctgctcagaagtatggattatccccagggactcccatgaggcagatatcagaatttctaggaggattcggctgagttattctcatctatattgtaaatggcataataatcacagaagaaattcacactatattacttctttcaactaacatactgtattttttaaatatgccttttctatagcttatgttcataactatctttggcttttatttgcttgtttaaaaaaaactgtaagaggttaa

SEQ ID NO: 65603 - DNA, 435 bp, Homo sapiens
tgtgattagattcaggtgctggttgatgttaagttcctcacaggatatcacatctggaggcacacaaaggccgtcacaccaaggtgatgtcaattttggtcatctggtcaaggtgttgtcctattccttcactatatagttaccttttttctctgttgcaatgaataagcagtctgtgggaagaggagctgttacattttaaacagaaaatgtatttgacactgatggaaaggagaggaggaaaattaatgacataaatttcaaagcaactattaaattatttgattgcattcttcctcttttactgtctgccaaaattgataaaaaaaatttttctaataagaatgttttaaatagtgatatcttaataagcatcaaaattaagcctgagaaataaattctttccttcctaatttcctcctcagcaaaagtaat

SEQ ID NO: 65604 - DNA, 412 bp, Homo sapiens
ctgaagcagttataagaatatagacatattccactcagtcggagtgttcataaagcgatattaagcaccatactatatctcagcaacatgcatatgtttgaatggagttcatgaaagccatcatctaccacagtcattcatctggacttcaagtctgccctgctgggaagtaggtcaccacctctacactgggccactgtcaagatccaaaatgtgctaaaacttagtcaccactctatttggtagcaatccaaagtggaccaaaacatttcctaagtaataccaaggtcaaaaatataatgtcgatatgtcaaattttgatctctgtgagtggatactagtaaatggagagttgttatgagtaggatgagaggaaagttgttggttgtttcataaaagcaaagaaaattaa

SEQ ID NO: 65605 - DNA, 552 bp, Homo sapiens
ttttttttttttgaggctgcctaaaactttattagccacctactgtgtacagacactgggccacagcaataagcacagaacaggagtaggggcaggggaggagtctgcaagcttctgggaggaggggatcttgggagggaaccataaaatttacacattcactaaataacaagcgcttttgacatacaacgcaaaaaaaaaaaaaaggtgggggaccacttggatcaaaattttaagtcctcatcacataccttaagacacagttttagtccaatcaaaaatcataactgcattaaaaaattcaatgtagtgcaatcaaaccaaaaaacttaatttgtgatcataagtgctctactacataaacatcgatcatagcagggaacaaaaagttcaaatcacacagtacaaaaaaatctgtaaataaatataaactacagttcaagagaaatattaaattatacaattgcatcatactgttaacagcttattgaaatgaggtccataagaataaagggggttcctgttttggtgcttgacacttgaaattctaga

SEQ ID NO: 65606 - DNA, 4400 bp, Homo sapiens
ggctggtacggtccgggatttaggatcagcgcgcggcccgaatggcggccgacaagggcccggcggctggacctcggtcgcgagctgccatggcccagtggaggaagaagaaagggctccggaagcgccgaggcgcggcctcccaggcccgcggcagcgactcggaggacggcgagtttgagatccaggcggaagatgacgcccgggcccggaagctgggacctggaagacccctgcccaccttccccacctcggaatgcacctcggatgtggagccggacacccgggagatggtgcgtgcccagaacaagaagaagaagaagtctggaggcttccagtccatgggcctgagctacccggtgttcaaaggcatcatgaagaaggggtacaaggtgccaacacccatccagaggaagaccatcccggtgatcttggatggcaaggacgtggtggccatggcccggacgggcagtggcaagacagcctgcttcctcctcccaatgttcgagcggctcaagacccacagtgcccagaccggggcccgcgccctcatcctctcgccgacccgagagctggccctgcagaccctgaagttcactaaggagctaggcaagttcactggcctcaagactgccctgatcctgggtggagacaggatggaagaccagtttgcagccctgcacgaaaatcccgacataattattgccacgcccggacggttggtgcatgtggctgtggaaatgagcctgaagctgcagagtgtggaatacgtggtgttcgatgaagctgaccggctttttgaaatgggtttcgcagagcagctgcaggagatcatcgcccgcctccccgggggccaccagacggtgctgttctccgccacgctgcccaaactgctggtggaatttgcccgggctggcctcacggagcccgtgctcatccggcttgacgtggataccaagctcaacgagcagctgaagacctccttcttcctcgtgcgggaggacaccaaggctgccgtgctgctccacctgctgcacaacgtggtgcggccccaggaccagaccgtggtgtttgtggccacgaagcaccacgccgagtacctcactgagctgctgacgacccagcgggtgagctgcgcccacatctacagtgccctagacccgacagcccgcaagatcaatctcgccaaattcacgcttggcaagtgctccactctcattgtgactgacctggccgcccgaggcctggacatcccgctgctggacaatgtcatcaactacagcttccccgccaagggcaaactcttcctgcaccgcgtgggccgtgtggctcgggctggccgaagtggcacagcctactccttggtggcccctgatgaaatcccctacctgctggatctgcacctgttcctgggccgctccctcaccctcgcccgacccctcaaggagccctcaggtgtggccggtgtggatggcatgctgggtcgggtgccacagagtgtggtggacgaggaggacagtggtctgcagagcaccctggaggcatcgctggagctacggggcctggcccgcgttgctgataacgcccagcagcagtatgtgcgctcacgcccggcgccctcgcctgagtccatcaagagggccaaggagatggaccttgtggggctgggcctgcaccccctcttcagctcgcgttttgaggaggaggagctgcagcggctgaggctggtggacagcataaagaactaccgctcccgggcgactatctttgagatcaacgcctccagccgagacctgtgcagccaggtgatgcgcgccaagcggcagaaggaccgcaaggccatcgcccgcttccagcagggacagcaggggcggcaggagcagcaggagggcccagtgggcccagccccgagccgcccagcactgcaggagaagcagcctgagaaggaggaggaggaggaggcgggagagagtgtggaggacattttctcagaggtcgtgggccggaagcggcagcggtcaggacccaacaggggagccaagaggcggagggaggaggcccggcagcgggaccaggaattctacatcccctaccggcccaaggactttgacagcgagcggggcctgagcatcagcggggaagggggagcctttgagcagcaggcagctggcgctgtcctggacttgatgggggatgaagcccagaacctgacgaggggccggcagcagctcaagtgggaccgtaagaagaagcggtttgtgggacagtcaggacaggaagacaagaagaagattaagacagagagcggccgctacatcagcagctcctacaagcgagacctctatcagaagtggaaacagaaacagaaaattgatgatcgtgactcggacgaagaaggggcatctgaccggcgaggcccagagcgaagaggtgggaagcgagaccgtggccaagcaggtgcatcccggccccacgccccaggcacccctgcaggccgagtccgcccggaactcaagaccaagcagcagatcctgaagcagcggcgccgggcccagaagctgcacttcctgcagcgtggtggcctcaagcagctctctgcccgcaaccgccgccgcgtccaggagctgcagcagggcgccttcggccggggtgcccgctccaagaagggcaagatgcggaagaggatgtgaggaccaggacccagccccgtggctccttgattggccttagggtgggcatcagcagacgttcccgtgcaccactgtgtgcctggccctgtgctgggcactgggggcactccctgcaggagccatcatctgtgaaaaggagcactgtatggccacagaagggcagcagctgcgtcagcctaagacagagacatttgaacagggccttgaagggtgtgcaggagttcgccagcaaagccaggcaggccaagacttgagttggcaactcagctgctgctgcttccatgtgttctgggttcagaggtcatggctgcaccggtcagagccctgagtgcctcagggtttggcaatggaatttttaatgtaataaatctttattgagcactgctggtggccaggagtgcggtctacttggggaactggaatggagagacccaggtactaaaatcccagctaacgtggcagaggagttgcgggtctcctgagggtgagttctgctgccttgtccatttagcgatgaggaaagtgaagctcagagcacaaaccaggtgccagaggcgggagttggtcccccttcctcccactggacatggttgcagctgggagtgggctgggggaggggaacaggatgcccagcccagggggcaaggacacagctgctcccctctggctatgaagaggttaacgcggcccctccacacctggaggtcagaacctggcctgtcctctgtcttcttgccacccaccccctgtttgaggttctgagaaggtcaagggcagccccagcagctggattctcaggctgggcccctcacctggcagagtccatagtggagggggccttggtgatctctcatctagcatggaccctgttctgagacctgacaaagagttttttttcatgccccaaccaccctggcagggagggcctggtctgatctcattttagaggcagttgccccacacatagccccttgaccttcccatcacctcctcatcagggcctgcatttatggagtgcttgctatgtgcccctcatggcaggcccacagcactctgaacaggcacagccctcccatcttcccaatgaggaaacggattcaggaagagccactcagtccacaccccattggaaatgtgggccctcctatctcagggtctctcaggggttccctctcccgctgctcacctgtgtcagggctaggaggcaggggctgcaggctcagcctgacccaggccggccagcatggcagagaggtcctgcatgaacagcttcacctgggggggcccagcacgaagtcacatcccagccccagagtcactgtccagcccccacccctcaacacgcgggggaggccgaaaggtagggcggggactggagatcccctcattaaaagaacagtgatgatggtggttcccagaggtggtgactgagatcctaaaccgttctgggttttgaaagcctcaggccaaccttcccaactgctgcgtgagcagacaccttcacagcttcctcgctgctgtcacctgcactatccaattagtattttcatttacatcaatcagctttattttcttgtaactggatcagtcatattcattggtttgtgacctactcttatctccgtgggtggctctccttttgttttaattaacttctttatgaatatgaacttaataaataccatggatccattgtaaaaactagaactt

SEQ ID NO: 65607 - DNA, 4181 bp, Homo sapiens
ggctggtacggtccgggatttaggatcagcgcgcggcccgaatggcggccgacaagggcccggcggctggacctcggtcgcgagctgccatggcccagtggaggaagaagaaagggctccggaagcgccgaggcgcggcctcccaggcccgcggcagcgactcggaggacggcgagtttgagatccaggcggaagatgacgcccgggcccggaagctgggacctggaagacccctgcccaccttccccacctcggaatgcacctcggatgtggagccggacacccgggagatggtgcgtgcccagaacaagaagaagaagaagtctggaggcttccagtccatgggcctgagctacccggtgttcaaaggcatcatgaagaaggggtacaaggtgccaacacccatccagaggaagaccatcccggtgatcttggatggcaaggacgtggtggccatggcccggacgggcagtggcaagacagcctgcttcctcctcccaatgttcgagcggctcaagacccacagtgcccagaccggggcccgcgccctcatcctctcgccgacccgagagctggccctgcagaccctgaagttcactaaggagctaggcaagttcactggcctcaagactgccctgatcctgggtggagacaggatggaagaccagtttgcagccctgcacgaaaatcccgacataattattgccacgcccggacggttggtgcatgtggctgtggaaatgagcctgaagctgcagagtgtggaatacgtggtgttcgatgaagctgaccggctttttgaaatgggtttcgcagagcagctgcaggagatcatcgcccgcctccccgggggccaccagacggtgctgttctccgccacgctgcccaaactgctggtggaatttgcccgggctggcctcacggagcccgtgctcatccggcttgacgtggataccaagctcaacgagcagctgaagacctccttcttcctcgtgcgggaggacaccaaggctgccgtgctgctccacctgctgcacaacgtggtgcggccccaggaccagaccgtggtgtttgtggccacgaagcaccacgccgagtacctcactgagctgctgacgacccagcgggtgagctgcgcccacatctacagtgccctagacccgacagcccgcaagatcaatctcgccaaattcacgcttggcaagtgctccactctcattgtgactgacctggccgcccgaggcctggacatcccgctgctggacaatgtcatcaactacagcttccccgccaagggcaaactcttcctgcaccgcgtgggccgtgtggctcgggctggccgaagtggcacagcctactccttggtggcccctgatgaaatcccctacctgctggatctgcacctgttcctgggccgctccctcaccctcgcccgacccctcaaggagccctcaggtgtggccggtgtggatggcatgctgggtcgggtgccacagagtgtggtggacgaggaggacagtggtctgcagagcaccctggaggcatcgctggagctacggggcctggcccgcgttgctgataacgcccagcagcagtatgtgcgctcacgcccggcgccctcgcctgagtccatcaagagggccaaggagatggaccttgtggggctgggcctgcaccccctcttcagctcgcgttttgaggaggaggagctgcagcggctgaggctggtggacagcataaagaactaccgctcccgggcggacattttctcagaggtcgtgggccggaagcggcagcggtcaggacccaacaggggagccaagaggcggagggaggaggcccggcagcgggaccaggaattctacatcccctaccggcccaaggactttgacagcgagcggggcctgagcatcagcggggaagggggagcctttgagcagcaggcagctggcgctgtcctggacttgatgggggatgaagcccagaacctgacgaggggccggcagcagctcaagtgggaccgtaagaagaagcggtttgtgggacagtcaggacaggaagacaagaagaagattaagacagagagcggccgctacatcagcagctcctacaagcgagacctctatcagaagtggaaacagaaacagaaaattgatgatcgtgactcggacgaagaaggggcatctgaccggcgaggcccagagcgaagaggtgggaagcgagaccgtggccaagcaggtgcatcccggccccacgccccaggcacccctgcaggccgagtccgcccggaactcaagaccaagcagcagatcctgaagcagcggcgccgggcccagaagctgcacttcctgcagcgtggtggcctcaagcagctctctgcccgcaaccgccgccgcgtccaggagctgcagcagggcgccttcggccggggtgcccgctccaagaagggcaagatgcggaagaggatgtgaggaccaggacccagccccgtggctccttgattggccttagggtgggcatcagcagacgttcccgtgcaccactgtgtgcctggccctgtgctgggcactgggggcactccctgcaggagccatcatctgtgaaaaggagcactgtatggccacagaagggcagcagctgcgtcagcctaagacagagacatttgaacagggccttgaagggtgtgcaggagttcgccagcaaagccaggcaggccaagacttgagttggcaactcagctgctgctgcttccatgtgttctgggttcagaggtcatggctgcaccggtcagagccctgagtgcctcagggtttggcaatggaatttttaatgtaataaatctttattgagcactgctggtggccaggagtgcggtctacttggggaactggaatggagagacccaggtactaaaatcccagctaacgtggcagaggagttgcgggtctcctgagggtgagttctgctgccttgtccatttagcgatgaggaaagtgaagctcagagcacaaaccaggtgccagaggcgggagttggtcccccttcctcccactggacatggttgcagctgggagtgggctgggggaggggaacaggatgcccagcccagggggcaaggacacagctgctcccctctggctatgaagaggttaacgcggcccctccacacctggaggtcagaacctggcctgtcctctgtcttcttgccacccaccccctgtttgaggttctgagaaggtcaagggcagccccagcagctggattctcaggctgggcccctcacctggcagagtccatagtggagggggccttggtgatctctcatctagcatggaccctgttctgagacctgacaaagagttttttttcatgccccaaccaccctggcagggagggcctggtctgatctcattttagaggcagttgccccacacatagccccttgaccttcccatcacctcctcatcagggcctgcatttatggagtgcttgctatgtgcccctcatggcaggcccacagcactctgaacaggcacagccctcccatcttcccaatgaggaaacggattcaggaagagccactcagtccacaccccattggaaatgtgggccctcctatctcagggtctctcaggggttccctctcccgctgctcacctgtgtcagggctaggaggcaggggctgcaggctcagcctgacccaggccggccagcatggcagagaggtcctgcatgaacagcttcacctgggggggcccagcacgaagtcacatcccagccccagagtcactgtccagcccccacccctcaacacgcgggggaggccgaaaggtagggcggggactggagatcccctcattaaaagaacagtgatgatggtggttcccagaggtggtgactgagatcctaaaccgttctgggttttgaaagcctcaggccaaccttcccaactgctgcgtgagcagacaccttcacagcttcctcgctgctgtcacctgcactatccaattagtattttcatttacatcaatcagctttattttcttgtaactggatcagtcatattcattggtttgtgacctactcttatctccgtgggtggctctccttttgttttaattaacttctttatgaatatgaacttaataaataccatggatccattgtaaaaactagaactt

SEQ ID NO: 65608 - DNA, 3001 bp, Homo sapiens
ggctggtacggtccgggatttaggatcagcgcgcggcccgaatggcggccgacaagggcccggcggctggacctcggtcgcgagctgccatggcccagtggaggaagaagaaagggctccggaagcgccgaggcgcggcctcccaggcccgcggcagcgactcggaggacggcgagtttgagatccaggcggaagatgacgcccgggcccggaagctgggacctggaagacccctgcccaccttccccacctcggaatgcacctcggatgtggagccggacacccgggagatggtgcgtgcccagaacaagaagaagaagaagtctggaggcttccagtccatgggcctgagctacccggtgttcaaaggcatcatgaagaaggggtacaaggtgccaacacccatccagaggaagaccatcccggtgatcttggatggcaaggacgtggtggccatggcccggacgggcagtggcaagacagcctgcttcctcctcccaatgttcgagcggctcaagacccacagtgcccagaccggggcccgcgccctcatcctctcgccgacccgagagctggccctgcagaccctgaagttcactaaggagctaggcaagttcactggcctcaagactgccctgatcctgggtggagacaggatggaagaccagtttgcagccctgcacgaaaatcccgacataattattgccacgcccggacggttggtgcatgtggctgtggaaatgagcctgaagctgcagagtgtggaatacgtggtgttcgatgaagctgaccggctttttgaaatgggtttcgcagagcagctgcaggagatcatcgcccgcctccccgggggccaccagacggtgctgttctccgccacgctgcccaaactgctggtggaatttgcccgggctggcctcacggagcccgtgctcatccggcttgacgtggataccaagctcaacgagcagctgaagacctccttcttcctcgtgcgggaggacaccaaggctgccgtgctgctccacctgctgcacaacgtggtgcggccccaggaccagaccgtggtgtttgtggccacgaagcaccacgccgagtacctcactgagctgctgacgacccagcgggtgagctgcgcccacatctacagtgccctagacccgacagcccgcaagatcaatctcgccaaattcacgcttggcaagtgctccactctcattgtgactgacctggccgcccgaggcctggacatcccgctgctggacaatgtcatcaactacagcttccccgccaagggcaaactcttcctgcaccgcgtgggccgtgtggctcgggctggccgaagtggcacagcctactccttggtggcccctgatgaaatcccctacctgctggatctgcacctgttcctgggccgctccctcaccctcgcccgacccctcaaggagccctcaggtgtggccggtgtggatggcatgctgggtcgggtgccacagagtgtggtggacgaggaggacagtggtctgcagagcaccctggaggcatcgctggagctacggggcctggcccgcgttgctgataacgcccagcagcagtatgtgcgctcacgcccggcgccctcgcctgagtccatcaagagggccaaggagatggaccttgtggggctgggcctgcaccccctcttcagctcgcgttttgaggaggaggagctgcagcggctgaggctggtggacagcataaagaactaccgctcccgggcgactatctttgagatcaacgcctccagccgagacctgtgcagccaggtgatgcgcgccaagcggcagaaggaccgcaaggccatcgcccgcttccagcagggacagcaggggcggcaggagcagcaggagggcccagtgggcccagccccgagccgcccagcactgcaggagaagcagcctgagaaggaggaggaggaggaggcgggagagagtgtggaggacattttctcagaggtcgtgggccggaagcggcagcggtcaggacccaacaggggagccaagaggcggagggaggaggcccggcagcgggaccaggaattctacatcccctaccggcccaaggactttgacagcgagcggggcctgagcatcagcggggaagggggagcctttgagcagcaggcagctggcgctgtcctggacttgatgggggatgaagcccagaacctgacgaggggccggcagcagctcaagtgggaccgtaagaagaagcggtttgtgggacagtcaggacaggaagacaagaagaagattaagacagagagcggccgctacatcagcagctcctacaagcgagacctctatcagaagtggaaacagaaacagaaaattgatgatcgtgactcggacgaagaaggggcatctgaccggcgaggcccagagcgaagaggtgggaagcgagaccgtggccaagcaggtgcatcccggccccacgccccaggcacccctgcaggccgagtccgcccggaactcaagaccaagcagcagatcctgaagcagcggcgccgggcccagaagctgcacttcctgcagcgtggtggcctcaagcagctctctgcccgcaaccgccgccgcgtccaggagctgcagcagggcgccttcggccggggtgcccgctccaagaagggcaagatgcggaagaggatgtgaggaccaggacccagccccgtggctccttgattggccttagggtgggcatcagcagacgttcccgtgcaccactgtgtgcctggccctgtgctgggcactgggggcactccctgcaggagccatcatctgtgaaaaggagcactgtatggccacagaagggcagcagctgcgtcagcctaagacagagacatttgaacagggccttgaagggtgtgcaggagttcgccagcaaagccaggcaggccaagacttgagttggcaactcaagtgggaccgtaagaagaagcggtttgtgggacagtcaggacagt

SEQ ID NO: 65609 - DNA, 3785 bp, Homo sapiens
ggctggtacggtccgggatttaggatcagcgcgcggcccgaatggcggccgacaagggcccggcggctggacctcggtcgcgagctgccatggcccagtggaggaagaagaaagggctccggaagcgccgaggcgcggcctcccaggcccgcggcagcgactcggaggacggcgagtttgagatccaggcggaagatgacgcccgggcccggaagctgggacctggaagacccctgcccaccttccccacctcggaatgcacctcggatgtggagccggacacccgggagatggtgcgtgcccagaacaagaagaagaagaagtctggaggcttccagtccatgggcctgagctacccggtgttcaaaggcatcatgaagaaggggtacaaggtgccaacacccatccagaggaagaccatcccggtgatcttggatggcaaggacgtggtggccatggcccggacgggcagtggcaagacagcctgcttcctcctcccaatgttcgagcggctcaagacccacagtgcccagaccggggcccgcgccctcatcctctcgccgacccgagagctggccctgcagaccctgaagttcactaaggagctaggcaagttcactggcctcaagactgccctgatcctgggtggagacaggatggaagaccagtttgcagccctgcacgaaaatcccgacataattattgccacgcccggacggttggtgcatgtggctgtggaaatgagcctgaagctgcagagtgtggaatacgtggtgttcgatgaagctgaccggctttttgaaatgggtttcgcagagcagctgcaggagatcatcgcccgcctccccgggggccaccagacggtgctgttctccgccacgctgcccaaactgctggtggaatttgcccgggctggcctcacggagcccgtgctcatccggcttgacgtggataccaagctcaacgagcagctgaagacctccttcttcctcgtgcgggaggacaccaaggctgccgtgctgctccacctgctgcacaacgtggtgcggccccaggaccagaccgtggtgtttgtggccacgaagcaccacgccgagtacctcactgagctgctgacgacccagcgggtgagctgcgcccacatctacagtgccctagacccgacagcccgcaagatcaatctcgccaaattcacgcttggcaagtgctccactctcattgtgactgacctggccgcccgaggcctggacatcccgctgctggacaatgtcatcaactacagcttccccgccccgagccgcccagcactgcaggagaagcagcctgagaaggaggaggaggaggaggcgggagagagtgtggaggacattttctcagaggtcgtgggccggaagcggcagcggtcaggacccaacaggggagccaagaggcggagggaggaggcccggcagcgggaccaggaattctacatcccctaccggcccaaggactttgacagcgagcggggcctgagcatcagcggggaagggggagcctttgagcagcaggcagctggcgctgtcctggacttgatgggggatgaagcccagaacctgacgaggggccggcagcagctcaagtgggaccgtaagaagaagcggtttgtgggacagtcaggacaggaagacaagaagaagattaagacagagagcggccgctacatcagcagctcctacaagcgagacctctatcagaagtggaaacagaaacagaaaattgatgatcgtgactcggacgaagaaggggcatctgaccggcgaggcccagagcgaagaggtgggaagcgagaccgtggccaagcaggtgcatcccggccccacgccccaggcacccctgcaggccgagtccgcccggaactcaagaccaagcagcagatcctgaagcagcggcgccgggcccagaagctgcacttcctgcagcgtggtggcctcaagcagctctctgcccgcaaccgccgccgcgtccaggagctgcagcagggcgccttcggccggggtgcccgctccaagaagggcaagatgcggaagaggatgtgaggaccaggacccagccccgtggctccttgattggccttagggtgggcatcagcagacgttcccgtgcaccactgtgtgcctggccctgtgctgggcactgggggcactccctgcaggagccatcatctgtgaaaaggagcactgtatggccacagaagggcagcagctgcgtcagcctaagacagagacatttgaacagggccttgaagggtgtgcaggagttcgccagcaaagccaggcaggccaagacttgagttggcaactcagctgctgctgcttccatgtgttctgggttcagaggtcatggctgcaccggtcagagccctgagtgcctcagggtttggcaatggaatttttaatgtaataaatctttattgagcactgctggtggccaggagtgcggtctacttggggaactggaatggagagacccaggtactaaaatcccagctaacgtggcagaggagttgcgggtctcctgagggtgagttctgctgccttgtccatttagcgatgaggaaagtgaagctcagagcacaaaccaggtgccagaggcgggagttggtcccccttcctcccactggacatggttgcagctgggagtgggctgggggaggggaacaggatgcccagcccagggggcaaggacacagctgctcccctctggctatgaagaggttaacgcggcccctccacacctggaggtcagaacctggcctgtcctctgtcttcttgccacccaccccctgtttgaggttctgagaaggtcaagggcagccccagcagctggattctcaggctgggcccctcacctggcagagtccatagtggagggggccttggtgatctctcatctagcatggaccctgttctgagacctgacaaagagttttttttcatgccccaaccaccctggcagggagggcctggtctgatctcattttagaggcagttgccccacacatagccccttgaccttcccatcacctcctcatcagggcctgcatttatggagtgcttgctatgtgcccctcatggcaggcccacagcactctgaacaggcacagccctcccatcttcccaatgaggaaacggattcaggaagagccactcagtccacaccccattggaaatgtgggccctcctatctcagggtctctcaggggttccctctcccgctgctcacctgtgtcagggctaggaggcaggggctgcaggctcagcctgacccaggccggccagcatggcagagaggtcctgcatgaacagcttcacctgggggggcccagcacgaagtcacatcccagccccagagtcactgtccagcccccacccctcaacacgcgggggaggccgaaaggtagggcggggactggagatcccctcattaaaagaacagtgatgatggtggttcccagaggtggtgactgagatcctaaaccgttctgggttttgaaagcctcaggccaaccttcccaactgctgcgtgagcagacaccttcacagcttcctcgctgctgtcacctgcactatccaattagtattttcatttacatcaatcagctttattttcttgtaactggatcagtcatattcattggtttgtgacctactcttatctccgtgggtggctctccttttgttttaattaacttctttatgaatatgaacttaataaataccatggatccattgtaaaaactagaactt

SEQ ID NO: 65610 - DNA, 4516 bp, Homo sapiens
ggctggtacggtccgggatttaggatcagcgcgcggcccgaatggcggccgacaagggcccggcggctggacctcggtcgcgagctgccatggcccagtggaggaagaagaaagggctccggaagcgccgaggcgcggcctcccaggcccgcggcagcgactcggaggacggcgagtttgagatccaggcggaagatgacgcccgggcccggaagctgggacctggaagacccctgcccaccttccccacctcggaatgcacctcggatgtggagccggacacccgggagatggtgcgtgcccagaacaagaagaagaagaagtctggaggcttccagtccatgggcctgagctacccggtgttcaaaggcatcatgaagaaggggtacaaggtgccaacacccatccagaggaagaccatcccggtgatcttggatggcaaggacgtggtggccatggcccggacgggcagtggcaagacagcctgcttcctcctcccaatgttcgagcggctcaagacccacagtgcccagaccggggcccgcgccctcatcctctcgccgacccgagagctggccctgcagaccctgaagttcactaaggaggtgtgtctgagcttggctagaggctggaggcaagggctgacttgggaccggacacagaggccacgagtgtgctgtcatctcacccctgccctctctcaatcactttctcttctcagctaggcaagttcactggcctcaagactgccctgatcctgggtggagacaggatggaagaccagtttgcagccctgcacgaaaatcccgacataattattgccacgcccggacggttggtgcatgtggctgtggaaatgagcctgaagctgcagagtgtggaatacgtggtgttcgatgaagctgaccggctttttgaaatgggtttcgcagagcagctgcaggagatcatcgcccgcctccccgggggccaccagacggtgctgttctccgccacgctgcccaaactgctggtggaatttgcccgggctggcctcacggagcccgtgctcatccggcttgacgtggataccaagctcaacgagcagctgaagacctccttcttcctcgtgcgggaggacaccaaggctgccgtgctgctccacctgctgcacaacgtggtgcggccccaggaccagaccgtggtgtttgtggccacgaagcaccacgccgagtacctcactgagctgctgacgacccagcgggtgagctgcgcccacatctacagtgccctagacccgacagcccgcaagatcaatctcgccaaattcacgcttggcaagtgctccactctcattgtgactgacctggccgcccgaggcctggacatcccgctgctggacaatgtcatcaactacagcttccccgccaagggcaaactcttcctgcaccgcgtgggccgtgtggctcgggctggccgaagtggcacagcctactccttggtggcccctgatgaaatcccctacctgctggatctgcacctgttcctgggccgctccctcaccctcgcccgacccctcaaggagccctcaggtgtggccggtgtggatggcatgctgggtcgggtgccacagagtgtggtggacgaggaggacagtggtctgcagagcaccctggaggcatcgctggagctacggggcctggcccgcgttgctgataacgcccagcagcagtatgtgcgctcacgcccggcgccctcgcctgagtccatcaagagggccaaggagatggaccttgtggggctgggcctgcaccccctcttcagctcgcgttttgaggaggaggagctgcagcggctgaggctggtggacagcataaagaactaccgctcccgggcgactatctttgagatcaacgcctccagccgagacctgtgcagccaggtgatgcgcgccaagcggcagaaggaccgcaaggccatcgcccgcttccagcagggacagcaggggcggcaggagcagcaggagggcccagtgggcccagccccgagccgcccagcactgcaggagaagcagcctgagaaggaggaggaggaggaggcgggagagagtgtggaggacattttctcagaggtcgtgggccggaagcggcagcggtcaggacccaacaggggagccaagaggcggagggaggaggcccggcagcgggaccaggaattctacatcccctaccggcccaaggactttgacagcgagcggggcctgagcatcagcggggaagggggagcctttgagcagcaggcagctggcgctgtcctggacttgatgggggatgaagcccagaacctgacgaggggccggcagcagctcaagtgggaccgtaagaagaagcggtttgtgggacagtcaggacaggaagacaagaagaagattaagacagagagcggccgctacatcagcagctcctacaagcgagacctctatcagaagtggaaacagaaacagaaaattgatgatcgtgactcggacgaagaaggggcatctgaccggcgaggcccagagcgaagaggtgggaagcgagaccgtggccaagcaggtgcatcccggccccacgccccaggcacccctgcaggccgagtccgcccggaactcaagaccaagcagcagatcctgaagcagcggcgccgggcccagaagctgcacttcctgcagcgtggtggcctcaagcagctctctgcccgcaaccgccgccgcgtccaggagctgcagcagggcgccttcggccggggtgcccgctccaagaagggcaagatgcggaagaggatgtgaggaccaggacccagccccgtggctccttgattggccttagggtgggcatcagcagacgttcccgtgcaccactgtgtgcctggccctgtgctgggcactgggggcactccctgcaggagccatcatctgtgaaaaggagcactgtatggccacagaagggcagcagctgcgtcagcctaagacagagacatttgaacagggccttgaagggtgtgcaggagttcgccagcaaagccaggcaggccaagacttgagttggcaactcagctgctgctgcttccatgtgttctgggttcagaggtcatggctgcaccggtcagagccctgagtgcctcagggtttggcaatggaatttttaatgtaataaatctttattgagcactgctggtggccaggagtgcggtctacttggggaactggaatggagagacccaggtactaaaatcccagctaacgtggcagaggagttgcgggtctcctgagggtgagttctgctgccttgtccatttagcgatgaggaaagtgaagctcagagcacaaaccaggtgccagaggcgggagttggtcccccttcctcccactggacatggttgcagctgggagtgggctgggggaggggaacaggatgcccagcccagggggcaaggacacagctgctcccctctggctatgaagaggttaacgcggcccctccacacctggaggtcagaacctggcctgtcctctgtcttcttgccacccaccccctgtttgaggttctgagaaggtcaagggcagccccagcagctggattctcaggctgggcccctcacctggcagagtccatagtggagggggccttggtgatctctcatctagcatggaccctgttctgagacctgacaaagagttttttttcatgccccaaccaccctggcagggagggcctggtctgatctcattttagaggcagttgccccacacatagccccttgaccttcccatcacctcctcatcagggcctgcatttatggagtgcttgctatgtgcccctcatggcaggcccacagcactctgaacaggcacagccctcccatcttcccaatgaggaaacggattcaggaagagccactcagtccacaccccattggaaatgtgggccctcctatctcagggtctctcaggggttccctctcccgctgctcacctgtgtcagggctaggaggcaggggctgcaggctcagcctgacccaggccggccagcatggcagagaggtcctgcatgaacagcttcacctgggggggcccagcacgaagtcacatcccagccccagagtcactgtccagcccccacccctcaacacgcgggggaggccgaaaggtagggcggggactggagatcccctcattaaaagaacagtgatgatggtggttcccagaggtggtgactgagatcctaaaccgttctgggttttgaaagcctcaggccaaccttcccaactgctgcgtgagcagacaccttcacagcttcctcgctgctgtcacctgcactatccaattagtattttcatttacatcaatcagctttattttcttgtaactggatcagtcatattcattggtttgtgacctactcttatctccgtgggtggctctccttttgttttaattaacttctttatgaatatgaacttaataaataccatggatccattgtaaaaactagaactt

SEQ ID NO: 65611 - DNA, 3514 bp, Homo sapiens
ggctggtacggtccgggatttaggatcagcgcgcggcccgaatggcggccgacaagggcccggcggctggacctcggtcgcgagctgccatggcccagtggaggaagaagaaagggctccggaagcgccgaggcgcggcctcccaggcccgcggcagcgactcggaggacggcgagtttgagatccaggcggaagatgacgcccgggcccggaagctgggacctggaagacccctgcccaccttccccacctcggaatgcacctcggatgtggagccggacacccgggagatggtgcgtgcccagaacaagaagaagaagaagtctggaggcttccagtccatgggcctgagctacccggtgttcaaaggcatcatgaagaaggggtacaaggtgccaacacccatccagaggaagaccatcccggtgatcttggatggcaaggacgtggtggccatggcccggacgggcagtggcaagacagcctgcttcctcctcccaatgttcgagcggctcaagacccacagtgcccagaccggggcccgcgccctcatcctctcgccgacccgagagctggccctgcagaccctgaagttcactaaggagctaggcaagttcactggcctcaagactgccctgatcctgggtggagacaggatggaagaccagtttgcagccctgcacgaaaatcccgacataattattgccacgcccggacggttggtgcatgtggctgtggaaatgagcctgaagctgcagagtgtggaatacgtggtgttcgatgaagctgaccggctttttgaaatgggtttcgcagagcagctgcaggagatcatcgcccgcctccccgggggccaccagacggtgctgttctccgccacgctgcccaaactgctggtggaatttgcccgggctggcctcacggagcccgtgctcatccggcttgacgtggataccaagctcaacgagcagctgaagacctccttcttcctcgtgcgggaggacaccaaggctgccgtgctgctccacctgctgcacaacgtggtgcggccccaggaccagaccgtggtgtttgtggccacgaagcaccacgccgagtacctcactgagctgctgacgacccagcgggtgagctgcgcccacatctacagtgccctagacccgacagcccgcaagatcaatctcgccaggaattctacatcccctaccggcccaaggactttgacagcgagcggggcctgagcatcagcggggaagggggagcctttgagcagcaggcagctggcgctgtcctggacttgatgggggatgaagcccagaacctgacgaggggccggcagcagctcaagtgggaccgtaagaagaagcggtttgtgggacagtcaggacaggaagacaagaagaagattaagacagagagcggccgctacatcagcagctcctacaagcgagacctctatcagaagtggaaacagaaacagaaaattgatgatcgtgactcggacgaagaaggggcatctgaccggcgaggcccagagcgaagaggtgggaagcgagaccgtggccaagcaggtgcatcccggccccacgccccaggcacccctgcaggccgagtccgcccggaactcaagaccaagcagcagatcctgaagcagcggcgccgggcccagaagctgcacttcctgcagcgtggtggcctcaagcagctctctgcccgcaaccgccgccgcgtccaggagctgcagcagggcgccttcggccggggtgcccgctccaagaagggcaagatgcggaagaggatgtgaggaccaggacccagccccgtggctccttgattggccttagggtgggcatcagcagacgttcccgtgcaccactgtgtgcctggccctgtgctgggcactgggggcactccctgcaggagccatcatctgtgaaaaggagcactgtatggccacagaagggcagcagctgcgtcagcctaagacagagacatttgaacagggccttgaagggtgtgcaggagttcgccagcaaagccaggcaggccaagacttgagttggcaactcagctgctgctgcttccatgtgttctgggttcagaggtcatggctgcaccggtcagagccctgagtgcctcagggtttggcaatggaatttttaatgtaataaatctttattgagcactgctggtggccaggagtgcggtctacttggggaactggaatggagagacccaggtactaaaatcccagctaacgtggcagaggagttgcgggtctcctgagggtgagttctgctgccttgtccatttagcgatgaggaaagtgaagctcagagcacaaaccaggtgccagaggcgggagttggtcccccttcctcccactggacatggttgcagctgggagtgggctgggggaggggaacaggatgcccagcccagggggcaaggacacagctgctcccctctggctatgaagaggttaacgcggcccctccacacctggaggtcagaacctggcctgtcctctgtcttcttgccacccaccccctgtttgaggttctgagaaggtcaagggcagccccagcagctggattctcaggctgggcccctcacctggcagagtccatagtggagggggccttggtgatctctcatctagcatggaccctgttctgagacctgacaaagagttttttttcatgccccaaccaccctggcagggagggcctggtctgatctcattttagaggcagttgccccacacatagccccttgaccttcccatcacctcctcatcagggcctgcatttatggagtgcttgctatgtgcccctcatggcaggcccacagcactctgaacaggcacagccctcccatcttcccaatgaggaaacggattcaggaagagccactcagtccacaccccattggaaatgtgggccctcctatctcagggtctctcaggggttccctctcccgctgctcacctgtgtcagggctaggaggcaggggctgcaggctcagcctgacccaggccggccagcatggcagagaggtcctgcatgaacagcttcacctgggggggcccagcacgaagtcacatcccagccccagagtcactgtccagcccccacccctcaacacgcgggggaggccgaaaggtagggcggggactggagatcccctcattaaaagaacagtgatgatggtggttcccagaggtggtgactgagatcctaaaccgttctgggttttgaaagcctcaggccaaccttcccaactgctgcgtgagcagacaccttcacagcttcctcgctgctgtcacctgcactatccaattagtattttcatttacatcaatcagctttattttcttgtaactggatcagtcatattcattggtttgtgacctactcttatctccgtgggtggctctccttttgttttaattaacttctttatgaatatgaacttaataaataccatggatccattgtaaaaactagaactt

SEQ ID NO: 65612 - DNA, 3456 bp, Homo sapiens
ggctggtacggtccgggatttaggatcagcgcgcggcccgaatggcggccgacaagggcccggcggctggacctcggtcgcgagctgccatggcccagtggaggaagaagaaagggctccggaagcgccgaggcgcggcctcccaggcccgcggcagcgactcggaggacggcgagtttgagatccaggcggaagatgacgcccgggcccggaagctgggacctggaagacccctgcccaccttccccacctcggaatgcacctcggatgtggagccggacacccgggagatggtgcgtgcccagaacaagaagaagaagaagtctggaggcttccagtccatgggcctgagctacccggtgttcaaaggcatcatgaagaaggggtacaaggtgccaacacccatccagaggaagaccatcccggtgatcttggatggcaaggacgtggtggccatggcccggacgggcagtggcaagacagcctgcttcctcctcccaatgttcgagcggctcaagacccacagtgcccagaccggggcccgcgccctcatcctctcgccgacccgagagctggccctgcagaccctgaagttcactaaggagctaggcaagttcactggcctcaagactgccctgatcctgggtggagacaggatggaagaccagtttgcagccctgcacgaaaatcccgacataattattgccacgcccggacggttggtgcatgtggctgtggaaatgagcctgaagctgcagagtgtggaatacgtggtgttcgatgaagctgaccggctttttgaaatgggtttcgcagagcagctgcaggagatcatcgcccgcctccccgggggccaccagacggtgctgttctccgccacgctgcccaaactgctggtggaatttgcccgggctggcctcacggagcccgtgctcatccggcttgacgtggataccaagctcaacgagcagctgaagacctccttcttcctcgtgcgggaggacaccaaggctgccgtgctgctccacctgctgcacaacgtggtgcggccccaggaccagaccgtggtgtttgtggccacgaagcaccacgccgagtacctcactgagctgctgacgacccagcgggtgagctgcgcccacatctacagtgccctagacccgacagcccgcaagatcaatctcgccaaattcacgcttggcaagtgctccactctcattgtgactgactgtcctggacttgatgggggatgaagcccagaacctgacgaggggccggcagcagctcaagtgggaccgtaagaagaagcggtttgtgggacagtcaggacaggaagacaagaagaagattaagacagagagcggccgctacatcagcagctcctacaagcgagacctctatcagaagtggaaacagaaacagaaaattgatgatcgtgactcggacgaagaaggggcatctgaccggcgaggcccagagcgaagaggtgggaagcgagaccgtggccaagcaggtgcatcccggccccacgccccaggcacccctgcaggccgagtccgcccggaactcaagaccaagcagcagatcctgaagcagcggcgccgggcccagaagctgcacttcctgcagcgtggtggcctcaagcagctctctgcccgcaaccgccgccgcgtccaggagctgcagcagggcgccttcggccggggtgcccgctccaagaagggcaagatgcggaagaggatgtgaggaccaggacccagccccgtggctccttgattggccttagggtgggcatcagcagacgttcccgtgcaccactgtgtgcctggccctgtgctgggcactgggggcactccctgcaggagccatcatctgtgaaaaggagcactgtatggccacagaagggcagcagctgcgtcagcctaagacagagacatttgaacagggccttgaagggtgtgcaggagttcgccagcaaagccaggcaggccaagacttgagttggcaactcagctgctgctgcttccatgtgttctgggttcagaggtcatggctgcaccggtcagagccctgagtgcctcagggtttggcaatggaatttttaatgtaataaatctttattgagcactgctggtggccaggagtgcggtctacttggggaactggaatggagagacccaggtactaaaatcccagctaacgtggcagaggagttgcgggtctcctgagggtgagttctgctgccttgtccatttagcgatgaggaaagtgaagctcagagcacaaaccaggtgccagaggcgggagttggtcccccttcctcccactggacatggttgcagctgggagtgggctgggggaggggaacaggatgcccagcccagggggcaaggacacagctgctcccctctggctatgaagaggttaacgcggcccctccacacctggaggtcagaacctggcctgtcctctgtcttcttgccacccaccccctgtttgaggttctgagaaggtcaagggcagccccagcagctggattctcaggctgggcccctcacctggcagagtccatagtggagggggccttggtgatctctcatctagcatggaccctgttctgagacctgacaaagagttttttttcatgccccaaccaccctggcagggagggcctggtctgatctcattttagaggcagttgccccacacatagccccttgaccttcccatcacctcctcatcagggcctgcatttatggagtgcttgctatgtgcccctcatggcaggcccacagcactctgaacaggcacagccctcccatcttcccaatgaggaaacggattcaggaagagccactcagtccacaccccattggaaatgtgggccctcctatctcagggtctctcaggggttccctctcccgctgctcacctgtgtcagggctaggaggcaggggctgcaggctcagcctgacccaggccggccagcatggcagagaggtcctgcatgaacagcttcacctgggggggcccagcacgaagtcacatcccagccccagagtcactgtccagcccccacccctcaacacgcgggggaggccgaaaggtagggcggggactggagatcccctcattaaaagaacagtgatgatggtggttcccagaggtggtgactgagatcctaaaccgttctgggttttgaaagcctcaggccaaccttcccaactgctgcgtgagcagacaccttcacagcttcctcgctgctgtcacctgcactatccaattagtattttcatttacatcaatcagctttattttcttgtaactggatcagtcatattcattggtttgtgacctactcttatctccgtgggtggctctccttttgttttaattaacttctttatgaatatgaacttaataaataccatggatccattgtaaaaactagaactt

SEQ ID NO: 65613 - DNA, 4168 bp, Homo sapiens
ggctggtacggtccgggatttaggatcagcgcgcggcccgaatggcggccgacaagggcccggcggctggacctcggtcgcgagctgccatggcccagtggaggaagaagaaagggctccggaagcgccgaggcgcggcctcccaggcccgcggcagcgactcggaggacggcgagtttgagatccaggcggaagatgacgcccgggcccggaagctgggacctggaagacccctgcccaccttccccacctcggaatgcacctcggatgtggagccggacacccgggagatggtgcgtgcccagaacaagaagaagaagaagtctggaggcttccagtccatgggcctgagctacccggtgttcaaaggcatcatgaagaaggggtacaaggtgccaacacccatccagaggaagaccatcccggtgatcttggatggcaaggacgtggtggccatggcccggacgggcagtggcaagacagcctgcttcctcctcccaatgttcgagcggctcaagacccacagtgcccagaccggggcccgcgccctcatcctctcgccgacccgagagctggccctgcagaccctgaagttcactaaggagctaggcaagttcactggcctcaagactgccctgatcctgggtggagacaggatggaagaccagtttgcagccctgcacgaaaatcccgacataattattgccacgcccggacggttggtgcatgtggctgtggaaatgagcctgaagctgcagagtgtggaatacgtggtgttcgatgaagctgaccggctttttgaaatgggtttcgcagagcagctgcaggagatcatcgcccgcctccccgggggccaccagacggtgctgttctccgccacgctgcccaaactgctggtggaatttgcccgggctggcctcacggagcccgtgctcatccggcttgacgtggataccaagctcaacgagcagctgaagacctccttcttcctcgtgcgggaggacaccaaggctgccgtgctgctccacctgctgcacaacgtggtgcggccccaggaccagaccgtggtgtttgtggccacgaagcaccacgccgagtacctcactgagctgctgacgacccagcgggtgagctgcgcccacatctacagtgccctagacccgacagcccgcaagatcaatctcgccaaattcacgcttggcaagtgctccactctcattgtgactgacctggccgcccgaggcctggacatcccgctgctggacaatgtcatcaactacagcttccccgccaagggcaaactcttcctgcaccgcgtgggccgtgtggctcgggctggccgaagtggcacagcctactccttggtggcccctgatgaaatcccctacctgctggatctgcacctgttcctgggccgctccctcaccctcgcccgacccctcaaggagccctcaggtgtggccggtgtggatggcatgctgggtcgggtgccacagagtgtggtggacgaggaggacagtggtctgcagagcaccctggaggcatcgctggagctacggggcctggcccgcgttgctgataacgcccagcagcagtatgtgcgctcacgcccggcgccctcgcctgagtccatcaagagggccaaggagatggaccttgtggggctgggcctgcaccccctcttcagctcgcgttttgaggaggaggagctgcagcggctgaggctggtggacagcataaagaactaccgctcccgggcgactatctttgagatcaacgcctccagccgagacctgtgcagccaggtgatgcgcgccaagcggcagaaggaccgcaaggccatcgcccgcttccagcagggacagcaggggcggcaggagcagcaggagggcccagtgggcccagccccgagccgcccagcactgcaggagaagcagcctgagaaggaggaggaggaggaggcgggagagagtgtggaggacattttctcagaggtcgtgggccggaagcggcagcggtcaggacccaacaggggagccaagaggcggagggaggaggcccggcagcgggaccaggaattctacatcccctaccggcccaaggactttgacagcgagcggggcctgagcatcagcggggaagggggagcctttgagcagcaggcagctggcgctgtcctggacttgatgggggatgaagcccagaacctgacgaggggccggcagcagctcaagtgggaccgtaagaagaagcggtttgtgggacagtcaggacaggaagacaagaagaagattaagacagagagcggccgctacatcagcagctcctacaagcgagacctctatcagaagtggaaacagaaacagaaaattgatgatcgtgactcggacgaagaaggggcatctgaccggcgaggcccagagcgaagaggtgggaagcgagaccgtggccaagcaggtgcatcccggccccacgccccaggcacccctgcaggccgagtccgcccggaactcaagaccaagcagcagatcctgaagcagcggcgccgggcccagaagctgcacttcctgcagcgagccatcatctgtgaaaaggagcactgtatggccacagaagggcagcagctgcgtcagcctaagacagagacatttgaacagggccttgaagggtgtgcaggagttcgccagcaaagccaggcaggccaagacttgagttggcaactcagctgctgctgcttccatgtgttctgggttcagaggtcatggctgcaccggtcagagccctgagtgcctcagggtttggcaatggaatttttaatgtaataaatctttattgagcactgctggtggccaggagtgcggtctacttggggaactggaatggagagacccaggtactaaaatcccagctaacgtggcagaggagttgcgggtctcctgagggtgagttctgctgccttgtccatttagcgatgaggaaagtgaagctcagagcacaaaccaggtgccagaggcgggagttggtcccccttcctcccactggacatggttgcagctgggagtgggctgggggaggggaacaggatgcccagcccagggggcaaggacacagctgctcccctctggctatgaagaggttaacgcggcccctccacacctggaggtcagaacctggcctgtcctctgtcttcttgccacccaccccctgtttgaggttctgagaaggtcaagggcagccccagcagctggattctcaggctgggcccctcacctggcagagtccatagtggagggggccttggtgatctctcatctagcatggaccctgttctgagacctgacaaagagttttttttcatgccccaaccaccctggcagggagggcctggtctgatctcattttagaggcagttgccccacacatagccccttgaccttcccatcacctcctcatcagggcctgcatttatggagtgcttgctatgtgcccctcatggcaggcccacagcactctgaacaggcacagccctcccatcttcccaatgaggaaacggattcaggaagagccactcagtccacaccccattggaaatgtgggccctcctatctcagggtctctcaggggttccctctcccgctgctcacctgtgtcagggctaggaggcaggggctgcaggctcagcctgacccaggccggccagcatggcagagaggtcctgcatgaacagcttcacctgggggggcccagcacgaagtcacatcccagccccagagtcactgtccagcccccacccctcaacacgcgggggaggccgaaaggtagggcggggactggagatcccctcattaaaagaacagtgatgatggtggttcccagaggtggtgactgagatcctaaaccgttctgggttttgaaagcctcaggccaaccttcccaactgctgcgtgagcagacaccttcacagcttcctcgctgctgtcacctgcactatccaattagtattttcatttacatcaatcagctttattttcttgtaactggatcagtcatattcattggtttgtgacctactcttatctccgtgggtggctctccttttgttttaattaacttctttatgaatatgaacttaataaataccatggatccattgtaaaaactagaactt

SEQ ID NO: 65614 - DNA, 3780 bp, Homo sapiens
ggctggtacggtccgggatttaggatcagcgcgcggcccgaatggcggccgacaagggcccggcggctggacctcggtcgcgagctgccatggcccagtggaggaagaagaaagggctccggaagcgccgaggcgcggcctcccaggcccgcggcagcgactcggaggacggcgagtttgagatccaggcggaagatgacgcccgggcccggaagctgggacctggaagacccctgcccaccttccccacctcggaatgcacctcggatgtggagccggacacccgggagatggtgcgtgcccagaacaagaagaagaagaagtctggaggcttccagtccatgggcctgagctacccggtgttcaaaggcatcatgaagaaggggtacaaggtgccaacacccatccagaggaagaccatcccggtgatcttggatggcaaggacgtggtggccatggcccggacgggcagtggcaagacagcctgcttcctcctcccaatgttcgagcggctcaagacccacagtgcccagaccggggcccgcgccctcatcctctcgccgacccgagagctggccctgcagaccctgaagttcactaaggagctaggcaagttcactggcctcaagactgccctgatcctgggtggagacaggatggaagaccagtttgcagccctgcacgaaaatcccgacataattattgccacgcccggacggttggtgcatgtggctgtggaaatgagcctgaagctgcagagtgtggaatacgtggtgttcgatgaagctgaccggctttttgaaatgggtttcgcagagcagctgcaggagatcatcgcccgcctccccgggggccaccagacggtgctgttctccgccacgctgcccaaactgctggtggaatttgcccgggctggcctcacggagcccgtgctcatccggcttgacgtggataccaagctcaacgagcagctgaagacctccttcttcctcgtgcgggaggacaccaaggctgccgtgctgctccacctgctgcacaacgtggtgcggccccaggaccagaccgtggtgtttgtggccacgaagcaccacgccgagtacctcactgagctgctgacgacccagcgggtgagctgcgcccacatctacagtgccctagacccgacagcccgcaagatcaatctcgccaaattcacgcttggcaagtgctccactctcattgtgactgacctggccgcccgaggcctggacatcccgctgctggacaatgtcatcaactacagcttccccgccaagggcaaactcttcctgcaccgcgtgggccgtgtggctcgggctggccgaagtggcacagcctactccttggtggcccctgatgaaatcccctacctgctggatctgcacctgttcctgggccgctccctcaccctcgcccgacccctcaaggagccctcaggtgtggccggtgtggatggcatgctgggtcgggtgccacagagtgtggtggacgaggaggacagtggtctgcagagcaccctggaggcatcgctggagctacggggcctggcccgcgttgctgataacgcccagcagcagtatgtgcgctcacgcccggcgccctcgcctgagtccatcaagagggccaaggagatggaccttgtggggctgggcctgcaccccctcttcagctcgcgttttgaggaggaggagctgcagcggctgaggctggtggacagcataaagaactaccgctcccgggcgactatctttgagatcaacgcctccagccgagacctgtgcagccaggtgatgcgcgccaagcggcagaaggaccgcaaggccatcgcccgcttccagcagggacagcaggggcggcaggagcagcaggagggcccagtgggcccagccccgagccgcccagcactgcaggagaagcagcctgagaaggaggaggaggaggaggcgggagagagtgtggaggacattttctcagaggtcgtgggccggaagcggcagcggtcaggacccaacaggggagccaagaggcggagggaggaggcccggcagcgggaccaggaattctacatcccctaccggcccaaggactttgacagcgagcggggcctgagcatcagcggggaagggggagcctttgagcagcaggcagctggcgctgtcctggacttgatgggggatgaagcccagaacctgacgaggggccggcagcagctcaagtgggaccgtaagaagaagcggtttgtgggacagtcaggacaggaagacaagaagaagattaagacagagagcggccgctacatcagcagctcctacaagcgagacctctatcagaagtggaaacagaaacagaaaattgatgatcgtgacggtcagagccctgagtgcctcagggtttggcaatggaatttttaatgtaataaatctttattgagcactgctggtggccaggagtgcggtctacttggggaactggaatggagagacccaggtactaaaatcccagctaacgtggcagaggagttgcgggtctcctgagggtgagttctgctgccttgtccatttagcgatgaggaaagtgaagctcagagcacaaaccaggtgccagaggcgggagttggtcccccttcctcccactggacatggttgcagctgggagtgggctgggggaggggaacaggatgcccagcccagggggcaaggacacagctgctcccctctggctatgaagaggttaacgcggcccctccacacctggaggtcagaacctggcctgtcctctgtcttcttgccacccaccccctgtttgaggttctgagaaggtcaagggcagccccagcagctggattctcaggctgggcccctcacctggcagagtccatagtggagggggccttggtgatctctcatctagcatggaccctgttctgagacctgacaaagagttttttttcatgccccaaccaccctggcagggagggcctggtctgatctcattttagaggcagttgccccacacatagccccttgaccttcccatcacctcctcatcagggcctgcatttatggagtgcttgctatgtgcccctcatggcaggcccacagcactctgaacaggcacagccctcccatcttcccaatgaggaaacggattcaggaagagccactcagtccacaccccattggaaatgtgggccctcctatctcagggtctctcaggggttccctctcccgctgctcacctgtgtcagggctaggaggcaggggctgcaggctcagcctgacccaggccggccagcatggcagagaggtcctgcatgaacagcttcacctgggggggcccagcacgaagtcacatcccagccccagagtcactgtccagcccccacccctcaacacgcgggggaggccgaaaggtagggcggggactggagatcccctcattaaaagaacagtgatgatggtggttcccagaggtggtgactgagatcctaaaccgttctgggttttgaaagcctcaggccaaccttcccaactgctgcgtgagcagacaccttcacagcttcctcgctgctgtcacctgcactatccaattagtattttcatttacatcaatcagctttattttcttgtaactggatcagtcatattcattggtttgtgacctactcttatctccgtgggtggctctccttttgttttaattaacttctttatgaatatgaacttaataaataccatggatccattgtaaaaactagaactt

SEQ ID NO: 65615 - DNA, 2641 bp, Homo sapiens
ggctggtacggtccgggatttaggatcagcgcgcggcccgaatggcggccgacaagggcccggcggctggacctcggtcgcgagctgccatggcccagtggaggaagaagaaagggctccggaagcgccgaggcgcggcctcccaggcccgcggcagcgactcggaggacggcgagtttgagatccaggcggaagatgacgcccgggcccggaagctgggacctggaagacccctgcccaccttccccacctcggaatgcacctcggatgtggagccggacacccgggagatggtgcgtgcccagaacaagaagaagaagaagtctggaggcttccagtccatgggcctgagctacccggtgttcaaaggcatcatgaagaagggggagcctttgagcagcaggcagctggcgctgtcctggacttgatgggggatgaagcccagaacctgacgaggggccggcagcagctcaagtgggaccgtaagaagaagcggtttgtgggacagtcaggacaggaagacaagaagaagattaagacagagagcggccgctacatcagcagctcctacaagcgagacctctatcagaagtggaaacagaaacagaaaattgatgatcgtgactcggacgaagaaggggcatctgaccggcgaggcccagagcgaagaggtgggaagcgagaccgtggccaagcaggtgcatcccggccccacgccccaggcacccctgcaggccgagtccgcccggaactcaagaccaagcagcagatcctgaagcagcggcgccgggcccagaagctgcacttcctgcagcgtggtggcctcaagcagctctctgcccgcaaccgccgccgcgtccaggagctgcagcagggcgccttcggccggggtgcccgctccaagaagggcaagatgcggaagaggatgtgaggaccaggacccagccccgtggctccttgattggccttagggtgggcatcagcagacgttcccgtgcaccactgtgtgcctggccctgtgctgggcactgggggcactccctgcaggagccatcatctgtgaaaaggagcactgtatggccacagaagggcagcagctgcgtcagcctaagacagagacatttgaacagggccttgaagggtgtgcaggagttcgccagcaaagccaggcaggccaagacttgagttggcaactcagctgctgctgcttccatgtgttctgggttcagaggtcatggctgcaccggtcagagccctgagtgcctcagggtttggcaatggaatttttaatgtaataaatctttattgagcactgctggtggccaggagtgcggtctacttggggaactggaatggagagacccaggtactaaaatcccagctaacgtggcagaggagttgcgggtctcctgagggtgagttctgctgccttgtccatttagcgatgaggaaagtgaagctcagagcacaaaccaggtgccagaggcgggagttggtcccccttcctcccactggacatggttgcagctgggagtgggctgggggaggggaacaggatgcccagcccagggggcaaggacacagctgctcccctctggctatgaagaggttaacgcggcccctccacacctggaggtcagaacctggcctgtcctctgtcttcttgccacccaccccctgtttgaggttctgagaaggtcaagggcagccccagcagctggattctcaggctgggcccctcacctggcagagtccatagtggagggggccttggtgatctctcatctagcatggaccctgttctgagacctgacaaagagttttttttcatgccccaaccaccctggcagggagggcctggtctgatctcattttagaggcagttgccccacacatagccccttgaccttcccatcacctcctcatcagggcctgcatttatggagtgcttgctatgtgcccctcatggcaggcccacagcactctgaacaggcacagccctcccatcttcccaatgaggaaacggattcaggaagagccactcagtccacaccccattggaaatgtgggccctcctatctcagggtctctcaggggttccctctcccgctgctcacctgtgtcagggctaggaggcaggggctgcaggctcagcctgacccaggccggccagcatggcagagaggtcctgcatgaacagcttcacctgggggggcccagcacgaagtcacatcccagccccagagtcactgtccagcccccacccctcaacacgcgggggaggccgaaaggtagggcggggactggagatcccctcattaaaagaacagtgatgatggtggttcccagaggtggtgactgagatcctaaaccgttctgggttttgaaagcctcaggccaaccttcccaactgctgcgtgagcagacaccttcacagcttcctcgctgctgtcacctgcactatccaattagtattttcatttacatcaatcagctttattttcttgtaactggatcagtcatattcattggtttgtgacctactcttatctccgtgggtggctctccttttgttttaattaacttctttatgaatatgaacttaataaataccatggatccattgtaaaaactagaactt

SEQ ID NO: 65616 - DNA, 2441 bp, Homo sapiens
atggtcttaggaccttcctgtgcaggaaccatggccgacctttccctttttgtacaagtgatctatttttttcactagcaaaaccatttaagatttctatataggatgtgctgtttgattagtttgacagataatcccccaaggactttgacagcgagcggggcctgagcatcagcggggaagggggagcctttgagcagcaggcagctggcgctgtcctggacttgatgggggatgaagcccagaacctgacgaggggccggcagcagctcaagtgggaccgtaagaagaagcggtttgtgggacagtcaggacaggaagacaagaagaagattaagacagagagcggccgctacatcagcagctcctacaagcgagacctctatcagaagtggaaacagaaacagaaaattgatgatcgtgactcggacgaagaaggggcatctgaccggcgaggcccagagcgaagaggtgggaagcgagaccgtggccaagcaggtgcatcccggccccacgccccaggcacccctgcaggccgagtccgcccggaactcaagaccaagcagcagatcctgaagcagcggcgccgggcccagaagctgcacttcctgcagcgtggtggcctcaagcagctctctgcccgcaaccgccgccgcgtccaggagctgcagcagggcgccttcggccggggtgcccgctccaagaagggcaagatgcggaagaggatgtgaggaccaggacccagccccgtggctccttgattggccttagggtgggcatcagcagacgttcccgtgcaccactgtgtgcctggccctgtgctgggcactgggggcactccctgcaggagccatcatctgtgaaaaggagcactgtatggccacagaagggcagcagctgcgtcagcctaagacagagacatttgaacagggccttgaagggtgtgcaggagttcgccagcaaagccaggcaggccaagacttgagttggcaactcagctgctgctgcttccatgtgttctgggttcagaggtcatggctgcaccggtcagagccctgagtgcctcagggtttggcaatggaatttttaatgtaataaatctttattgagcactgctggtggccaggagtgcggtctacttggggaactggaatggagagacccaggtactaaaatcccagctaacgtggcagaggagttgcgggtctcctgagggtgagttctgctgccttgtccatttagcgatgaggaaagtgaagctcagagcacaaaccaggtgccagaggcgggagttggtcccccttcctcccactggacatggttgcagctgggagtgggctgggggaggggaacaggatgcccagcccagggggcaaggacacagctgctcccctctggctatgaagaggttaacgcggcccctccacacctggaggtcagaacctggcctgtcctctgtcttcttgccacccaccccctgtttgaggttctgagaaggtcaagggcagccccagcagctggattctcaggctgggcccctcacctggcagagtccatagtggagggggccttggtgatctctcatctagcatggaccctgttctgagacctgacaaagagttttttttcatgccccaaccaccctggcagggagggcctggtctgatctcattttagaggcagttgccccacacatagccccttgaccttcccatcacctcctcatcagggcctgcatttatggagtgcttgctatgtgcccctcatggcaggcccacagcactctgaacaggcacagccctcccatcttcccaatgaggaaacggattcaggaagagccactcagtccacaccccattggaaatgtgggccctcctatctcagggtctctcaggggttccctctcccgctgctcacctgtgtcagggctaggaggcaggggctgcaggctcagcctgacccaggccggccagcatggcagagaggtcctgcatgaacagcttcacctgggggggcccagcacgaagtcacatcccagccccagagtcactgtccagcccccacccctcaacacgcgggggaggccgaaaggtagggcggggactggagatcccctcattaaaagaacagtgatgatggtggttcccagaggtggtgactgagatcctaaaccgttctgggttttgaaagcctcaggccaaccttcccaactgctgcgtgagcagacaccttcacagcttcctcgctgctgtcacctgcactatccaattagtattttcatttacatcaatcagctttattttcttgtaactggatcagtcatattcattggtttgtgacctactcttatctccgtgggtggctctccttttgttttaattaacttctttatgaatatgaacttaataaataccatggatccattgtaaaaactagaactt

SEQ ID NO: 65617 - DNA, 2260 bp, Homo sapiens
aacgctaggtcgaggctcggttgatcggccgagtgtcctggacttgatgggggatgaagcccagaacctgacgaggggccggcagcagctcaagtgggaccgtaagaagaagcggtttgtgggacagtcaggacaggaagacaagaagaagattaagacagagagcggccgctacatcagcagctcctacaagcgagacctctatcagaagtggaaacagaaacagaaaattgatgatcgtgactcggacgaagaaggggcatctgaccggcgaggcccagagcgaagaggtgggaagcgagaccgtggccaagcaggtgcatcccggccccacgccccaggcacccctgcaggccgagtccgcccggaactcaagaccaagcagcagatcctgaagcagcggcgccgggcccagaagctgcacttcctgcagcgtggtggcctcaagcagctctctgcccgcaaccgccgccgcgtccaggagctgcagcagggcgccttcggccggggtgcccgctccaagaagggcaagatgcggaagaggatgtgaggaccaggacccagccccgtggctccttgattggccttagggtgggcatcagcagacgttcccgtgcaccactgtgtgcctggccctgtgctgggcactgggggcactccctgcaggagccatcatctgtgaaaaggagcactgtatggccacagaagggcagcagctgcgtcagcctaagacagagacatttgaacagggccttgaagggtgtgcaggagttcgccagcaaagccaggcaggccaagacttgagttggcaactcagctgctgctgcttccatgtgttctgggttcagaggtcatggctgcaccggtcagagccctgagtgcctcagggtttggcaatggaatttttaatgtaataaatctttattgagcactgctggtggccaggagtgcggtctacttggggaactggaatggagagacccaggtactaaaatcccagctaacgtggcagaggagttgcgggtctcctgagggtgagttctgctgccttgtccatttagcgatgaggaaagtgaagctcagagcacaaaccaggtgccagaggcgggagttggtcccccttcctcccactggacatggttgcagctgggagtgggctgggggaggggaacaggatgcccagcccagggggcaaggacacagctgctcccctctggctatgaagaggttaacgcggcccctccacacctggaggtcagaacctggcctgtcctctgtcttcttgccacccaccccctgtttgaggttctgagaaggtcaagggcagccccagcagctggattctcaggctgggcccctcacctggcagagtccatagtggagggggccttggtgatctctcatctagcatggaccctgttctgagacctgacaaagagttttttttcatgccccaaccaccctggcagggagggcctggtctgatctcattttagaggcagttgccccacacatagccccttgaccttcccatcacctcctcatcagggcctgcatttatggagtgcttgctatgtgcccctcatggcaggcccacagcactctgaacaggcacagccctcccatcttcccaatgaggaaacggattcaggaagagccactcagtccacaccccattggaaatgtgggccctcctatctcagggtctctcaggggttccctctcccgctgctcacctgtgtcagggctaggaggcaggggctgcaggctcagcctgacccaggccggccagcatggcagagaggtcctgcatgaacagcttcacctgggggggcccagcacgaagtcacatcccagccccagagtcactgtccagcccccacccctcaacacgcgggggaggccgaaaggtagggcggggactggagatcccctcattaaaagaacagtgatgatggtggttcccagaggtggtgactgagatcctaaaccgttctgggttttgaaagcctcaggccaaccttcccaactgctgcgtgagcagacaccttcacagcttcctcgctgctgtcacctgcactatccaattagtattttcatttacatcaatcagctttattttcttgtaactggatcagtcatattcattggtttgtgacctactcttatctccgtgggtggctctccttttgttttaattaacttctttatgaatatgaacttaataaataccatggatccattgtaaaaactagaactt

SEQ ID NO: 65618 - DNA, 1446 bp, Homo sapiens
ggctggtacggtccgggatttaggatcagcgcgcggcccgaatggcggccgacaagggcccggcggctggacctcggtcgcgagctgccatggcccagtggaggaagaagaaagggctccggaagcgccgaggcgcggcctcccaggcccgcggcagcgactcggaggacggcgagtttgagatccaggcggaagatgacgcccgggcccggaagctgggacctggaagacccctgcccaccttccccacctcggaatgcacctcggatgtggagccggacacccgggagatggtgcgtgcccagaacaagaagaagaagaagtctggaggcttccagtccatgggcctgagctacccggtgttcaaaggcatcatgaagaaggggtacaaggtgccaacacccatccagaggaagaccatcccggtgatcttggatggcaaggacgtggtggccatggcccggacgggcagtggcaagacagcctgcttcctcctcccaatgttcgagcggctcaagacccacagtgcccagaccggggcccgcgccctcatcctctcgccgacccgagagctggccctgcagaccctgaagttcactaaggagctaggcaagttcactggcctcaagactgccctgatcctgggtggagacaggatggaagaccagtttgcagccctgcacgaaaatcccgacataattattgccacgcccggacggttggtgcatgtggctgtggaaatgagcctgaagctgcagagtgtggaatacgtggtgttcgatgaagctgaccggctttttgaaatgggtttcgcagagcagctgcaggagatcatcgcccgcctccccgggggccaccagacggtgctgttctccgccacgctgcccaaactgctggtggaatttgcccgggctggcctcacggagcccgtgctcatccggcttgacgtggataccaagctcaacgagcagctgaagacctccttcttcctcgtgcgggaggacaccaaggctgccgtgctgctccacctgctgcacaacgtggtgcggccccaggaccagaccgtggtgtttgtggccacgaagcaccacgccgagtacctcactgagtgtcctggacttgatgggggatgaagcccagaacctgacgaggggccggcagcagctcaagtgggaccgtaagaagaagcggtttgtgggacagtcaggacaggaagacaagaagaagattaagacagagagcggccgctacatcagcagctcctacaagcgagacctctatcagaagtggaaacagaaacagaaaattgatgatcgtgactcggacgaagaaggggcatctgaccggcgaggcccagagcgaagaggtgggaagcgagaccgtggccaagcaagatgcatctcagaccccactttcccaggtatcacacgcggccgagttacatcc

SEQ ID NO: 65619 - DNA, 2165 bp, Homo sapiens
gcttcagctgcggctgggataacggaactctgtctgctggggcaggtggggaggagccttctcccatcccagggcttcacgcagcttccttaacgaggtttcccagctatcagaagtggaaacagaaacagaaaattgatgatcgtgactcggacgaagaaggggcatctgaccggcgaggcccagagcgaagaggtgggaagcgagaccgtggccaagcaggtgcatcccggccccacgccccaggcacccctgcaggccgagtccgcccggaactcaagaccaagcagcagatcctgaagcagcggcgccgggcccagaagctgcacttcctgcagcgtggtggcctcaagcagctctctgcccgcaaccgccgccgcgtccaggagctgcagcagggcgccttcggccggggtgcccgctccaagaagggcaagatgcggaagaggatgtgaggaccaggacccagccccgtggctccttgattggccttagggtgggcatcagcagacgttcccgtgcaccactgtgtgcctggccctgtgctgggcactgggggcactccctgcaggagccatcatctgtgaaaaggagcactgtatggccacagaagggcagcagctgcgtcagcctaagacagagacatttgaacagggccttgaagggtgtgcaggagttcgccagcaaagccaggcaggccaagacttgagttggcaactcagctgctgctgcttccatgtgttctgggttcagaggtcatggctgcaccggtcagagccctgagtgcctcagggtttggcaatggaatttttaatgtaataaatctttattgagcactgctggtggccaggagtgcggtctacttggggaactggaatggagagacccaggtactaaaatcccagctaacgtggcagaggagttgcgggtctcctgagggtgagttctgctgccttgtccatttagcgatgaggaaagtgaagctcagagcacaaaccaggtgccagaggcgggagttggtcccccttcctcccactggacatggttgcagctgggagtgggctgggggaggggaacaggatgcccagcccagggggcaaggacacagctgctcccctctggctatgaagaggttaacgcggcccctccacacctggaggtcagaacctggcctgtcctctgtcttcttgccacccaccccctgtttgaggttctgagaaggtcaagggcagccccagcagctggattctcaggctgggcccctcacctggcagagtccatagtggagggggccttggtgatctctcatctagcatggaccctgttctgagacctgacaaagagttttttttcatgccccaaccaccctggcagggagggcctggtctgatctcattttagaggcagttgccccacacatagccccttgaccttcccatcacctcctcatcagggcctgcatttatggagtgcttgctatgtgcccctcatggcaggcccacagcactctgaacaggcacagccctcccatcttcccaatgaggaaacggattcaggaagagccactcagtccacaccccattggaaatgtgggccctcctatctcagggtctctcaggggttccctctcccgctgctcacctgtgtcagggctaggaggcaggggctgcaggctcagcctgacccaggccggccagcatggcagagaggtcctgcatgaacagcttcacctgggggggcccagcacgaagtcacatcccagccccagagtcactgtccagcccccacccctcaacacgcgggggaggccgaaaggtagggcggggactggagatcccctcattaaaagaacagtgatgatggtggttcccagaggtggtgactgagatcctaaaccgttctgggttttgaaagcctcaggccaaccttcccaactgctgcgtgagcagacaccttcacagcttcctcgctgctgtcacctgcactatccaattagtattttcatttacatcaatcagctttattttcttgtaactggatcagtcatattcattggtttgtgacctactcttatctccgtgggtggctctccttttgttttaattaacttctttatgaatatgaacttaataaataccatggatccattgtaaaaactagaactt

SEQ ID NO: 65620 - DNA, 3271 bp, Homo sapiens
ggctggtacggtccgggatttaggatcagcgcgcggcccgaatggcggccgacaagggcccggcggctggacctcggtcgcgagctgccatggcccagtggaggaagaagaaagggctccggaagcgccgaggcgcggcctcccaggcccgcggcagcgactcggaggacggcgagtttgagatccaggcggaagatgacgcccgggcccggaagctgggacctggaagacccctgcccaccttccccacctcggaatgcacctcggatgtggagccggacacccgggagatggtgcgtgcccagaacaagaagaagaagaagtctggaggcttccagtccatgggcctgagctacccggtgttcaaaggcatcatgaagaaggggtacaaggtgccaacacccatccagaggaagaccatcccggtgatcttggatggcaaggacgtggtggccatggcccggacgggcagtggcaagacagcctgcttcctcctcccaatgttcgagcggctcaagacccacagtgcccagaccggggcccgcgccctcatcctctcgccgacccgagagctggccctgcagaccctgaagttcactaaggagctaggcaagttcactggcctcaagactgccctgatcctgggtggagacaggatggaagaccagtttgcagccctgcacgaaaatcccgacataattattgccacgcccggacggttggtgcatgtggctgtggaaatgagcctgaagctgcagagtgtggaatacgtggtgttcgatgaagctgaccggctttttgaaatgggtttcgcagagcagctgcaggagatcatcgcccgcctccccgggggccaccagacggtgctgttctccgccacgctgcccaaactgctggtggaatttgcccgggctggcctcacggagcccgtgctcatccggcttgacgtggataccaagctcaacgagcagctgaagacctccttcttcctcgtgcgggaggacaccaaggctgccgtgctgctccacctgctgcacaacgtggtgcggccccaggaccagaccgtggtgtttgtggccacgaagcaccacgccgagtacctcactgagctgctgacgacccagcgggtgagctgcgcccacatctacagtgccctagacccgacagcccgcaagatcaatctcgccaaattcacgcttggcaagtgctccactctcattgtgactgacctggccgcccgaggcctggacatcccgctgctggacaatgtcatcaactacagcttccccgccaagggcaaactcttcctgcaccgcgtgggccgtgtggctcgggctggccgaagtggcacagcctactccttggtggcccctgatgaaatcccctacctgctggatctgcacctgttcctgggccgctccctcaccctcgcccgacccctcaaggagccctcaggtgtggccggtgtggatggcatgctgggtcgggtgccacagagtgtggtggacgaggaggacagtggtctgcagagcaccctggaggcatcgctggagctacggggcctggcccgcgttgctgataacgcccagcagcagtatgtgcgctcacgcccggcgccctcgcctgagtccatcaagagggccaaggagatggaccttgtggggctgggcctgcaccccctcttcagctcgcgttttgaggaggaggagctgcagcggctgaggctggtggacagcataaagaactaccgctcccgggcgactatctttgagatcaacgcctccagccgagacctgtgcagccaggtgatgcgcgccaagcggcagaaggaccgcaaggccatcgcccgcttccagcagggacagcaggggcggcaggagcagcaggagggcccagtgggcccagccccgagccgcccagcactgcaggagaagcagcctgagaaggaggaggaggaggaggcgggagagagtgtggaggacattttctcagaggtcgtgggccggaagcggcagcggtcaggacccaacaggggagccaagaggcggagggaggaggcccggcagcgggaccaggaattctacatcccctaccggcccaaggactttgacagcgagcggggcctgagcatcagcggggaagggggagcctttgagcagcaggcagctggcgctgtcctggacttgatgggggatgaagcccagaacctgacgaggggccggcagcagctcaagtgggaccgtaagaagaagcggtttgtgggacagtcaggacaggaagacaagaagaagattaagacagagagcggccgctacatcagcagctcctacaagcgagacctctatcagaagtggaaacagaaacagaaaattgatgatcgtgactcggacgaagaaggggcatctgaccggcgaggcccagagcgaagaggtgggaagcgagaccgtggccaagcaggtgcatcccggccccacgccccaggcacccctgcaggccgagtccgcccggaactcaagaccaagcagcagatcctgaagcagcggcgccgggcccagaagctgcacttcctgcagcgtggtggcctcaagcagctctctgcccgcaaccgccgccgcgtccaggagctgcagcagggcgccttcggccggggtgcccgctccaagaagggcaagatgcggaagaggatgtgaggaccaggacccagccccgtggctccttgattggccttagggtgggcatcagcagacgttcccgtgcaccactgtgtgcctggccctgtgctgggcactgggggcactccctgcaggagccatcatctgtgaaaaggagcactgtatggccacagaagggcagcagctgcgtcagcctaagacagagacatttgaacagggccttgaagggtgtgcaggagttcgccagcaaagccaggcaggccaagacttgagttggcaactcagctgctgctgcttccatgtgttctgggttcagaggtcatggctgcaccggtcagagccctgagtgcctcagggtttggcaatggaatttttaatgtaataaatctttattgagaaaaaaaaaaactgaggcttatgccggtggggcaagaggtctgaaggcctgttagtgttctgacatttggcaaagggaactgcggtccaatggaggataattgaagcggaccgtaatggcgaaagaaaagagtgaaggggaacacaaagggcgagaaaaaaaacaatcgaaaggtatcaacatcaatagagagaacacaact

SEQ ID NO: 65621 - DNA, 4436 bp, Homo sapiens
ggctggtacggtccgggatttaggatcagcgcgcggcccgaatggcggccgacaagggcccggcggctggacctcggtcgcgagctgccatggcccagtggaggaagaagaaagggctccggaagcgccgaggcgcggcctcccaggcccgcggcagcgactcggaggacggcgagtttgagatccaggcggaagatgacgcccgggcccggaagctgggacctggaagacccctgcccaccttccccacctcggaatgcacctcggatgtggagccggacacccgggagatggtgcgtgcccagaacaagaagaagaagaagtctggaggcttccagtccatgggcctgagctacccggtgttcaaaggcatcatgaagaaggggtacaaggtgccaacacccatccagaggaagaccatcccggtgatcttggatggcaaggacgtggtggccatggcccggacgggcagtggcaagacagcctgcttcctcctcccaatgttcgagcggctcaagacccacagtgcccagaccggggcccgcgccctcatcctctcgccgacccgagagctggccctgcagaccctgaagttcactaaggagctaggcaagttcactggcctcaagactgccctgatcctgggtggagacaggatggaagaccagtttgcagccctgcacgaaaatcccgacataattattgccacgcccggacggttggtgcatgtggctgtggaaatgagcctgaagctgcagagtgtggaatacgtggtgttcgatgaagctgaccggctttttgaaatgggtttcgcagagcagctgcaggagatcatcgcccgcctccccgggggccaccagacggtgctgttctccgccacgctgcccaaactgctggtggaatttgcccgggctggcctcacggagcccgtgctcatccggcttgacgtggataccaagctcaacgagcagctgaagacctccttcttcctcgtgcgggaggacaccaaggctgccgtgctgctccacctgctgcacaacgtggtgcggccccaggaccagaccgtggtgtttgtggccacgaagcaccacgccgagtacctcactgagctgctgacgacccagcgggtgagctgcgcccacatctacagtgccctagacccgacagcccgcaagatcaatctcgccaaattcacgcttggcaagtgctccactctcattgtgactgacctggccgcccgaggcctggacatcccgctgctggacaatgtcatcaactacagcttccccgccaagggcaaactcttcctgcaccgcgtgggccgtgtggctcgggctggccgaagtggcacagcctactccttggtggcccctgatgaaatcccctacctgctggatctgcacctgttcctgggccgctccctcaccctcgcccgacccctcaaggagccctcaggtgtggccggtgtggatggcatgctgggtcgggtgccacagagtgtggtggacgaggaggacagtggtctgcagagcaccctggaggcatcgctggagctacggggcctggcccgcgttgctgataacgcccagcagcagtatgtgcgctcacgcccggcgccctcgcctgagtccatcaagagggccaaggagatggaccttgtggggctgggcctgcaccccctcttcagctcgcgttttgaggaggaggagctgcagcggctgaggctggtggacagcataaagaactaccgctcccgggcgactatctttgagatcaacgcctccagccgagacctgtgcagccaggtgatgcgcgccaagcggcagaaggaccgcaaggccatcgcccgcttccagcagggacagcaggggcggcaggagcagcaggagggcccagtgggcccagccccgagccgcccagcactgcaggagaagcagcctgagaaggaggaggaggaggaggcgggagagagtgtggaggacattttctcagaggtcgtgggccggaagcggcagcggtcaggacccaacaggggagccaagaggcggagggaggaggcccggcagcgggaccaggaattctacatcccctaccggcccaaggactttgacagcgagcggggcctgagcatcagcggggaagggggagcctttgagcagcaggcagctggcgctgtcctggacttgatgggggatgaagcccagaacctgacgaggggccggcagcagctcaagtggtgagtgatcgagtgagccgcccctccatgctcgggggaccgtaagaagaagcggtttgtgggacagtcaggacaggaagacaagaagaagattaagacagagagcggccgctacatcagcagctcctacaagcgagacctctatcagaagtggaaacagaaacagaaaattgatgatcgtgactcggacgaagaaggggcatctgaccggcgaggcccagagcgaagaggtgggaagcgagaccgtggccaagcaggtgcatcccggccccacgccccaggcacccctgcaggccgagtccgcccggaactcaagaccaagcagcagatcctgaagcagcggcgccgggcccagaagctgcacttcctgcagcgtggtggcctcaagcagctctctgcccgcaaccgccgccgcgtccaggagctgcagcagggcgccttcggccggggtgcccgctccaagaagggcaagatgcggaagaggatgtgaggaccaggacccagccccgtggctccttgattggccttagggtgggcatcagcagacgttcccgtgcaccactgtgtgcctggccctgtgctgggcactgggggcactccctgcaggagccatcatctgtgaaaaggagcactgtatggccacagaagggcagcagctgcgtcagcctaagacagagacatttgaacagggccttgaagggtgtgcaggagttcgccagcaaagccaggcaggccaagacttgagttggcaactcagctgctgctgcttccatgtgttctgggttcagaggtcatggctgcaccggtcagagccctgagtgcctcagggtttggcaatggaatttttaatgtaataaatctttattgagcactgctggtggccaggagtgcggtctacttggggaactggaatggagagacccaggtactaaaatcccagctaacgtggcagaggagttgcgggtctcctgagggtgagttctgctgccttgtccatttagcgatgaggaaagtgaagctcagagcacaaaccaggtgccagaggcgggagttggtcccccttcctcccactggacatggttgcagctgggagtgggctgggggaggggaacaggatgcccagcccagggggcaaggacacagctgctcccctctggctatgaagaggttaacgcggcccctccacacctggaggtcagaacctggcctgtcctctgtcttcttgccacccaccccctgtttgaggttctgagaaggtcaagggcagccccagcagctggattctcaggctgggcccctcacctggcagagtccatagtggagggggccttggtgatctctcatctagcatggaccctgttctgagacctgacaaagagttttttttcatgccccaaccaccctggcagggagggcctggtctgatctcattttagaggcagttgccccacacatagccccttgaccttcccatcacctcctcatcagggcctgcatttatggagtgcttgctatgtgcccctcatggcaggcccacagcactctgaacaggcacagccctcccatcttcccaatgaggaaacggattcaggaagagccactcagtccacaccccattggaaatgtgggccctcctatctcagggtctctcaggggttccctctcccgctgctcacctgtgtcagggctaggaggcaggggctgcaggctcagcctgacccaggccggccagcatggcagagaggtcctgcatgaacagcttcacctgggggggcccagcacgaagtcacatcccagccccagagtcactgtccagcccccacccctcaacacgcgggggaggccgaaaggtagggcggggactggagatcccctcattaaaagaacagtgatgatggtggttcccagaggtggtgactgagatcctaaaccgttctgggttttgaaagcctcaggccaaccttcccaactgctgcgtgagcagacaccttcacagcttcctcgctgctgtcacctgcactatccaattagtattttcatttacatcaatcagctttattttcttgtaactggatcagtcatattcattggtttgtgacctactcttatctccgtgggtggctctccttttgttttaattaacttctttatgaatatgaacttaataaataccatggatccattgtaaaaactagaactt

SEQ ID NO: 65622 - DNA, 4289 bp, Homo sapiens
cttttcagtgcctttgtctccattgtcatttattctttctgaagtttgtgattgtcagaaaggcctccctgggctagtcctggcccaggactaccctggctcctacaggtatcccaagggtgctgcagaggagggctaaaattagggatttgtgcccaaaggtttaaggacgggagctgatagagatccatggaacctgggttctagttggggctggtagttctggggttagttgctgggggcactgtgggtggaaggcagctttgttgctatctggaacaacagaaggagtgaattgaggtctgtagttgagcccatctcttcagaggaactctgttgttaccattcttttgcatatttcagcttgtatctcttgtcagggcaatgcctttgcctcatacctcagcactggcctttcctcagttccaagccttgggtctgtgttcctggggatggggtgtgcagccttgcctggacatttggttatgggaagggaaaccaaagagacctgttctatcaagctaaccccttctctcctctctaggatggaagaccagtttgcagccctgcacgaaaatcccgacataattattgccacgcccggacggttggtgcatgtggctgtggaaatgagcctgaagctgcagagtgtggaatacgtggtgttcgatgaagctgaccggctttttgaaatgggtttcgcagagcagctgcaggagatcatcgcccgcctccccgggggccaccagacggtgctgttctccgccacgctgcccaaactgctggtggaatttgcccgggctggcctcacggagcccgtgctcatccggcttgacgtggataccaagctcaacgagcagctgaagacctccttcttcctcgtgcgggaggacaccaaggctgccgtgctgctccacctgctgcacaacgtggtgcggccccaggaccagaccgtggtgtttgtggccacgaagcaccacgccgagtacctcactgagctgctgacgacccagcgggtgagctgcgcccacatctacagtgccctagacccgacagcccgcaagatcaatctcgccaaattcacgcttggcaagtgctccactctcattgtgactgacctggccgcccgaggcctggacatcccgctgctggacaatgtcatcaactacagcttccccgccaagggcaaactcttcctgcaccgcgtgggccgtgtggctcgggctggccgaagtggcacagcctactccttggtggcccctgatgaaatcccctacctgctggatctgcacctgttcctgggccgctccctcaccctcgcccgacccctcaaggagccctcaggtgtggccggtgtggatggcatgctgggtcgggtgccacagagtgtggtggacgaggaggacagtggtctgcagagcaccctggaggcatcgctggagctacggggcctggcccgcgttgctgataacgcccagcagcagtatgtgcgctcacgcccggcgccctcgcctgagtccatcaagagggccaaggagatggaccttgtggggctgggcctgcaccccctcttcagctcgcgttttgaggaggaggagctgcagcggctgaggctggtggacagcataaagaactaccgctcccgggcgactatctttgagatcaacgcctccagccgagacctgtgcagccaggtgatgcgcgccaagcggcagaaggaccgcaaggccatcgcccgcttccagcagggacagcaggggcggcaggagcagcaggagggcccagtgggcccagccccgagccgcccagcactgcaggagaagcagcctgagaaggaggaggaggaggaggcgggagagagtgtggaggacattttctcagaggtcgtgggccggaagcggcagcggtcaggacccaacaggggagccaagaggcggagggaggaggcccggcagcgggaccaggaattctacatcccctaccggcccaaggactttgacagcgagcggggcctgagcatcagcggggaagggggagcctttgagcagcaggcagctggcgctgtcctggacttgatgggggatgaagcccagaacctgacgaggggccggcagcagctcaagtgggaccgtaagaagaagcggtttgtgggacagtcaggacaggaagacaagaagaagattaagacagagagcggccgctacatcagcagctcctacaagcgagacctctatcagaagtggaaacagaaacagaaaattgatgatcgtgactcggacgaagaaggggcatctgaccggcgaggcccagagcgaagaggtgggaagcgagaccgtggccaagcaggtgcatcccggccccacgccccaggcacccctgcaggccgagtccgcccggaactcaagaccaagcagcagatcctgaagcagcggcgccgggcccagaagctgcacttcctgcagcgtggtggcctcaagcagctctctgcccgcaaccgccgccgcgtccaggagctgcagcagggcgccttcggccggggtgcccgctccaagaagggcaagatgcggaagaggatgtgaggaccaggacccagccccgtggctccttgattggccttagggtgggcatcagcagacgttcccgtgcaccactgtgtgcctggccctgtgctgggcactgggggcactccctgcaggagccatcatctgtgaaaaggagcactgtatggccacagaagggcagcagctgcgtcagcctaagacagagacatttgaacagggccttgaagggtgtgcaggagttcgccagcaaagccaggcaggccaagacttgagttggcaactcagctgctgctgcttccatgtgttctgggttcagaggtcatggctgcaccggtcagagccctgagtgcctcagggtttggcaatggaatttttaatgtaataaatctttattgagcactgctggtggccaggagtgcggtctacttggggaactggaatggagagacccaggtactaaaatcccagctaacgtggcagaggagttgcgggtctcctgagggtgagttctgctgccttgtccatttagcgatgaggaaagtgaagctcagagcacaaaccaggtgccagaggcgggagttggtcccccttcctcccactggacatggttgcagctgggagtgggctgggggaggggaacaggatgcccagcccagggggcaaggacacagctgctcccctctggctatgaagaggttaacgcggcccctccacacctggaggtcagaacctggcctgtcctctgtcttcttgccacccaccccctgtttgaggttctgagaaggtcaagggcagccccagcagctggattctcaggctgggcccctcacctggcagagtccatagtggagggggccttggtgatctctcatctagcatggaccctgttctgagacctgacaaagagttttttttcatgccccaaccaccctggcagggagggcctggtctgatctcattttagaggcagttgccccacacatagccccttgaccttcccatcacctcctcatcagggcctgcatttatggagtgcttgctatgtgcccctcatggcaggcccacagcactctgaacaggcacagccctcccatcttcccaatgaggaaacggattcaggaagagccactcagtccacaccccattggaaatgtgggccctcctatctcagggtctctcaggggttccctctcccgctgctcacctgtgtcagggctaggaggcaggggctgcaggctcagcctgacccaggccggccagcatggcagagaggtcctgcatgaacagcttcacctgggggggcccagcacgaagtcacatcccagccccagagtcactgtccagcccccacccctcaacacgcgggggaggccgaaaggtagggcggggactggagatcccctcattaaaagaacagtgatgatggtggttcccagaggtggtgactgagatcctaaaccgttctgggttttgaaagcctcaggccaaccttcccaactgctgcgtgagcagacaccttcacagcttcctcgctgctgtcacctgcactatccaattagtattttcatttacatcaatcagctttattttcttgtaactggatcagtcatattcattggtttgtgacctactcttatctccgtgggtggctctccttttgttttaattaacttctttatgaatatgaacttaataaataccatggatccattgtaaaaactagaactt

SEQ ID NO: 65623 - DNA, 3273 bp, Homo sapiens
ggctggtacggtccgggatttaggatcagcgcgcggcccgaatggcggccgacaagggcccggcggctggacctcggtcgcgagctgccatggcccagtggaggaagaagaaagggctccggaagcgccgaggcgcggcctcccaggcccgcggcagcgactcggaggacggcgagtttgagatccaggcggaagatgacgcccgggcccggaagctgggacctggaagacccctgcccaccttccccacctcggaatgcacctcggatgtggagccggacacccgggagatggtgcgtgcccagaacaagaagaagaagaagtctggaggcttccagtccatgggcctgagctacccggtgttcaaaggcatcatgaagaaggggtacaaggtgccaacacccatccagaggaagaccatcccggtgatcttggatggcaaggacgtggtggccatggcccggacgggcagtggcaagacagcctgcttcctcctcccaatgttcgagcggctcaagacccacagtgcccagaccggggcccgcgccctcatcctctcgccgacccgagagctggccctgcagaccctgaagttcactaaggagctaggcaagttcactggcctcaagactgccctgatcctgggtggagacaggatggaagaccagtttgcagccctgcacgaaaatcccgacataattattgccacgcccggacggttggtgcatgtggctgtggaaatgagcctgaagctgcagagtgtggaatacgtggtgttcgatgaagctgaccggctttttgaaatgggtttcgcagagcagctgcaggagatcatcgcccgcctccccgggggccaccagacggtgctgttctccgccacgctgcccaaactgctggtggaatttgcccgggctggcctcacggagcccgtgctcatccggcttgacgtggataccaagctcaacgagcagctgaagacctccttcttcctcgtgcgggaggacaccaaggctgccgtgctgctccacctgctgcacaacgtggtgcggccccaggaccagaccgtggtgtttgtggccacgaagcaccacgccgagtacctcactgagggaccgtaagaagaagcggtttgtgggacagtcaggacaggaagacaagaagaagattaagacagagagcggccgctacatcagcagctcctacaagcgagacctctatcagaagtggaaacagaaacagaaaattgatgatcgtgactcggacgaagaaggggcatctgaccggcgaggcccagagcgaagaggtgggaagcgagaccgtggccaagcaggtgcatcccggccccacgccccaggcacccctgcaggccgagtccgcccggaactcaagaccaagcagcagatcctgaagcagcggcgccgggcccagaagctgcacttcctgcagcgtggtggcctcaagcagctctctgcccgcaaccgccgccgcgtccaggagctgcagcagggcgccttcggccggggtgcccgctccaagaagggcaagatgcggaagaggatgtgaggaccaggacccagccccgtggctccttgattggccttagggtgggcatcagcagacgttcccgtgcaccactgtgtgcctggccctgtgctgggcactgggggcactccctgcaggagccatcatctgtgaaaaggagcactgtatggccacagaagggcagcagctgcgtcagcctaagacagagacatttgaacagggccttgaagggtgtgcaggagttcgccagcaaagccaggcaggccaagacttgagttggcaactcagctgctgctgcttccatgtgttctgggttcagaggtcatggctgcaccggtcagagccctgagtgcctcagggtttggcaatggaatttttaatgtaataaatctttattgagcactgctggtggccaggagtgcggtctacttggggaactggaatggagagacccaggtactaaaatcccagctaacgtggcagaggagttgcgggtctcctgagggtgagttctgctgccttgtccatttagcgatgaggaaagtgaagctcagagcacaaaccaggtgccagaggcgggagttggtcccccttcctcccactggacatggttgcagctgggagtgggctgggggaggggaacaggatgcccagcccagggggcaaggacacagctgctcccctctggctatgaagaggttaacgcggcccctccacacctggaggtcagaacctggcctgtcctctgtcttcttgccacccaccccctgtttgaggttctgagaaggtcaagggcagccccagcagctggattctcaggctgggcccctcacctggcagagtccatagtggagggggccttggtgatctctcatctagcatggaccctgttctgagacctgacaaagagttttttttcatgccccaaccaccctggcagggagggcctggtctgatctcattttagaggcagttgccccacacatagccccttgaccttcccatcacctcctcatcagggcctgcatttatggagtgcttgctatgtgcccctcatggcaggcccacagcactctgaacaggcacagccctcccatcttcccaatgaggaaacggattcaggaagagccactcagtccacaccccattggaaatgtgggccctcctatctcagggtctctcaggggttccctctcccgctgctcacctgtgtcagggctaggaggcaggggctgcaggctcagcctgacccaggccggccagcatggcagagaggtcctgcatgaacagcttcacctgggggggcccagcacgaagtcacatcccagccccagagtcactgtccagcccccacccctcaacacgcgggggaggccgaaaggtagggcggggactggagatcccctcattaaaagaacagtgatgatggtggttcccagaggtggtgactgagatcctaaaccgttctgggttttgaaagcctcaggccaaccttcccaactgctgcgtgagcagacaccttcacagcttcctcgctgctgtcacctgcactatccaattagtattttcatttacatcaatcagctttattttcttgtaactggatcagtcatattcattggtttgtgacctactcttatctccgtgggtggctctccttttgttttaattaacttctttatgaatatgaacttaataaataccatggatccattgtaaaaactagaactt

SEQ ID NO: 65624 - DNA, 3949 bp, Homo sapiens
ggctggtacggtccgggatttaggatcagcgcgcggcccgaatggcggccgacaagggcccggcggctggacctcggtcgcgagctgccatggcccagtggaggaagaagaaagggctccggaagcgccgaggcgcggcctcccaggcccgcggcagcgactcggaggacggcgagtttgagatccaggcggaagatgacgcccgggcccggaagctgggacctggaagacccctgcccaccttccccacctcggaatgcacctcggatgtggagccggacacccgggagatggtgcgtgcccagaacaagaagaagaagaagtctggaggcttccagtccatgggcctgagctacccggtgttcaaaggcatcatgaagaaggggtacaaggtgccaacacccatccagaggaagaccatcccggtgatcttggatggcaaggacgtggtggccatggcccggacgggcagtggcaagacagcctgcttcctcctcccaatgttcgagcggctcaagacccacagtgcccagaccggggcccgcgccctcatcctctcgccgacccgagagctggccctgcagaccctgaagttcactaaggagctaggcaagttcactggcctcaagactgccctgatcctgggtggagacaggatggaagaccagtttgcagccctgcacgaaaatcccgacataattattgccacgcccggacggttggtgcatgtggctgtggaaatgagcctgaagctgcagagtgtggaatacgtggtgttcgatgaagctgaccggctttttgaaatgggtttcgcagagcagctgcaggagatcatcgcccgcctccccgggggccaccagacggtgctgttctccgccacgctgcccaaactgctggtggaatttgcccgggctggcctcacggagcccgtgctcatccggcttgacgtggataccaagctcaacgagcagctgaagacctccttcttcctcgtgcgggaggacaccaaggctgccgtgctgctccacctgctgcacaacgtggtgcggccccaggaccagaccgtggtgtttgtggccacgaagcaccacgccgagtacctcactgagctgctgacgacccagcgggtgagctgcgcccacatctacagtgccctagacccgacagcccgcaagatcaatctcgccaaattcacgcttggcaagtgctccactctcattgtgactgacctggccgcccgaggcctggacatcccgctgctggacaatgtcatcaactacagcttccccgccaagggcaaactcttcctgcaccgcgtgggccgtgtggctcgggctggccgaagtggcacagcctactccttggtggcccctgatgaaatcccctacctgctggatctgcacctgttcctgggccgctccctcaccctcgcccgacccctcaaggagccctcaggtgtggccggtgtggatggcatgctgggtcgggtgccacagagtgtggtggacgaggaggacagtggtctgcagagcaccctggaggcatcgctggagctacggggcctggcccgcgttgctgataacgcccagcagcagtatgtgcgctcacgcccggcgccctcgcctgagtccatcaagagggccaaggagatggaccttgtggggctgggcctgcaccccctcttcagctcgcgttttgaggaggaggagctgcagcggctgaggctggtggacagcataaagaactaccgctcccgggcgactatctttgagatcaacgcctccagccgagacctgtgcagccaggtgatgcgcgccaagcggcagaaggaccgcaaggccatcgcccgcttccagcagggacagcaggggcggcaggagcagcaggagggcccagtgggcccagccccgagccgcccagcactgcaggagaagcagcctgagaaggaggaggaggaggaggcgggagagagtgtggaggacattttctcagaggtcgtgggccggaagcggcagcggtcaggacccaacaggggagccaagaggcggagggaggaggcccggcagcgggaccaggaattctacatcccctaccggcccaaggactttgacagcgagcggggcctgagcatcagcggggaagggggagcctttgagcagcaggcagctggcgctgtcctggacttgatgggggatgaagcccagaacctgacgaggggccggcagcagctcaagtgggaccgtaagaagaagcggtttgtgggacagtcaggacaggaagacaagaagaagattaagacagagagcggccgctacatcagcagctcctacaagcgagacctctatcagaagtggaaacagaaacagaaaattgatgatcgtgactcggacgaagaaggggcatagctgcgtcagcctaagacagagacatttgaacagggccttgaagggtgtgcaggagttcgccagcaaagccaggcaggccaagacttgagttggcaactcagctgctgctgcttccatgtgttctgggttcagaggtcatggctgcaccggtcagagccctgagtgcctcagggtttggcaatggaatttttaatgtaataaatctttattgagcactgctggtggccaggagtgcggtctacttggggaactggaatggagagacccaggtactaaaatcccagctaacgtggcagaggagttgcgggtctcctgagggtgagttctgctgccttgtccatttagcgatgaggaaagtgaagctcagagcacaaaccaggtgccagaggcgggagttggtcccccttcctcccactggacatggttgcagctgggagtgggctgggggaggggaacaggatgcccagcccagggggcaaggacacagctgctcccctctggctatgaagaggttaacgcggcccctccacacctggaggtcagaacctggcctgtcctctgtcttcttgccacccaccccctgtttgaggttctgagaaggtcaagggcagccccagcagctggattctcaggctgggcccctcacctggcagagtccatagtggagggggccttggtgatctctcatctagcatggaccctgttctgagacctgacaaagagttttttttcatgccccaaccaccctggcagggagggcctggtctgatctcattttagaggcagttgccccacacatagccccttgaccttcccatcacctcctcatcagggcctgcatttatggagtgcttgctatgtgcccctcatggcaggcccacagcactctgaacaggcacagccctcccatcttcccaatgaggaaacggattcaggaagagccactcagtccacaccccattggaaatgtgggccctcctatctcagggtctctcaggggttccctctcccgctgctcacctgtgtcagggctaggaggcaggggctgcaggctcagcctgacccaggccggccagcatggcagagaggtcctgcatgaacagcttcacctgggggggcccagcacgaagtcacatcccagccccagagtcactgtccagcccccacccctcaacacgcgggggaggccgaaaggtagggcggggactggagatcccctcattaaaagaacagtgatgatggtggttcccagaggtggtgactgagatcctaaaccgttctgggttttgaaagcctcaggccaaccttcccaactgctgcgtgagcagacaccttcacagcttcctcgctgctgtcacctgcactatccaattagtattttcatttacatcaatcagctttattttcttgtaactggatcagtcatattcattggtttgtgacctactcttatctccgtgggtggctctccttttgttttaattaacttctttatgaatatgaacttaataaataccatggatccattgtaaaaactagaactt

SEQ ID NO: 65625 - DNA, 2859 bp, Homo sapiens
ggtcccttatcagagctctaacgcctgtgctgggagatccgctgctgtctttagagctgccaagtatggacgtttaagttgctgaagctgggcctgcaccccctcttcagctcgcgttttgaggaggaggagctgcagcggctgaggctggtggacagcataaagaactaccgctcccgggcgactatctttgagatcaacgcctccagccgagacctgtgcagccaggtgatgcgcgccaagcggcagaaggaccgcaaggccatcgcccgcttccagcagggacagcaggggcggcaggagcagcaggagggcccagtgggcccagccccgagccgcccagcactgcaggagaagcagcctgagaaggaggaggaggaggaggcgggagagagtgtggaggacattttctcagaggtcgtgggccggaagcggcagcggtcaggacccaacaggggagccaagaggcggagggaggaggcccggcagcgggaccaggaattctacatcccctaccggcccaaggactttgacagcgagcggggcctgagcatcagcggggaagggggagcctttgagcagcaggcagctggcgctgtcctggacttgatgggggatgaagcccagaacctgacgaggggccggcagcagctcaagtggtgagtgatcgagtgagccgcccctccatgctcgggggaccgtaagaagaagcggtttgtgggacagtcaggacaggaagacaagaagaagattaagacagagagcggccgctacatcagcagctcctacaagcgagacctctatcagaagtggaaacagaaacagaaaattgatgatcgtgactcggacgaagaaggggcatctgaccggcgaggcccagagcgaagaggtgggaagcgagaccgtggccaagcaggtgcatcccggccccacgccccaggcacccctgcaggccgagtccgcccggaactcaagaccaagcagcagatcctgaagcagcggcgccgggcccagaagctgcacttcctgcagcgtggtggcctcaagcagctctctgcccgcaaccgccgccgcgtccaggagctgcagcagggcgccttcggccggggtgcccgctccaagaagggcaagatgcggaagaggatgtgaggaccaggacccagccccgtggctccttgattggccttagggtgggcatcagcagacgttcccgtgcaccactgtgtgcctggccctgtgctgggcactgggggcactccctgcaggagccatcatctgtgaaaaggagcactgtatggccacagaagggcagcagctgcgtcagcctaagacagagacatttgaacagggccttgaagggtgtgcaggagttcgccagcaaagccaggcaggccaagacttgagttggcaactcagctgctgctgcttccatgtgttctgggttcagaggtcatggctgcaccggtcagagccctgagtgcctcagggtttggcaatggaatttttaatgtaataaatctttattgagcactgctggtggccaggagtgcggtctacttggggaactggaatggagagacccaggtactaaaatcccagctaacgtggcagaggagttgcgggtctcctgagggtgagttctgctgccttgtccatttagcgatgaggaaagtgaagctcagagcacaaaccaggtgccagaggcgggagttggtcccccttcctcccactggacatggttgcagctgggagtgggctgggggaggggaacaggatgcccagcccagggggcaaggacacagctgctcccctctggctatgaagaggttaacgcggcccctccacacctggaggtcagaacctggcctgtcctctgtcttcttgccacccaccccctgtttgaggttctgagaaggtcaagggcagccccagcagctggattctcaggctgggcccctcacctggcagagtccatagtggagggggccttggtgatctctcatctagcatggaccctgttctgagacctgacaaagagttttttttcatgccccaaccaccctggcagggagggcctggtctgatctcattttagaggcagttgccccacacatagccccttgaccttcccatcacctcctcatcagggcctgcatttatggagtgcttgctatgtgcccctcatggcaggcccacagcactctgaacaggcacagccctcccatcttcccaatgaggaaacggattcaggaagagccactcagtccacaccccattggaaatgtgggccctcctatctcagggtctctcaggggttccctctcccgctgctcacctgtgtcagggctaggaggcaggggctgcaggctcagcctgacccaggccggccagcatggcagagaggtcctgcatgaacagcttcacctgggggggcccagcacgaagtcacatcccagccccagagtcactgtccagcccccacccctcaacacgcgggggaggccgaaaggtagggcggggactggagatcccctcattaaaagaacagtgatgatggtggttcccagaggtggtgactgagatcctaaaccgttctgggttttgaaagcctcaggccaaccttcccaactgctgcgtgagcagacaccttcacagcttcctcgctgctgtcacctgcactatccaattagtattttcatttacatcaatcagctttattttcttgtaactggatcagtcatattcattggtttgtgacctactcttatctccgtgggtggctctccttttgttttaattaacttctttatgaatatgaacttaataaataccatggatccattgtaaaaactagaactt

SEQ ID NO: 65626 - DNA, 2769 bp, Homo sapiens
ggctggtacggtccgggatttaggatcagcgcgcggcccgaatggcggccgacaagggcccggcggctggacctcggtcgcgagctgccatggcccagtggaggaagaagaaagggctccggaagcgccgaggcgcggcctcccaggcccgcggcagcgactcggaggacggcgagtttgagatccaggcggaagatgacgcccgggcccggaagctgggacctggaagacccctgcccaccttccccacctcggaatgcacctcggatgtggagccggacacccgggagatggtgcgtgcccagaacaagaagaagaagaagtctggaggcttccagtccatgggcctgagctacccggtgttcaaaggcatcatgaagaaggggtacaaggtgccaacacccatccagaggaagaccatcccggtgatcttggatggcaaggacgtggtggccatggcccggacgggcagtggcaagacagcctgcttcctcctcccaatgttcgagcggctcaagacccacagtgcccagaccggggcccgcgccctcatcctctcgccgacccgagagctggccctgcagaccctgaagttcactaaggagggaccgtaagaagaagcggtttgtgggacagtcaggacaggaagacaagaagaagattaagacagagagcggccgctacatcagcagctcctacaagcgagacctctatcagaagtggaaacagaaacagaaaattgatgatcgtgactcggacgaagaaggggcatctgaccggcgaggcccagagcgaagaggtgggaagcgagaccgtggccaagcaggtgcatcccggccccacgccccaggcacccctgcaggccgagtccgcccggaactcaagaccaagcagcagatcctgaagcagcggcgccgggcccagaagctgcacttcctgcagcgtggtggcctcaagcagctctctgcccgcaaccgccgccgcgtccaggagctgcagcagggcgccttcggccggggtgcccgctccaagaagggcaagatgcggaagaggatgtgaggaccaggacccagccccgtggctccttgattggccttagggtgggcatcagcagacgttcccgtgcaccactgtgtgcctggccctgtgctgggcactgggggcactccctgcaggagccatcatctgtgaaaaggagcactgtatggccacagaagggcagcagctgcgtcagcctaagacagagacatttgaacagggccttgaagggtgtgcaggagttcgccagcaaagccaggcaggccaagacttgagttggcaactcagctgctgctgcttccatgtgttctgggttcagaggtcatggctgcaccggtcagagccctgagtgcctcagggtttggcaatggaatttttaatgtaataaatctttattgagcactgctggtggccaggagtgcggtctacttggggaactggaatggagagacccaggtactaaaatcccagctaacgtggcagaggagttgcgggtctcctgagggtgagttctgctgccttgtccatttagcgatgaggaaagtgaagctcagagcacaaaccaggtgccagaggcgggagttggtcccccttcctcccactggacatggttgcagctgggagtgggctgggggaggggaacaggatgcccagcccagggggcaaggacacagctgctcccctctggctatgaagaggttaacgcggcccctccacacctggaggtcagaacctggcctgtcctctgtcttcttgccacccaccccctgtttgaggttctgagaaggtcaagggcagccccagcagctggattctcaggctgggcccctcacctggcagagtccatagtggagggggccttggtgatctctcatctagcatggaccctgttctgagacctgacaaagagttttttttcatgccccaaccaccctggcagggagggcctggtctgatctcattttagaggcagttgccccacacatagccccttgaccttcccatcacctcctcatcagggcctgcatttatggagtgcttgctatgtgcccctcatggcaggcccacagcactctgaacaggcacagccctcccatcttcccaatgaggaaacggattcaggaagagccactcagtccacaccccattggaaatgtgggccctcctatctcagggtctctcaggggttccctctcccgctgctcacctgtgtcagggctaggaggcaggggctgcaggctcagcctgacccaggccggccagcatggcagagaggtcctgcatgaacagcttcacctgggggggcccagcacgaagtcacatcccagccccagagtcactgtccagcccccacccctcaacacgcgggggaggccgaaaggtagggcggggactggagatcccctcattaaaagaacagtgatgatggtggttcccagaggtggtgactgagatcctaaaccgttctgggttttgaaagcctcaggccaaccttcccaactgctgcgtgagcagacaccttcacagcttcctcgctgctgtcacctgcactatccaattagtattttcatttacatcaatcagctttattttcttgtaactggatcagtcatattcattggtttgtgacctactcttatctccgtgggtggctctccttttgttttaattaacttctttatgaatatgaacttaataaataccatggatccattgtaaaaactagaactt

SEQ ID NO: 65627 - DNA, 2510 bp, Homo sapiens
agcgtctggagagtgtatgtgactcaacccagggtcacagctgggtagggggaggggattggaaaccctccaggaggcccttgtccctgagccaggccccagtgctggcggcagtcctctgacctccgcactcccttttgagacctggactgcagggagaggtgaggagggatagggaagaagcctttattgagcgccaactgcatgccagacatggctgcactgctttcctttaatgctccaacaacctgacaagagggtcgggtgaggagacaggccccaagcggcagccggcactccaagggtttccctccacggcagccgtcccaactccctctcctgcaggggaccgtaagaagaagcggtttgtgggacagtcaggacaggaagacaagaagaagattaagacagagagcggccgctacatcagcagctcctacaagcgagacctctatcagaagtggaaacagaaacagaaaattgatgatcgtgactcggacgaagaaggggcatctgaccggcgaggcccagagcgaagaggtgggaagcgagaccgtggccaagcaggtgcatcccggccccacgccccaggcacccctgcaggccgagtccgcccggaactcaagaccaagcagcagatcctgaagcagcggcgccgggcccagaagctgcacttcctgcagcgtggtggcctcaagcagctctctgcccgcaaccgccgccgcgtccaggagctgcagcagggcgccttcggccggggtgcccgctccaagaagggcaagatgcggaagaggatgtgaggaccaggacccagccccgtggctccttgattggccttagggtgggcatcagcagacgttcccgtgcaccactgtgtgcctggccctgtgctgggcactgggggcactccctgcaggagccatcatctgtgaaaaggagcactgtatggccacagaagggcagcagctgcgtcagcctaagacagagacatttgaacagggccttgaagggtgtgcaggagttcgccagcaaagccaggcaggccaagacttgagttggcaactcagctgctgctgcttccatgtgttctgggttcagaggtcatggctgcaccggtcagagccctgagtgcctcagggtttggcaatggaatttttaatgtaataaatctttattgagcactgctggtggccaggagtgcggtctacttggggaactggaatggagagacccaggtactaaaatcccagctaacgtggcagaggagttgcgggtctcctgagggtgagttctgctgccttgtccatttagcgatgaggaaagtgaagctcagagcacaaaccaggtgccagaggcgggagttggtcccccttcctcccactggacatggttgcagctgggagtgggctgggggaggggaacaggatgcccagcccagggggcaaggacacagctgctcccctctggctatgaagaggttaacgcggcccctccacacctggaggtcagaacctggcctgtcctctgtcttcttgccacccaccccctgtttgaggttctgagaaggtcaagggcagccccagcagctggattctcaggctgggcccctcacctggcagagtccatagtggagggggccttggtgatctctcatctagcatggaccctgttctgagacctgacaaagagttttttttcatgccccaaccaccctggcagggagggcctggtctgatctcattttagaggcagttgccccacacatagccccttgaccttcccatcacctcctcatcagggcctgcatttatggagtgcttgctatgtgcccctcatggcaggcccacagcactctgaacaggcacagccctcccatcttcccaatgaggaaacggattcaggaagagccactcagtccacaccccattggaaatgtgggccctcctatctcagggtctctcaggggttccctctcccgctgctcacctgtgtcagggctaggaggcaggggctgcaggctcagcctgacccaggccggccagcatggcagagaggtcctgcatgaacagcttcacctgggggggcccagcacgaagtcacatcccagccccagagtcactgtccagcccccacccctcaacacgcgggggaggccgaaaggtagggcggggactggagatcccctcattaaaagaacagtgatgatggtggttcccagaggtggtgactgagatcctaaaccgttctgggttttgaaagcctcaggccaaccttcccaactgctgcgtgagcagacaccttcacagcttcctcgctgctgtcacctgcactatccaattagtattttcatttacatcaatcagctttattttcttgtaactggatcagtcatattcattggtttgtgacctactcttatctccgtgggtggctctccttttgttttaattaacttctttatgaatatgaacttaataaataccatggatccattgtaaaaactagaactt

SEQ ID NO: 65628 - DNA, 2121 bp, Homo sapiens
ttttttttttttgaggctgcctaaaactttattagccacctactgtgtacagacactgggccacagcaataagcacagaacaggagtaggggcaggggaggagtctgcaagcttctgggaggaggggatcttgggagtgatcccaacagctgagctccctgaatccctgtcccagcaggtgcatcccggccccacgccccaggcacccctgcaggccgagtccgcccggaactcaagaccaagcagcagatcctgaagcagcggcgccgggcccagaagctgcacttcctgcagcgtggtggcctcaagcagctctctgcccgcaaccgccgccgcgtccaggagctgcagcagggcgccttcggccggggtgcccgctccaagaagggcaagatgcggaagaggatgtgaggaccaggacccagccccgtggctccttgattggccttagggtgggcatcagcagacgttcccgtgcaccactgtgtgcctggccctgtgctgggcactgggggcactccctgcaggagccatcatctgtgaaaaggagcactgtatggccacagaagggcagcagctgcgtcagcctaagacagagacatttgaacagggccttgaagggtgtgcaggagttcgccagcaaagccaggcaggccaagacttgagttggcaactcagctgctgctgcttccatgtgttctgggttcagaggtcatggctgcaccggtcagagccctgagtgcctcagggtttggcaatggaatttttaatgtaataaatctttattgagcactgctggtggccaggagtgcggtctacttggggaactggaatggagagacccaggtactaaaatcccagctaacgtggcagaggagttgcgggtctcctgagggtgagttctgctgccttgtccatttagcgatgaggaaagtgaagctcagagcacaaaccaggtgccagaggcgggagttggtcccccttcctcccactggacatggttgcagctgggagtgggctgggggaggggaacaggatgcccagcccagggggcaaggacacagctgctcccctctggctatgaagaggttaacgcggcccctccacacctggaggtcagaacctggcctgtcctctgtcttcttgccacccaccccctgtttgaggttctgagaaggtcaagggcagccccagcagctggattctcaggctgggcccctcacctggcagagtccatagtggagggggccttggtgatctctcatctagcatggaccctgttctgagacctgacaaagagttttttttcatgccccaaccaccctggcagggagggcctggtctgatctcattttagaggcagttgccccacacatagccccttgaccttcccatcacctcctcatcagggcctgcatttatggagtgcttgctatgtgcccctcatggcaggcccacagcactctgaacaggcacagccctcccatcttcccaatgaggaaacggattcaggaagagccactcagtccacaccccattggaaatgtgggccctcctatctcagggtctctcaggggttccctctcccgctgctcacctgtgtcagggctaggaggcaggggctgcaggctcagcctgacccaggccggccagcatggcagagaggtcctgcatgaacagcttcacctgggggggcccagcacgaagtcacatcccagccccagagtcactgtccagcccccacccctcaacacgcgggggaggccgaaaggtagggcggggactggagatcccctcattaaaagaacagtgatgatggtggttcccagaggtggtgactgagatcctaaaccgttctgggttttgaaagcctcaggccaaccttcccaactgctgcgtgagcagacaccttcacagcttcctcgctgctgtcacctgcactatccaattagtattttcatttacatcaatcagctttattttcttgtaactggatcagtcatattcattggtttgtgacctactcttatctccgtgggtggctctccttttgttttaattaacttctttatgaatatgaacttaataaataccatggatccattgtaaaaactagaactt

SEQ ID NO: 65629 - DNA, 310 bp, Homo sapiens
gcagagttgcacaaggagagaactcagcatggggggttggttctttgggttctcacccttccccgctgcctttgtcccatcacccagccctgcctccctcccagcagccctgggccacagcccccgcccctggcttttccccggcccgctcttgtacctcccttttcaacactctctgttattgtcctgtgtgtacagtatatatatgtatatatattttaattttttaatttaagcaaagactaaaatcaaccatttgatgctgcaggggcctttcaggatcaaaatggttgattttagtctttgctta

SEQ ID NO: 65630 - DNA, 1792 bp, Homo sapiens
agcgggaggcgattccggggcagcgagtcgtcggccgccgcgctcgagcctccgcccgcaccgagccgcgggacccgggccgtaccggggaggggccgctccgggccgcagcgcgagggcagcgaggggcggcggggacctggcaccgggcggggccggcggcagcgaccatgatcgctttgttcaacaagctgctggactggttcaaggccctattctggaaggaggagatggagctcacgctggtcgggcttcagtactcgggcaagaccaccttcgtcaacgtgatcgcgtcaggacagttcaacgaggacatgatccccaccgtgggtttcaacatgcgcaaaatcaccaaagggaatgtgactatcaagctctgggacattgggggacagccgcgtttccgcagcatgtgggagcgctactgccgaggagtgagcgccatcgtgtacatggtggatgctgctgaccaggagaagattgaggcctctaagaacgagctccacaacctactggacaaacctcagctgcagggcatcccggtcttagtcctgggtaacaagcgagaccttccgggagcattggatgagaaggagctgattgagaaaatgaatctgtctgccatccaggaccgagagatctgctgctactccatctcttgcaaagaaaaggacaacattgacatcaccctacagtggcttattcaacactcgaagtcacggagaagctgagactccagcccttctccctcagaccagggaccgtcatcatctaaacctgaagccgagctccccgcccacccctgtcgtccccctaagcccacccctcctcacccagtgtgaggagggccctctggggaccccagagtcctgttctgctgaggtttgaactcctgtttttattgtaaaataaattgccccccattctggtcccctaacttctcacccttccccgctgcctttgtcccatcacccagccctgcctccctcccagcagccctgggccacagcccccgcccctggcttttccccggcccgctcttgtacctcccttttcaacactctctgttattgtcctgtgtgtacagtatatatatgtatatatattttaattttttaatttaagcaaagactaaaatcaaccatttgatgctgcaggggcctttcaggatctgggagggggcagtctggagagaaggagggagacgcaggtggacttggggcaagttcagatcagaagaggtgcaggctggcacctgcggcaggtaccagcctgggcactggtggccgcctccctgtcccgtgtgtttccaccgcccaatctggcttgtcctggcagtgcttgaatgccacaggctggcaggggcctctgggggcccctcccctcgacccccagcctgggtagagccaccaggtacgacgaccaggtaccagaaaccaccaggcacacggggcagaaagccagcgtccatgccccagcagccccctcctgcctgttcctggctcccagctcccgcccctccccagggcccccacctccacggcccacttcattttctgttctcattttgcagagttgcacaaggagagaactcagcatggggggttggttctttgggttctgtttgtttatttgtttaatttaatgatttgtaaagtgatgttcctcttccttttttacacttttcagctcatatttaacctctgtttggaaaatgattcttgtaactgtacatttttttgcttcctaataacaatgacaacaaaaaaaataaatgaccagttttgtgttg

SEQ ID NO: 65631 - DNA, 3576 bp, Homo sapiens
  misc_feature (1)..(1): n is a, c, g, or t
naccaggctggcgtccggaattcccgggatccgcaccgagccgcgggacccgggccgtaccggggaggggccgctccgggccgcagcgcgagggcagcgaggggcggcggggacctggcaccgggcggggccggcggcagcgaccatgatcgctttgttcaacaagctgctggactggttcaaggccctattctggaaggaggagatggagctcacgctggtcgggcttcagtactcgggcaagaccaccttcgtcaacgtgatcgcgtcaggacagttcaacgaggacatgatccccaccgtgggtttcaacatgcgcaaaatcaccaaagggaatgtgactatcaagctctgggacattgggggacagccgcgtttccgcagcatgtgggagcgctactgccgaggagtgagcgccatcgtgtacatggtggatgctgctgaccaggagaagattgaggcctctaagaacgagctccacaacctactggacaaacctcagctgcagggcatcccggtcttagtcctgggtaacaagcgagaccttccgggagcattggatgagaaggagctgattgagaaaatgaatctgtctgccatccaggaccgagagatctgctgctactccatctcttgcaaagaaaaggacaacattgacatcaccctacagtggcttattcaacactcgaagtcacggagaagctgagactccagcccttctccctcagaccagggaccgtcatcatctaaacctgaagccgagctccccgcccacccctgtcgtccccctaagcccacccctcctcacccagtgtgaggagggccctctggggaccccagagtcctgttctgctgaggtttgaactcctgtttttattgtaaaataaattgccccccattctggtcccctaacttctcacccttccccgctgcctttgtcccatcacccagccctgcctccctcccagcagccctgggccacagcccccgcccctggcttttccccggcccgctcttgtacctcccttttcaacactctctgttattgtcctgtgtgtacagtatatatatgtatatatattttaattttttaatttaagcaaagactaaaatcaaccatttgatgctgcaggggcctttcaggatctgggagggggcagtctggagagaaggagggagacgcaggtggacttggggcaagttcagatcagaagaggtgcaggctggcacctgcggcaggtaccagcctgggcactggtggccgcctccctgtcccgtgtgtttccaccgcccaatctggcttgtcctggcagtgcttgaatgccacaggctggcaggggcctctgggggcccctcccctcgacccccagcctgggtagagccaccaggtacgacgaccaggtaccagaaaccaccaggcacacggggcagaaagccagcgtccatgccccagcagccccctcctgcctgttcctggctcccagctcccgcccctccccagggcccccacctccacggcccacttcattttctgttctcattttgcagagttgcacaaggagagaactcagcatggggggttggttctttgggttctgtttgtttatttgtttaatttaatgatttgtaaagtgatgttcctcttccttttttacacttttcagctcatatttaacctctgtttggaaaatgattcttgtaactgtacatttttttgcttcctaataacaatgacaacaaaaaaaataaatgaccagttttgtgttggggggggtgtatggtgctggttacttttccgcagttggcatgggttgccctacaggcccacagggccaccagcacacccccgcacgctgggcaccaacagagccacggagcgcgagcacatgcccgcccggggagcacaatggcgctgcacaaaacggcctcccacacgtgcgtccaggctcttgcgccacctccttctcattctcttttcagactttcatgtagtcccagctttgagccagcagctgccacttggggctgcagagctctgttgagggaactgcccagggctgggtagaggcagcaaggggacagggctgggtgctgttgtgtgcgaactgagctgcactctccttaggcccagttcaggcctcagcccctctttcccaggccctggatctcaccagcagccaaggttgagccagaaccagaaccctgtccctccggcccccagttcctaccccagaaccagttaactgtgcttcaggggtagggctgggcccacagagcctgggggagtgtcaccgcctttgctgcctctcagttagtgtcaatgctatgggtttcctggtaggagccctgccctcgctcctctgctggattctagtcccccacccgacctcaccgtcagagctggtcctccctcggcactgctcacagctgctgcctcagagcctggtgaccctgcctgctcaaatccgaggccatcttgacccagtttcacagtaagccccacctcctcccgctccacctccctcggcctctccttcaccgtggaaaatggagcaggcccttgcagaacaccccagcccttctcacccctcccactgcaggaaaaaggagccaaactgtcctttagtcctgggagtggggaccttgactccccgtcatgggccctccagcccctcaccttcattggtgcccagggcttcctcctggaggcagtcatcagacctgtcagagcagttccctgcctggagaggcagttccccactgccagagagttggaggaaagaatgtggatggaatttggcatctgaagctaagtgattctagggtacctcccaactcctaagcaaaatgggacatgtcctcctggctaaggaggttgaatgggagccagggctctatcccctgccctctcctgactgcaagcatggctaggttttcctgggcctgggatcccgggagaggaccagcaatctcactcatctggggctgtttccaggccaaggtgcctttctcagatcctgtgatcctcactgaggattgaggtttgagataagagagctggttaccaggaagcaagcaagcatcctccttccacagtgccggcgtgcagcaggtgctaatatgacttaaagaatttgttcaggggccaggtgctcatgcctgtaatcccagtactttgggagcccgaggtaggagaatgacttgagtctgggagtttgagaccagcctgggcaaaatagtgagaccctatctctacaaataatccaaaattagacaggcgtggtagtgcgcacctgtagtcccagctactcaggaagctgaggcaggagaatcgcttgagcccaggaagtggaggctgcaatgagctgtgatcacaccacagcactcagcttgagtgactgagtgggatcttgtctcaaaaaaaaaaaagtgttcagccaggcatggtggtacacacttgtagtcccagctactcaggaggctgagacaggaggactgcttgagcccaggagttcaaagccagcctgggcaacatagtgagacccccccacccagctcttaagaaaaaaaaaacac

SEQ ID NO: 65632 - DNA, 3781 bp, Homo sapiens
agcgggaggcgattccggggcagcgagtcgtcggccgccgcgctcgagcctccgcccgcaccgagccgcgggacccgggccgtaccggggaggggccgctccgggccgcagcgcgagggcagcgaggggcggcggggacctggcaccgggcggggccggcggcagcgaccatgatcgctttgttcaacaagctgctggactggttcaaggccctattctggaaggaggagatggagctcacgctggtcgggcttcagtactcgggcaagaccaccttcgtcaacgtgatcgcgtcaggacagttcaacgaggacatgatccccaccgtgggtttcaacatgcgcaaaatcaccaaagggaatgtgactatcaagctctgggacattgggggacagccgcgtttccgcagcatgtgggagcgctactgccgaggagtgagcgccatcgtgtacatggtggatgctgctgaccaggagaagattgaggcctctaagaacgagctccacaacctactggacaaacctcagctgcagggcatcccggtcagcagacctgagggagcgggatggggagggagctcggctgggaagtcactgggagcaggtaaaagccaggcatggtaggggcgcagagaggaaacgggacccaggaggccagctcaccacccagacaacctgggcacggctgccctagacctcatcctcaccctcccttctccgtaggtcttagtcctgggtaacaagcgagaccttccgggagcattggatgagaaggagctgattgagaaaatgaatctgtctgccatccaggaccgagagatctgctgctactccatctcttgcaaagaaaaggacaacattgacatcaccctacagtggcttattcaacactcgaagtcacggagaagctgagactccagcccttctccctcagaccagggaccgtcatcatctaaacctgaagccgagctccccgcccacccctgtcgtccccctaagcccacccctcctcacccagtgtgaggagggccctctggggaccccagagtcctgttctgctgaggtttgaactcctgtttttattgtaaaataaattgccccccattctggtcccctaacttctcacccttccccgctgcctttgtcccatcacccagccctgcctccctcccagcagccctgggccacagcccccgcccctggcttttccccggcccgctcttgtacctcccttttcaacactctctgttattgtcctgtgtgtacagtatatatatgtatatatattttaattttttaatttaagcaaagactaaaatcaaccatttgatgctgcaggggcctttcaggatctgggagggggcagtctggagagaaggagggagacgcaggtggacttggggcaagttcagatcagaagaggtgcaggctggcacctgcggcaggtaccagcctgggcactggtggccgcctccctgtcccgtgtgtttccaccgcccaatctggcttgtcctggcagtgcttgaatgccacaggctggcaggggcctctgggggcccctcccctcgacccccagcctgggtagagccaccaggtacgacgaccaggtaccagaaaccaccaggcacacggggcagaaagccagcgtccatgccccagcagccccctcctgcctgttcctggctcccagctcccgcccctccccagggcccccacctccacggcccacttcattttctgttctcattttgcagagttgcacaaggagagaactcagcatggggggttggttctttgggttctgtttgtttatttgtttaatttaatgatttgtaaagtgatgttcctcttccttttttacacttttcagctcatatttaacctctgtttggaaaatgattcttgtaactgtacatttttttgcttcctaataacaatgacaacaaaaaaaataaatgaccagttttgtgttggggggggtgtatggtgctggttacttttccgcagttggcatgggttgccctacaggcccacagggccaccagcacacccccgcacgctgggcaccaacagagccacggagcgcgagcacatgcccgcccggggagcacaatggcgctgcacaaaacggcctcccacacgtgcgtccaggctcttgcgccacctccttctcattctcttttcagactttcatgtagtcccagctttgagccagcagctgccacttggggctgcagagctctgttgagggaactgcccagggctgggtagaggcagcaaggggacagggctgggtgctgttgtgtgcgaactgagctgcactctccttaggcccagttcaggcctcagcccctctttcccaggccctggatctcaccagcagccaaggttgagccagaaccagaaccctgtccctccggcccccagttcctaccccagaaccagttaactgtgcttcaggggtagggctgggcccacagagcctgggggagtgtcaccgcctttgctgcctctcagttagtgtcaatgctatgggtttcctggtaggagccctgccctcgctcctctgctggattctagtcccccacccgacctcaccgtcagagctggtcctccctcggcactgctcacagctgctgcctcagagcctggtgaccctgcctgctcaaatccgaggccatcttgacccagtttcacagtaagccccacctcctcccgctccacctccctcggcctctccttcaccgtggaaaatggagcaggcccttgcagaacaccccagcccttctcacccctcccactgcaggaaaaaggagccaaactgtcctttagtcctgggagtggggaccttgactccccgtcatgggccctccagcccctcaccttcattggtgcccagggcttcctcctggaggcagtcatcagacctgtcagagcagttccctgcctggagaggcagttccccactgccagagagttggaggaaagaatgtggatggaatttggcatctgaagctaagtgattctagggtacctcccaactcctaagcaaaatgggacatgtcctcctggctaaggaggttgaatgggagccagggctctatcccctgccctctcctgactgcaagcatggctaggttttcctgggcctgggatcccgggagaggaccagcaatctcactcatctggggctgtttccaggccaaggtgcctttctcagatcctgtgatcctcactgaggattgaggtttgagataagagagctggttaccaggaagcaagcaagcatcctccttccacagtgccggcgtgcagcaggtgctaatatgacttaaagaatttgttcaggggccaggtgctcatgcctgtaatcccagtactttgggagcccgaggtaggagaatgacttgagtctgggagtttgagaccagcctgggcaaaatagtgagaccctatctctacaaataatccaaaattagacaggcgtggtagtgcgcacctgtagtcccagctactcaggaagctgaggcaggagaatcgcttgagcccaggaagtggaggctgcaatgagctgtgatcacaccacagcactcagcttgagtgactgagtgggatcttgtctcaaaaaaaaaaaagtgttcagccaggcatggtggtacacacttgtagtcccagctactcaggaggctgagacaggaggactgcttgagcccaggagttcaaagccagcctgggcaacatagtgagacccccccacccagctcttaagaaaaaaaaaacac

SEQ ID NO: 65633 - DNA, 3545 bp, Homo sapiens
gatgggggaaagggaggagaggggagaggcatttctgagtgttttagtggctctcaggttctcgctccacaactttccctgaagtccaaagccctgtggctcttgggtagaaaaggcagccaggtggcccagattctgggcactatcccagcttgtcgccaagcggttgtgtgatctcgggcaaatcgatccccgctctgggcttcacctcctcgtttctaagattccagggctggacccggtgattctcaggtccctgctggctctgacatgctgtggctctgtctctttcccagcacctgaattccgctactactcattcagggccatgtggcgcttgccagctctggacttcttgtttgtttttgagaaagtgtctcgctctgtcacccaggctggagttcagtggcgtgaccatagctcactgcagcctccaactccactcctgggttcaagcaatcctctcacctgagcttcccatgtagctgagactccaggtgtgcgccacccctcctggcatctctggacttctgatacccttaggtttggtttcttgggcctctctgctgccccagcacggccagtacttgcaggccttataagctgttctcttttctcctatcagacatcaccctacagtggcttattcaacactcgaagtcacggagaagctgagactccagcccttctccctcagaccagggaccgtcatcatctaaacctgaagccgagctccccgcccacccctgtcgtccccctaagcccacccctcctcacccagtgtgaggagggccctctggggaccccagagtcctgttctgctgaggtttgaactcctgtttttattgtaaaataaattgccccccattctggtcccctaacttctcacccttccccgctgcctttgtcccatcacccagccctgcctccctcccagcagccctgggccacagcccccgcccctggcttttccccggcccgctcttgtacctcccttttcaacactctctgttattgtcctgtgtgtacagtatatatatgtatatatattttaattttttaatttaagcaaagactaaaatcaaccatttgatgctgcaggggcctttcaggatctgggagggggcagtctggagagaaggagggagacgcaggtggacttggggcaagttcagatcagaagaggtgcaggctggcacctgcggcaggtaccagcctgggcactggtggccgcctccctgtcccgtgtgtttccaccgcccaatctggcttgtcctggcagtgcttgaatgccacaggctggcaggggcctctgggggcccctcccctcgacccccagcctgggtagagccaccaggtacgacgaccaggtaccagaaaccaccaggcacacggggcagaaagccagcgtccatgccccagcagccccctcctgcctgttcctggctcccagctcccgcccctccccagggcccccacctccacggcccacttcattttctgttctcattttgcagagttgcacaaggagagaactcagcatggggggttggttctttgggttctgtttgtttatttgtttaatttaatgatttgtaaagtgatgttcctcttccttttttacacttttcagctcatatttaacctctgtttggaaaatgattcttgtaactgtacatttttttgcttcctaataacaatgacaacaaaaaaaataaatgaccagttttgtgttggggggggtgtatggtgctggttacttttccgcagttggcatgggttgccctacaggcccacagggccaccagcacacccccgcacgctgggcaccaacagagccacggagcgcgagcacatgcccgcccggggagcacaatggcgctgcacaaaacggcctcccacacgtgcgtccaggctcttgcgccacctccttctcattctcttttcagactttcatgtagtcccagctttgagccagcagctgccacttggggctgcagagctctgttgagggaactgcccagggctgggtagaggcagcaaggggacagggctgggtgctgttgtgtgcgaactgagctgcactctccttaggcccagttcaggcctcagcccctctttcccaggccctggatctcaccagcagccaaggttgagccagaaccagaaccctgtccctccggcccccagttcctaccccagaaccagttaactgtgcttcaggggtagggctgggcccacagagcctgggggagtgtcaccgcctttgctgcctctcagttagtgtcaatgctatgggtttcctggtaggagccctgccctcgctcctctgctggattctagtcccccacccgacctcaccgtcagagctggtcctccctcggcactgctcacagctgctgcctcagagcctggtgaccctgcctgctcaaatccgaggccatcttgacccagtttcacagtaagccccacctcctcccgctccacctccctcggcctctccttcaccgtggaaaatggagcaggcccttgcagaacaccccagcccttctcacccctcccactgcaggaaaaaggagccaaactgtcctttagtcctgggagtggggaccttgactccccgtcatgggccctccagcccctcaccttcattggtgcccagggcttcctcctggaggcagtcatcagacctgtcagagcagttccctgcctggagaggcagttccccactgccagagagttggaggaaagaatgtggatggaatttggcatctgaagctaagtgattctagggtacctcccaactcctaagcaaaatgggacatgtcctcctggctaaggaggttgaatgggagccagggctctatcccctgccctctcctgactgcaagcatggctaggttttcctgggcctgggatcccgggagaggaccagcaatctcactcatctggggctgtttccaggccaaggtgcctttctcagatcctgtgatcctcactgaggattgaggtttgagataagagagctggttaccaggaagcaagcaagcatcctccttccacagtgccggcgtgcagcaggtgctaatatgacttaaagaatttgttcaggggccaggtgctcatgcctgtaatcccagtactttgggagcccgaggtaggagaatgacttgagtctgggagtttgagaccagcctgggcaaaatagtgagaccctatctctacaaataatccaaaattagacaggcgtggtagtgcgcacctgtagtcccagctactcaggaagctgaggcaggagaatcgcttgagcccaggaagtggaggctgcaatgagctgtgatcacaccacagcactcagcttgagtgactgagtgggatcttgtctcaaaaaaaaaaaagtgttcagccaggcatggtggtacacacttgtagtcccagctactcaggaggctgagacaggaggactgcttgagcccaggagttcaaagccagcctgggcaacatagtgagacccccccacccagctcttaagaaaaaaaaaacac

SEQ ID NO: 65634 - DNA, 3533 bp, Homo sapiens
agcgggaggcgattccggggcagcgagtcgtcggccgccgcgctcgagcctccgcccgcaccgagccgcgggacccgggccgtaccggggaggggccgctccgggccgcagcgcgagggcagcgaggggcggcggggacctggcaccgggcggggccggcggcagcgaccatgatcgctttgttcaacaagctgctggactggttcaaggccctattctggaaggaggagatggagctcacgctggtcgggcttcagtactcgggcaagaccaccttcgtcaacgtgatcgcgtcaggacagttcaacgaggacatgatccccaccgtgggtttcaacatgcgcaaaatcaccaaagggaatgtgactatcaagctctgggacattgggggacagccgcgtttccgcagcatgtgggagcgctactgccgaggagtgagcgccatcgtgtacatggtggatgctgctgaccaggagaagattgaggcctctaagaacgagctccacaacctactggacaaacctcagctgcagggcatcccggaatctgtctgccatccaggaccgagagatctgctgctactccatctcttgcaaagaaaaggacaacattgacatcaccctacagtggcttattcaacactcgaagtcacggagaagctgagactccagcccttctccctcagaccagggaccgtcatcatctaaacctgaagccgagctccccgcccacccctgtcgtccccctaagcccacccctcctcacccagtgtgaggagggccctctggggaccccagagtcctgttctgctgaggtttgaactcctgtttttattgtaaaataaattgccccccattctggtcccctaacttctcacccttccccgctgcctttgtcccatcacccagccctgcctccctcccagcagccctgggccacagcccccgcccctggcttttccccggcccgctcttgtacctcccttttcaacactctctgttattgtcctgtgtgtacagtatatatatgtatatatattttaattttttaatttaagcaaagactaaaatcaaccatttgatgctgcaggggcctttcaggatctgggagggggcagtctggagagaaggagggagacgcaggtggacttggggcaagttcagatcagaagaggtgcaggctggcacctgcggcaggtaccagcctgggcactggtggccgcctccctgtcccgtgtgtttccaccgcccaatctggcttgtcctggcagtgcttgaatgccacaggctggcaggggcctctgggggcccctcccctcgacccccagcctgggtagagccaccaggtacgacgaccaggtaccagaaaccaccaggcacacggggcagaaagccagcgtccatgccccagcagccccctcctgcctgttcctggctcccagctcccgcccctccccagggcccccacctccacggcccacttcattttctgttctcattttgcagagttgcacaaggagagaactcagcatggggggttggttctttgggttctgtttgtttatttgtttaatttaatgatttgtaaagtgatgttcctcttccttttttacacttttcagctcatatttaacctctgtttggaaaatgattcttgtaactgtacatttttttgcttcctaataacaatgacaacaaaaaaaataaatgaccagttttgtgttggggggggtgtatggtgctggttacttttccgcagttggcatgggttgccctacaggcccacagggccaccagcacacccccgcacgctgggcaccaacagagccacggagcgcgagcacatgcccgcccggggagcacaatggcgctgcacaaaacggcctcccacacgtgcgtccaggctcttgcgccacctccttctcattctcttttcagactttcatgtagtcccagctttgagccagcagctgccacttggggctgcagagctctgttgagggaactgcccagggctgggtagaggcagcaaggggacagggctgggtgctgttgtgtgcgaactgagctgcactctccttaggcccagttcaggcctcagcccctctttcccaggccctggatctcaccagcagccaaggttgagccagaaccagaaccctgtccctccggcccccagttcctaccccagaaccagttaactgtgcttcaggggtagggctgggcccacagagcctgggggagtgtcaccgcctttgctgcctctcagttagtgtcaatgctatgggtttcctggtaggagccctgccctcgctcctctgctggattctagtcccccacccgacctcaccgtcagagctggtcctccctcggcactgctcacagctgctgcctcagagcctggtgaccctgcctgctcaaatccgaggccatcttgacccagtttcacagtaagccccacctcctcccgctccacctccctcggcctctccttcaccgtggaaaatggagcaggcccttgcagaacaccccagcccttctcacccctcccactgcaggaaaaaggagccaaactgtcctttagtcctgggagtggggaccttgactccccgtcatgggccctccagcccctcaccttcattggtgcccagggcttcctcctggaggcagtcatcagacctgtcagagcagttccctgcctggagaggcagttccccactgccagagagttggaggaaagaatgtggatggaatttggcatctgaagctaagtgattctagggtacctcccaactcctaagcaaaatgggacatgtcctcctggctaaggaggttgaatgggagccagggctctatcccctgccctctcctgactgcaagcatggctaggttttcctgggcctgggatcccgggagaggaccagcaatctcactcatctggggctgtttccaggccaaggtgcctttctcagatcctgtgatcctcactgaggattgaggtttgagataagagagctggttaccaggaagcaagcaagcatcctccttccacagtgccggcgtgcagcaggtgctaatatgacttaaagaatttgttcaggggccaggtgctcatgcctgtaatcccagtactttgggagcccgaggtaggagaatgacttgagtctgggagtttgagaccagcctgggcaaaatagtgagaccctatctctacaaataatccaaaattagacaggcgtggtagtgcgcacctgtagtcccagctactcaggaagctgaggcaggagaatcgcttgagcccaggaagtggaggctgcaatgagctgtgatcacaccacagcactcagcttgagtgactgagtgggatcttgtctcaaaaaaaaaaaagtgttcagccaggcatggtggtacacacttgtagtcccagctactcaggaggctgagacaggaggactgcttgagcccaggagttcaaagccagcctgggcaacatagtgagacccccccacccagctcttaagaaaaaaaaaacac

SEQ ID NO: 65635 - DNA, 1263 bp, Homo sapiens
agcgggaggcgattccggggcagcgagtcgtcggccgccgcgctcgagcctccgcccgcaccgagccgcgggacccgggccgtaccggggaggggccgctccgggccgcagcgcgagggcagcgaggggcggcggggacctggcaccgggcggggccggcggcagcgaccatgatcgctttgttcaacaagctgctggactggttcaaggccctattctggaaggaggagatggagctcacgctggtcgggcttcagtactcgggcaagaccaccttcgtcaacgtgatcgcgtcaggacagttcaacgaggacatgatccccaccgtgggtttcaacatgcgcaaaatcaccaaagggaatgtgactatcaagctctgggacattgggggacagccgcgtttccgcagcatgtgggagcgctactgccgaggagtgagcgccatcgtgtacatggtggatgctgctgaccaggagaagattgaggcctctaagaacgagctccacaacctactggacaaacctcagctgcagggcatcccggtcttagtcctgggtaacaagcgagaccttccgggagcattggatgagaaggagctgattgagaaaatgaatctgtctgccatccaggaccgagagatctgctgctactccatctcttgcaaagaaaaggacaacattgacatcaccctacagtggcttattcaacactcgaagtcacggagaagctgagactccagcccttctccctcagaccagggaccgtcatcatctaaacctgaagccgagctccccgcccacccctgtcgtccccctaagcccacccctcctcacccagtgtgaggagggccctctggggaccccagagtcctgttctgctgaggtttgaactcctgtttttattgtaaaataaattgccccccattctggtcccctaacttctcacccttccccgctgcctttgtcccatcacccagccctgcctcccccctccccagggcccccacctccacggcccacttcattttctgttctcattttgcagagttgcacaaggagagaactcagcatggggggttggttctttgggttctgtttgtttatttgtttaatttaatgatttgtaaagtgatgttcctcttccttttttacacttttcagctcatatttaacctctgtttggaaaatgattcttgtaactgtacatttttttgcttcctaataacaatgacaacaaaaaaaataaatgaccagttttgtgttg

SEQ ID NO: 65636 - DNA, 2712 bp, Homo sapiens
gcagagttgcacaaggagagaactcagcatggggggttggttctttgggttctcacccttccccgctgcctttgtcccatcacccagccctgcctccctcccagcagccctgggccacagcccccgcccctggcttttccccggcccgctcttgtacctcccttttcaacactctctgttattgtcctgtgtgtacagtatatatatgtatatatattttaattttttaatttaagcaaagactaaaatcaaccatttgatgctgcaggggcctttcaggatctgggagggggcagtctggagagaaggagggagacgcaggtggacttggggcaagttcagatcagaagaggtgcaggctggcacctgcggcaggtaccagcctgggcactggtggccgcctccctgtcccgtgtgtttccaccgcccaatctggcttgtcctggcagtgcttgaatgccacaggctggcaggggcctctgggggcccctcccctcgacccccagcctgggtagagccaccaggtacgacgaccaggtaccagaaaccaccaggcacacggggcagaaagccagcgtccatgccccagcagccccctcctgcctgttcctggctcccagctcccgcccctccccagggcccccacctccacggcccacttcattttctgttctcattttgcagagttgcacaaggagagaactcagcatggggggttggttctttgggttctgtttgtttatttgtttaatttaatgatttgtaaagtgatgttcctcttccttttttacacttttcagctcatatttaacctctgtttggaaaatgattcttgtaactgtacatttttttgcttcctaataacaatgacaacaaaaaaaataaatgaccagttttgtgttggggggggtgtatggtgctggttacttttccgcagttggcatgggttgccctacaggcccacagggccaccagcacacccccgcacgctgggcaccaacagagccacggagcgcgagcacatgcccgcccggggagcacaatggcgctgcacaaaacggcctcccacacgtgcgtccaggctcttgcgccacctccttctcattctcttttcagactttcatgtagtcccagctttgagccagcagctgccacttggggctgcagagctctgttgagggaactgcccagggctgggtagaggcagcaaggggacagggctgggtgctgttgtgtgcgaactgagctgcactctccttaggcccagttcaggcctcagcccctctttcccaggccctggatctcaccagcagccaaggttgagccagaaccagaaccctgtccctccggcccccagttcctaccccagaaccagttaactgtgcttcaggggtagggctgggcccacagagcctgggggagtgtcaccgcctttgctgcctctcagttagtgtcaatgctatgggtttcctggtaggagccctgccctcgctcctctgctggattctagtcccccacccgacctcaccgtcagagctggtcctccctcggcactgctcacagctgctgcctcagagcctggtgaccctgcctgctcaaatccgaggccatcttgacccagtttcacagtaagccccacctcctcccgctccacctccctcggcctctccttcaccgtggaaaatggagcaggcccttgcagaacaccccagcccttctcacccctcccactgcaggaaaaaggagccaaactgtcctttagtcctgggagtggggaccttgactccccgtcatgggccctccagcccctcaccttcattggtgcccagggcttcctcctggaggcagtcatcagacctgtcagagcagttccctgcctggagaggcagttccccactgccagagagttggaggaaagaatgtggatggaatttggcatctgaagctaagtgattctagggtacctcccaactcctaagcaaaatgggacatgtcctcctggctaaggaggttgaatgggagccagggctctatcccctgccctctcctgactgcaagcatggctaggttttcctgggcctgggatcccgggagaggaccagcaatctcactcatctggggctgtttccaggccaaggtgcctttctcagatcctgtgatcctcactgaggattgaggtttgagataagagagctggttaccaggaagcaagcaagcatcctccttccacagtgccggcgtgcagcaggtgctaatatgacttaaagaatttgttcaggggccaggtgctcatgcctgtaatcccagtactttgggagcccgaggtaggagaatgacttgagtctgggagtttgagaccagcctgggcaaaatagtgagaccctatctctacaaataatccaaaattagacaggcgtggtagtgcgcacctgtagtcccagctactcaggaagctgaggcaggagaatcgcttgagcccaggaagtggaggctgcaatgagctgtgatcacaccacagcactcagcttgagtgactgagtgggatcttgtctcaaaaaaaaaaaagtgttcagccaggcatggtggtacacacttgtagtcccagctactcaggaggctgagacaggaggactgcttgagcccaggagttcaaagccagcctgggcaacatagtgagacccccccacccagctcttaagaaaaaaaaaacac

SEQ ID NO: 65637 - DNA, 1193 bp, Homo sapiens
agcgggaggcgattccggggcagcgagtcgtcggccgccgcgctcgagcctccgcccgcaccgagccgcgggacccgggccgtaccggggaggggccgctccgggccgcagcgcgagggcagcgaggggcggcggggacctggcaccgggcggggccggcggcagcgaccatgatcgctttgttcaacaagctgctggactggttcaaggccctattctggaaggaggagatggagctcacgctggtcgggcttcagtactcgggcaagaccaccttcgtcaacgtgatcgcgtcaggacagttcaacgaggacatgatccccaccgtgggtttcaacatgcgcaaaatcaccaaagggaatgtgactatcaagctctgggacattgggggacagccgcgtttccgcagcatgtgggagcgctactgccgaggagtgagcgccatcgtgtacatggtggatgctgctgaccaggagaagattgaggcctctaagaacgagctccacaacctactggacaaacctcagctgcagggcatcccggtcttagtcctgggtaacaagcgagaccttccgggagcattggatgagaaggagctgattgagaaaatgaatctgtctgccatccaggaccgagagatctgctgctactccatctcttgcaaagaaaaggacaacattgacatcaccctacagtggcttattcaacactcgaagtcacggagaagctgagactccagcccttctccctcagaccagggaccgtcatcatctaaacctgaagccgagctccccgcccacccctgtcgtccccctaagcccacccctcctcacccagtgtgaggagggccctctggggaccccagagtcctgttctgctgaggtttgaactcctgtttttattgtaaaataaattgcccctccccagggcccccacctccacggcccacttcattttctgttctcattttgcagagttgcacaaggagagaactcagcatggggggttggttctttgggttctgtttgtttatttgtttaatttaatgatttgtaaagtgatgttcctcttccttttttacacttttcagctcatatttaacctctgtttggaaaatgattcttgtaactgtacatttttttgcttcctaataacaatgacaacaaaaaaaataaatgaccagttttgtgttg

SEQ ID NO: 65638 - DNA, 841 bp, Homo sapiens
agcgggaggcgattccggggcagcgagtcgtcggccgccgcgctcgagcctccgcccgcaccgagccgcgggacccgggccgtaccggggaggggccgctccgggccgcagcgcgagggcagcgaggggcggcggggacctggcaccgggcggggccggcggcagcgaccatgatcgctttgttcaacaagctgctggactggttcaaggccctattctggaaggaggagatggagctcacgctggtcgggcttcagtactcgggcaagaccaccttcgtcaacgtgatcgcgtcaggacagttcaacgaggacatgatccccaccgtgggtttcaacatgcgcaaaatcaccaaagggaatgtgactatcaagctctgggacattgggggacagccgcgtttccgcagcatgtgggagcgctactgccgaggagtgagcgccatcgtgtacatggtggatgctgctgaccaggagaagattgaggcctctaagaacgagctccacaacctactggacaaacctcagctgcagggcatcccggtcttagtcctgggtaacaagcgagaccttccgggagcattggatgagaaggagctgattgagaaaatgaatctgtctgccatccaggaccgagagatctgctgctactccatctcttgcaaagaaaaggacaacattgacatcaccctacagtggcttattcaacactcgaagtcacggagaagctgagactccagcccttctccctcagaccagggaccgtcatcatctaaacctgaagccgagctccccgcccacccctgtctggcctgagatgggatcctctagatcacctccca

SEQ ID NO: 65639 - DNA, 607 bp, Homo sapiens
tggggcagaggccagggtccccctgctgaggagctgggaaaagacagtagaagacttctaaggtagacggagagcgggtggagacgggggagaactggagaggaagccggggaggcagaggagagtagggcagggtaggagggggcatttgagacccaagacacgttttggtggcctgcccactactgaggctatctcaccctcttcttgctcagctctgggacattgggggacagccgcgtttccgcagcatgtgggagcgctactgccgaggagtgagcgccatcgtgtaagtacacgggaggcatcgccagactccagccttacccggcccccctagccctgctaccttcgaggacctcagaggcgcagggttttattagacataatccttggttcatgacacagtgtcggtccagggcctgcgtttattttgcatgccacttgtttcttattggataaatgccctgggcactcactacccaatctaagaaacagactatagactattaaccagccagatgcacctgtgcatcctcttcattgacttgtctccctcccctcaacccaaagtcaccactgtcttgaattttgtgtggtttaaatg

SEQ ID NO: 65640 - DNA, 3601 bp, Homo sapiens
agcgggaggcgattccggggcagcgagtcgtcggccgccgcgctcgagcctccgcccgcaccgagccgcgggacccgggccgtaccggggaggggccgctccgggccgcagcgcgagggcagcgaggggcggcggggacctggcaccgggcggggccggcggcagcgaccatgatcgctttgttcaacaagctgctggactggttcaaggccctattctggaaggaggagatggagctcacgctggtcgggcttcagtactcgggcaagaccaccttcgtcaacgtgatcgcgtcaggacagttcaacgaggacatgatccccaccgtgggtttcaacatgcgcaaaatcaccaaagggaatgtgactatcaagctctgggacattgggggacagccgcgtttccgcagcatgtgggagcgctactgccgaggagtgagcgccatcgtgtacatggtggatgctgctgaccaggagaagattgaggcctctaagaacgagctccacaacctactggacaaacctcagctgcagggcatcccggtcttagtcctgggtaacaagcgagaccttccgggagcattggatgagaaggagctgattgagaaaatgaatctgtctgccatccaggaccgagagatctgctgctactccatctcttgcaaagaaaaggacaacattgacatcaccctacagtggcttattcaacactcgaagtcacggagaagctgagactccagcccttctccctcagaccagggaccgtcatcatctaaacctgaagccgagctccccgcccacccctgtcgtccccctaagcccacccctcctcacccagtgtgaggagggccctctggggaccccagagtcctgttctgctgaggtttgaactcctgtttttattgtaaaataaattgccccccattctggtcccctaacttctcacccttccccgctgcctttgtcccatcacccagccctgcctccctcccagcagccctgggccacagcccccgcccctggcttttccccggcccgctcttgtacctcccttttcaacactctctgttattgtcctgtgtgtacagtatatatatgtatatatattttaattttttaatttaagcaaagactaaaatcaaccatttgatgctgcaggggcctttcaggatctgggagggggcagtctggagagaaggagggagacgcaggtggacttggggcaagttcagatcagaagaggtgcaggctggcacctgcggcaggtaccagcctgggcactggtggccgcctccctgtcccgtgtgtttccaccgcccaatctggcttgtcctggcagtgcttgaatgccacaggctggcaggggcctctgggggcccctcccctcgacccccagcctgggtagagccaccaggtacgacgaccaggtaccagaaaccaccaggcacacggggcagaaagccagcgtccatgccccagcagccccctcctgcctgttcctggctcccagctcccgcccctccccagggcccccacctccacggcccacttcattttctgttctcattttgcagagttgcacaaggagagaactcagcatggggggttggttctttgggttctgtttgtttatttgtttaatttaatgatttgtaaagtgatgttcctcttccttttttacacttttcagctcatatttaacctctgtttggaaaatgattcttgtaactgtacatttttttgcttcctaataacaatgacaacaaaaaaaataaatgaccagttttgtgttggggggggtgtatggtgctggttacttttccgcagttggcatgggttgccctacaggcccacagggccaccagcacacccccgcacgctgggcaccaacagagccacggagcgcgagcacatgcccgcccggggagcacaatggcgctgcacaaaacggcctcccacacgtgcgtccaggctcttgcgccacctccttctcattctcttttcagactttcatgtagtcccagctttgagccagcagctgccacttggggctgcagagctctgttgagggaactgcccagggctgggtagaggcagcaaggggacagggctgggtgctgttgtgtgcgaactgagctgcactctccttaggcccagttcaggcctcagcccctctttcccaggccctggatctcaccagcagccaaggttgagccagaaccagaaccctgtccctccggcccccagttcctaccccagaaccagttaactgtgcttcaggggtagggctgggcccacagagcctgggggagtgtcaccgcctttgctgcctctcagttagtgtcaatgctatgggtttcctggtaggagccctgccctcgctcctctgctggattctagtcccccacccgacctcaccgtcagagctggtcctccctcggcactgctcacagctgctgcctcagagcctggtgaccctgcctgctcaaatccgaggccatcttgacccagtttcacagtaagccccacctcctcccgctccacctccctcggcctctccttcaccgtggaaaatggagcaggcccttgcagaacaccccagcccttctcacccctcccactgcaggaaaaaggagccaaactgtcctttagtcctgggagtggggaccttgactccccgtcatgggccctccagcccctcaccttcattggtgcccagggcttcctcctggaggcagtcatcagacctgtcagagcagttccctgcctggagaggcagttccccactgccagagagttggaggaaagaatgtggatggaatttggcatctgaagctaagtgattctagggtacctcccaactcctaagcaaaatgggacatgtcctcctggctaaggaggttgaatgggagccagggctctatcccctgccctctcctgactgcaagcatggctaggttttcctgggcctgggatcccgggagaggaccagcaatctcactcatctggggctgtttccaggccaaggtgcctttctcagatcctgtgatcctcactgaggattgaggtttgagataagagagctggttaccaggaagcaagcaagcatcctccttccacagtgccggcgtgcagcaggtgctaatatgacttaaagaatttgttcaggggccaggtgctcatgcctgtaatcccagtactttgggagcccgaggtaggagaatgacttgagtctgggagtttgagaccagcctgggcaaaatagtgagaccctatctctacaaataatccaaaattagacaggcgtggtagtgcgcacctgtagtcccagctactcaggaagctgaggcaggagaatcgcttgagcccaggaagtggaggctgcaatgagctgtgatcacaccacagcactcagcttgagtgactgagtgggatcttgtctcaaaaaaaaaaaagtgttcagccaggcatggtggtacacacttgtagtcccagctactcaggaggctgagacaggaggactgcttgagcccaggagttcaaagccagcctgggcaacatagtgagacccccccacccagctcttaagaaaaaaaaaacac

SEQ ID NO: 65641 - DNA, 3523 bp, Homo sapiens
agcgggaggcgattccggggcagcgagtcgtcggccgccgcgctcgagcctccgcccgcaccgagccgcgggacccgggccgtaccggggaggggccgctccgggccgcagcgcgagggcagcgaggggcggcggggacctggcaccgggcggggccggcggcagcgaccatgatcgctttgttcaacaagctgctggactggttcaaggccctattctggaaggaggagatggagctcacgctggtcgggcttcagtactcgggcaagaccaccttcgtcaacgtgatcgcgtcaggacagttcaacgaggacatgatccccaccgtgggtttcaacatgcgcaaaatcaccaaagggaatgtgactatcaagctctgggacattgggggacagccgcgtttccgcagcatgtgggagcgctactgccgaggagtgagcgccatcgtgtacatggtggatgctgctgaccaggagaagattgaggcctctaagaacgagctccacaacctactggacaaacctcagctgcagggcatcccggtcttagtcctgggtaacaagcgagaccttccgggagcattggatgagaaggagctgattgagaaaatgaatctgtctgccatccaggaccgagagatctgctgctactccatctcttgcaaagaaaaggacaacattgacatcaccctacagtggcttattcaacactcgaagtcacggagaagctgagactccagcccttctccctcagaccagggaccgtcatcatctaaacctgaagccgagctccccgcccacccctgtcgtccccctaagcccacccctcctcacccagtgtgaggagggccctctggggaccccagagtcctgttctgctgaggtttgaactcctgtttttattgtaaaataaattgccccccattctggtcccctaacttctcacccttccccggcccgctcttgtacctcccttttcaacactctctgttattgtcctgtgtgtacagtatatatatgtatatatattttaattttttaatttaagcaaagactaaaatcaaccatttgatgctgcaggggcctttcaggatctgggagggggcagtctggagagaaggagggagacgcaggtggacttggggcaagttcagatcagaagaggtgcaggctggcacctgcggcaggtaccagcctgggcactggtggccgcctccctgtcccgtgtgtttccaccgcccaatctggcttgtcctggcagtgcttgaatgccacaggctggcaggggcctctgggggcccctcccctcgacccccagcctgggtagagccaccaggtacgacgaccaggtaccagaaaccaccaggcacacggggcagaaagccagcgtccatgccccagcagccccctcctgcctgttcctggctcccagctcccgcccctccccagggcccccacctccacggcccacttcattttctgttctcattttgcagagttgcacaaggagagaactcagcatggggggttggttctttgggttctgtttgtttatttgtttaatttaatgatttgtaaagtgatgttcctcttccttttttacacttttcagctcatatttaacctctgtttggaaaatgattcttgtaactgtacatttttttgcttcctaataacaatgacaacaaaaaaaataaatgaccagttttgtgttggggggggtgtatggtgctggttacttttccgcagttggcatgggttgccctacaggcccacagggccaccagcacacccccgcacgctgggcaccaacagagccacggagcgcgagcacatgcccgcccggggagcacaatggcgctgcacaaaacggcctcccacacgtgcgtccaggctcttgcgccacctccttctcattctcttttcagactttcatgtagtcccagctttgagccagcagctgccacttggggctgcagagctctgttgagggaactgcccagggctgggtagaggcagcaaggggacagggctgggtgctgttgtgtgcgaactgagctgcactctccttaggcccagttcaggcctcagcccctctttcccaggccctggatctcaccagcagccaaggttgagccagaaccagaaccctgtccctccggcccccagttcctaccccagaaccagttaactgtgcttcaggggtagggctgggcccacagagcctgggggagtgtcaccgcctttgctgcctctcagttagtgtcaatgctatgggtttcctggtaggagccctgccctcgctcctctgctggattctagtcccccacccgacctcaccgtcagagctggtcctccctcggcactgctcacagctgctgcctcagagcctggtgaccctgcctgctcaaatccgaggccatcttgacccagtttcacagtaagccccacctcctcccgctccacctccctcggcctctccttcaccgtggaaaatggagcaggcccttgcagaacaccccagcccttctcacccctcccactgcaggaaaaaggagccaaactgtcctttagtcctgggagtggggaccttgactccccgtcatgggccctccagcccctcaccttcattggtgcccagggcttcctcctggaggcagtcatcagacctgtcagagcagttccctgcctggagaggcagttccccactgccagagagttggaggaaagaatgtggatggaatttggcatctgaagctaagtgattctagggtacctcccaactcctaagcaaaatgggacatgtcctcctggctaaggaggttgaatgggagccagggctctatcccctgccctctcctgactgcaagcatggctaggttttcctgggcctgggatcccgggagaggaccagcaatctcactcatctggggctgtttccaggccaaggtgcctttctcagatcctgtgatcctcactgaggattgaggtttgagataagagagctggttaccaggaagcaagcaagcatcctccttccacagtgccggcgtgcagcaggtgctaatatgacttaaagaatttgttcaggggccaggtgctcatgcctgtaatcccagtactttgggagcccgaggtaggagaatgacttgagtctgggagtttgagaccagcctgggcaaaatagtgagaccctatctctacaaataatccaaaattagacaggcgtggtagtgcgcacctgtagtcccagctactcaggaagctgaggcaggagaatcgcttgagcccaggaagtggaggctgcaatgagctgtgatcacaccacagcactcagcttgagtgactgagtgggatcttgtctcaaaaaaaaaaaagtgttcagccaggcatggtggtacacacttgtagtcccagctactcaggaggctgagacaggaggactgcttgagcccaggagttcaaagccagcctgggcaacatagtgagacccccccacccagctcttaagaaaaaaaaaacac

SEQ ID NO: 65642 - DNA, 1828 bp, Homo sapiens
agcgggaggcgattccggggcagcgagtcgtcggccgccgcgctcgagcctccgcccgcaccgagccgcgggacccgggccgtaccggggaggggccgctccgggccgcagcgcgagggcagcgaggggcggcggggacctggcaccgggcggggccggcggcagcgaccatgatcgctttgttcaacaagctgctggactggttcaaggccctattctggaaggaggagatggagctcacgctggtcgggcttcagtactcgggcaagaccaccttcgtcaacgtgatcgcgtcaggacagttcaacgaggacatgatccccaccgtgggtttcaacatgcgcaaaatcaccaaagggaatgtgactatcaagctctgggacattgggggacagccgcgtttccgcagcatgtgggagcgctactgccgaggagtgagcgccatcgtgtacatggtggatgctgctgaccaggagaagattgaggcctctaagaacgagctccacaacctactggacaaacctcagctgcagggcatcccggtcttagtcctgggtaacaagcgagaccttccgggagcattggatgagaaggagctgattgagaaaatgaatctgtctgccatccaggaccgagagatctgctgctactccatctcttgcaaagaaaaggacaacattgacatcaccctacagtggcttattcaacactcgaagtcacggagaagctgagactccagcccttctccctcagaccagggaccgtcatcatctaaacctgaagccgagctccccgcccacccctgtcgtccccctaagcccacccctcctcacccagtgtgaggagggccctctggggaccccagagtcctgttctgctgaggtttgaactcctgtttttattgtaaaataaattgccccccattctggtcccctaacttctcacccttccccgctgcctttgtcccatcacccagccctgcctccctcccagcagccctgggccacagcccccgcccctggcttttccccggcccgctcttgtacctcccttttcaacactctctgttattgtcctgtgtgtacagtatatatatgtatatatattttaattttttaatttaagcaaagactaaaatcaaccatttgatgctgcaggggcctttcaggatctgggagggggcagtctggagagaaggagggagacgcaggtggacttggggcaagttcagatcagaagaggtgcaggctggcacctgcggcaggtaccagcctgggcactggtggccgcctccctgtcccgtgtgtttccaccgcccaatctggcttgtcctggcagtgcttgaatgccacaggctggcaggggcctctgggggcccctcccctcgacccccagcctgggtagagccaccaggtacgacgaccaggtaccagaaaccaccaggcacacggggcagaaagccagcgtccatgccccagcagccccctcctgcctgttcctggctcccagctcccgcccctccccagggcccccacctccacggcccacttcattttctgttctcattttgcagagttgcacaaggagagaactcagcatggggggttggttctttgggttctgtttgtttatttgtttaatttaatgatttgtaaagtgatgttcctcttccttttttacacttttcagctcatatttaacctctgtttggaaaatgattcttgtaactgtacatttttttgcttcctaataacaatgacaacaaaaaaaataaatgaccagttttgtgttgaaaaaaaaaccaccgacgacaatgccggtccaacac

SEQ ID NO: 65643 - DNA, 3002 bp, Homo sapiens
agcgggaggcgattccggggcagcgagtcgtcggccgccgcgctcgagcctccgcccgcaccgagccgcgggacccgggccgtaccggggaggggccgctccgggccgcagcgcgagggcagcgaggggcggcggggacctggcaccgggcggggccggcggcagcgaccatgatcgctttgttcaacaagctgctggactggttcaaggccctattctggaaggaggagatggagctcacgctggtcgggcttcagtactcgggcaagaccaccttcgtcaacgtgatcgcgtcaggacagttcaacgaggacatgatccccaccgtgggtttcaacatgcgcaaaatcaccaaagggaatgtgactatcaagctctgggacattgggggacagccgcgtttccgcagcatgtgggagcgctactgccgaggagtgagcgccatcgtgtacatggtggatgctgctgaccaggagaagattgaggcctctaagaacgagctccacaacctactggacaaacctcagctgcagggcatcccggtcttagtcctgggtaacaagcgagaccttccgggagcattggatgagaaggagctgattgagaaaatgaatctgtctgccatccaggaccgagagatctgctgctactccatctcttgcaaagaaaaggacaacattgacatcaccctacagtggcttattcaacactcgaagtcacggagaagctgagactccagcccttctccctcagaccagggaccgtcatcatctaaacctgaagccgagctccccgcccacccctgtcgtccccctaagcccacccctcctcacccagtgtgaggagggccctctggggaccccagagtcctgttctgctgaggtttgaactcctgtttttattgtaaaataaattgcccctccccagggcccccacctccacggcccacttcattttctgttctcattttgcagagttgcacaaggagagaactcagcatggggggttggttctttgggttctgtttgtttatttgtttaatttaatgatttgtaaagtgatgttcctcttccttttttacacttttcagctcatatttaacctctgtttggaaaatgattcttgtaactgtacatttttttgcttcctaataacaatgacaacaaaaaaaataaatgaccagttttgtgttggggggggtgtatggtgctggttacttttccgcagttggcatgggttgccctacaggcccacagggccaccagcacacccccgcacgctgggcaccaacagagccacggagcgcgagcacatgcccgcccggggagcacaatggcgctgcacaaaacggcctcccacacgtgcgtccaggctcttgcgccacctccttctcattctcttttcagactttcatgtagtcccagctttgagccagcagctgccacttggggctgcagagctctgttgagggaactgcccagggctgggtagaggcagcaaggggacagggctgggtgctgttgtgtgcgaactgagctgcactctccttaggcccagttcaggcctcagcccctctttcccaggccctggatctcaccagcagccaaggttgagccagaaccagaaccctgtccctccggcccccagttcctaccccagaaccagttaactgtgcttcaggggtagggctgggcccacagagcctgggggagtgtcaccgcctttgctgcctctcagttagtgtcaatgctatgggtttcctggtaggagccctgccctcgctcctctgctggattctagtcccccacccgacctcaccgtcagagctggtcctccctcggcactgctcacagctgctgcctcagagcctggtgaccctgcctgctcaaatccgaggccatcttgacccagtttcacagtaagccccacctcctcccgctccacctccctcggcctctccttcaccgtggaaaatggagcaggcccttgcagaacaccccagcccttctcacccctcccactgcaggaaaaaggagccaaactgtcctttagtcctgggagtggggaccttgactccccgtcatgggccctccagcccctcaccttcattggtgcccagggcttcctcctggaggcagtcatcagacctgtcagagcagttccctgcctggagaggcagttccccactgccagagagttggaggaaagaatgtggatggaatttggcatctgaagctaagtgattctagggtacctcccaactcctaagcaaaatgggacatgtcctcctggctaaggaggttgaatgggagccagggctctatcccctgccctctcctgactgcaagcatggctaggttttcctgggcctgggatcccgggagaggaccagcaatctcactcatctggggctgtttccaggccaaggtgcctttctcagatcctgtgatcctcactgaggattgaggtttgagataagagagctggttaccaggaagcaagcaagcatcctccttccacagtgccggcgtgcagcaggtgctaatatgacttaaagaatttgttcaggggccaggtgctcatgcctgtaatcccagtactttgggagcccgaggtaggagaatgacttgagtctgggagtttgagaccagcctgggcaaaatagtgagaccctatctctacaaataatccaaaattagacaggcgtggtagtgcgcacctgtagtcccagctactcaggaagctgaggcaggagaatcgcttgagcccaggaagtggaggctgcaatgagctgtgatcacaccacagcactcagcttgagtgactgagtgggatcttgtctcaaaaaaaaaaaagtgttcagccaggcatggtggtacacacttgtagtcccagctactcaggaggctgagacaggaggactgcttgagcccaggagttcaaagccagcctgggcaacatagtgagacccccccacccagctcttaagaaaaaaaaaacac

SEQ ID NO: 65644 - DNA, 1080 bp, Homo sapiens
agcgggaggcgattccggggcagcgagtcgtcggccgccgcgctcgagcctccgcccgcaccgagccgcgggacccgggccgtaccggggaggggccgctccgggccgcagcgcgagggcagcgaggggcggcggggacctggcaccgggcggggccggcggcagcgaccatgatcgctttgttcaacaagctgctggactggttcaaggccctattctggaaggaggagatggagctcacgctggtcgggcttcagtactcgggcaagaccaccttcgtcaacgtgatcgcgtcaggacagttcaacgaggacatgatccccaccgtgggtttcaacatgcgcaaaatcaccaaagggaatgtgactatcaagctctgggacattgggggacagccgcgtttccgcagcatgtgggagcgctactgccgaggagtgagcgccatcgtgtacatggtggatgctgctgaccaggagaagattgaggcctctaagaacgagctccacaacctactggacaaacctcagctgcagggcatcccggtcttagtcctgggtaacaagcgagaccttccgggagcattggatgagaaggagctgattgagaaaatgaatctgtctgccatccaggaccgagagatctgctgctactccatctcttgcaaagaaaaggacaacattgacatcaccctacagtggcttattcaacactcgaagtcacggagaagctgagactccagcccttctccctcagaccagggaccgtcatcatctaaacctgaagccgagctccccgcccacccctgtcgtccccctaagcccacccctcctcacccagtgtgaggagggccctctggggaccccagagtcctgttctgctgaggtttgaactcctgtttttattgtaaaataaattgccccccattctggtcccctaacttctcacccaaaaaattctctagggggggcccgttacccaattctccctattttgagttatatacaatttcttggcccgtgtttttccacctgttttgcctgtaaaacccttgtagtaccacacctaaatcactttgcagta

SEQ ID NO: 65645 - DNA, 836 bp, Homo sapiens
agcgggaggcgattccggggcagcgagtcgtcggccgccgcgctcgagcctccgcccgcaccgagccgcgggacccgggccgtaccggggaggggccgctccgggccgcagcgcgagggcagcgaggggcggcggggacctggcaccgggcggggccggcggcagcgaccatgatcgctttgttcaacaagctgctggactggttcaaggccctattctggaaggaggagatggagctcacgctggtcgggcttcagtactcgggcaagaccaccttcgtcaacgtgatcgcgtcaggacagttcaacgaggacatgatccccaccgtgggtttcaacatgcgcaaaatcaccaaagggaatgtgactatcaagctctgggacattgggggacagccgcgtttccgcagcatgtgggagcgctactgccgaggagtgagcgccatcgtgtacatggtggatgctgctgaccaggagaagattgaggcctctaagaacgagctccacaacctactggacaaacctcagctgcagggcatcccggtcttagtcctgggtaacaagcgagaccttccgggagcattggatgagaaggagctgattgagaaaatgaatctgtctgccatccaggaccgagagatctgctgctactccatctcttgcaaagaaaaggacaacattgacatcaccctacagtggcttattcaacactcgaagtcacggagaagctgagactccagcccttctccctcagaccagggaccgtcatcatctaaacctgaagccgagctccccgcccacccctgtctttccagacttgggatacctctagagtcg

SEQ ID NO: 65646 - DNA, 859 bp, Homo sapiens
agcggacagttgaagaagcgaccgagggactgggagtcgttagtgaggatgacgcggcatggcaagaactgcaccgcaggggccgtctacacctaccacgagaagaagaaggacacagcggcctcgggctatgggacccagaacattcgactgagccgggatgccgtgaaggacttcgactgctgttgtctctccctgcagccttgccacgatcctgttgtcaccccagatggctacctgtatgagcgtgaggccatcctggagtacattctgcaccagaagaaggagattgcccggcagatgaaggtgatggggatggggaggaggcggcacacggaggcaggagcttttgagtctgagctcacaggcagagccactcagagccctctgatctcagttccctctgcctggtacaccattcccctcccctgcttccggccaaatccttctcaccgatttcagcccagatgctgcctcctctgagctcctgccagtccccaggatctgccccagtcacctcttctcttagcacttagcatagttgtagctgtacatgtggctgtctgacacatgcccactttcccttatggacttcgagttttcccaccctgtagcttaggtccttagtaaagatatgctaaatgggtcgggggtggtggctcacacctgtaatcccaggactttgggaggccgaggcaggcggatcacttgaggtcaacagttagaggccagcctggccaacatggtgaaaccctgtctgtactaaaaataaaaaaataaaaaaaaaaattgagccgggcatggcgggcgcctgtaatcccagctactcaggaagctgaggcaggagaatcgcttgaac

SEQ ID NO: 65647 - DNA, 1133 bp, Homo sapiens
agcggacagttgaagaagcgaccgagggactgggagtcgttagtgagatggggttttgccatgttggccaggctggacttgaactcctgacctcaagtgatctgcccgcttcagcctccaaagtgctgggattacaggtgtaagccacggtgctcggccttcagtgaagttttaatgatgacgcggcatggcaagaactgcaccgcaggggccgtctacacctaccacgagaagaagaaggacacagcggcctcgggctatgggacccagaacattcgactgagccgggatgccgtgaaggacttcgactgctgttgtctctccctgcagccttgccacgatcctgttgtcaccccagatggctacctgtatgagcgtgaggccatcctggagtacattctgcaccagaagaaggagattgcccggcagatgaaggcctacgagaagcagcggggcacccggcgcgaggagcagaaggagcttcagcgggcggcctcgcaggaccatgtgcggggcttcctggagaaggagtcggctatcgtgagccggcccctcaaccctttcacagccaaggccctctcgggcaccagcccagatgatgtccaacctgggcccagtgtgggtcctccaagtaaggacaaggacaaagtgctgcccagcttctggatcccgtcgctgacgcccgaagccaaggccaccaagctggagaagccgtcccgcacggtgacctgccccatgtcagggaagcccctgcgcatgtcggacctgacgcccgtgcacttcacaccgctagacagctccgtggaccgcgtggggctcatcacccgcagcgagcgctacgtgtgtgccgtgacccgcgacagcctgagcaacgccaccccctgcgctgtgctgcggccctctggggctgtggtcaccctcgaatgcgtggagaagctgattcggaaggacatggtggaccctgtgactggagacaaactcacagaccgcgacatcatcgtgctgcagcggggcggtaccggcttcgcgggctccggagtgaagctgcaagcggagaaatcacggccggtgatgcaggcctgagtgtgtgcgggagaccaaataaaccggcttgggtgcgcaaaaaaaaaaaa

SEQ ID NO: 65648 - DNA, 1095 bp, Homo sapiens
aaaaccagaaacattgctgatatgaccacaataccatcatcacactttaaaagaacaaccgtaattctagactactatccattacgtggtgcagagtcaagtccagtgtaactgtgggtttgttggaatcaggatatagatgacgcggcatggcaagaactgcaccgcaggggccgtctacacctaccacgagaagaagaaggacacagcggcctcgggctatgggacccagaacattcgactgagccgggatgccgtgaaggacttcgactgctgttgtctctccctgcagccttgccacgatcctgttgtcaccccagatggctacctgtatgagcgtgaggccatcctggagtacattctgcaccagaagaaggagattgcccggcagatgaaggcctacgagaagcagcggggcacccggcgcgaggagcagaaggagcttcagcgggcggcctcgcaggaccatgtgcggggcttcctggagaaggagtcggctatcgtgagccggcccctcaaccctttcacagccaaggccctctcgggcaccagcccagatgatgtccaacctgggcccagtgtgggtcctccaagtaaggacaaggacaaagtgctgcccagcttctggatcccgtcgctgacgcccgaagccaaggccaccaagctggagaagccgtcccgcacggtgacctgccccatgtcagggaagcccctgcgcatgtcggacctgacgcccgtgcacttcacaccgctagacagctccgtggaccgcgtggggctcatcacccgcagcgagcgctacgtgtgtgccgtgacccgcgacagcctgagcaacgccaccccctgcgctgtgctgcggccctctggggctgtggtcaccctcgaatgcgtggagaagctgattcggaaggacatggtggaccctgtgactggagacaaactcacagaccgcgacatcatcgtgctgcagcggggcggtaccggcttcgcgggctccggagtgaagctgcaagcggagaaatcacggccggtgatgcaggcctgagtgtgtgcgggagaccaaataaaccggcttgggtgcgcaaaaaaaaaaaa

SEQ ID NO: 65649 - DNA, 985 bp, Homo sapiens
cccacgcgtccggggagtcgttagtgaggatgacgcggcatggcaagaactgcaccgcaggggccgtctacacctaccacgagaagaagaaggacacagcggcctcgggctatgggacccagaacattcgactgagccgggatgccgtgaaggacttcgactgctgttgtctctccctgcagccttgccacgatcctgttgtcaccccagatggctacctgtatgagcgtgaggccatcctggagtacattctgcaccagaagaaggagattgcccggcagatgaaggcctacgagaagcagcggggcacccggcgcgaggagcagaaggagcttcagcgggcggcctcgcaggaccatgtgcggggcttcctggagaaggagtcggctatcgtgagccggcccctcaaccctttcacagccaaggccctctcgggcaccagcccagatgatgtccaacctgggcccagtgtgggtcctccaagtaaggacaaggacaaagtgctgcccagcttctggatcccgtcgctgacgcccgaagccaaggccaccaagctggagaagccgtcccgcacggtgacctgccccatgtcagggaagcccctgcgcatgtcggacctgacgcccgtgcacttcacaccgctagacagctccgtggaccgcgtggggctcatcacccgcagcgagcgctacgtgtgtgccgtgacccgcgacagcctgagcaacgccaccccctgcgctgtgctgcggccctctggggctgtggtcaccctcgaatgcgtggagaagctgattcggaaggacatggtggaccctgtgactggagacaaactcacagaccgcgacatcatcgtgctgcagcggggcggtaccggcttcgcgggctccggagtgaagctgcaagcggagaaatcacggccggtgatgcaggcctgagtgtgtgcgggagaccaaataaaccggcttgggtgcgcaaaaaaaaaaaa

SEQ ID NO: 65650 - DNA, 969 bp, Homo sapiens
tgcaggctggtactggtcgcgaggtgttatgatccacagtcctgccactgtcccttcctccctaggatgacgcggcatggcaagaactgcaccgcaggggccgtctacacctaccacgagaagaagaaggacacaggacttcgactgctgttgtctctccctgcagccttgccacgatcctgttgtcaccccagatggctacctgtatgagcgtgaggccatcctggagtacattctgcaccagaagaaggagattgcccggcagatgaaggcctacgagaagcagcggggcacccggcgcgaggagcagaaggagcttcagcgggcggcctcgcaggaccatgtgcggggcttcctggagaaggagtcggctatcgtgagccggcccctcaaccctttcacagccaaggccctctcgggcaccagcccagatgatgtccaacctgggcccagtgtgggtcctccaagtaaggacaaggacaaagtgctgcccagcttctggatcccgtcgctgacgcccgaagccaaggccaccaagctggagaagccgtcccgcacggtgacctgccccatgtcagggaagcccctgcgcatgtcggacctgacgcccgtgcacttcacaccgctagacagctccgtggaccgcgtggggctcatcacccgcagcgagcgctacgtgtgtgccgtgacccgcgacagcctgagcaacgccaccccctgcgctgtgctgcggccctctggggctgtggtcaccctcgaatgcgtggagaagctgattcggaaggacatggtggaccctgtgactggagacaaactcacagaccgcgacatcatcgtgctgcagcggggcggtaccggcttcgcgggctccggagtgaagctgcaagcggagaaatcacggccggtgatgcaggcctgagtgtgtgcgggagaccaaataaaccggcttgggtgcgcaaaaaaaaaaaa

SEQ ID NO: 65651 - DNA, 1977 bp, Homo sapiens
tgcaggctggtactggtcgcgaggtgttatgatccacagtcctgccactgtcccttcctccctaggatgacgcggcatggcaagaactgcaccgcaggggccgtctacacctaccacgagaagaagaaggacacagcggcctcgggctatgggacccagaacattcgactgagccgggatgccgtgaaggacttcgactgctgttgtctctccctgcagccttgccacgatcctgttgtcacgtgagctgggaacagggatgggtaggtctgggtggggagagcaagggaaccgccaggaggaggctgtgtgcgtgggtctggccacctgcacagccagggaaccctggatgagcagtttatcctcagagcctctgtattctcacatgggacatgggcatgatcctagcatctgtttcatagtgtggaacatatggaaaggaacatacttctaatggggtgtagggctctcagagcattgccgaggccatcggagcagctcacctttggacacttcccatgacctacctctgatggtagggcaaaggcttaacaggtgctgagtccaggcactaaatacgtgctcaattagtggtatattttgtagaagacagtaattaatgatcagggcccccaaggccaccttcaggtttcttttttttttttgagacagagtcttcactttgttgcccaggctggagtgcaatggggacatcttggctcactgatatcccaggctcaggtgatcctcctgcctcagcccccacgagtagctggaaccacgggtgtgcactaccacacctggcgtttttgtttgttttttgtagagaggggagctcactttgttgcccaggctggtctcgaactcgtggctgcaacaatatgtggcacacattgttgctgagagaatgaagcactttccctgcagctctattgggagaggacagctggaagctcaaatctagtctctactagattctgccccatgtgcctttttcctttgctgattttaatctgcatcctttcactgcagtaaactatcaccatgagtataacagctttgctgagttctgtgaattctagcaaataattgaacttgggactgatcatgatgacttctgcctataatcccagcacttcgggaggccgaggcgggaggatcactttctttctttctcattgcaccctgtctttgcagcccagatggctacctgtatgagcgtgaggccatcctggagtacattctgcaccagaagaaggagattgcccggcagatgaaggcctacgagaagcagcggggcacccggcgcgaggagcagaaggagcttcagcgggcggcctcgcaggaccatgtgcggggcttcctggagaaggagtcggctatcgtgagccggcccctcaaccctttcacagccaaggccctctcgggcaccagcccagatgatgtccaacctgggcccagtgtgggtcctccaagtaaggacaaggacaaagtgctgcccagcttctggatcccgtcgctgacgcccgaagccaaggccaccaagctggagaagccgtcccgcacggtgacctgccccatgtcagggaagcccctgcgcatgtcggacctgacgcccgtgcacttcacaccgctagacagctccgtggaccgcgtggggctcatcacccgcagcgagcgctacgtgtgtgccgtgacccgcgacagcctgagcaacgccaccccctgcgctgtgctgcggccctctggggctgtggtcaccctcgaatgcgtggagaagctgattcggaaggacatggtggaccctgtgactggagacaaactcacagaccgcgacatcatcgtgctgcagcggggcggtaccggcttcgcgggctccggagtgaagctgcaagcggagaaatcacggccggtgatgcaggcctgagtgtgtgcgggagaccaaataaaccggcttgggtgcgcaaaaaaaaaaaa

SEQ ID NO: 65652 - DNA, 938 bp, Homo sapiens
agcggacagttgaagaagcgaccgagggactgggagtcgttagtgaggatgacgcggcatggcaagaactgcaccgcaggggccgtctacacctaccacgagaagaagaaggacacagcggcctcgggctatgggacccagaacattcgactgagccgggatgccgtgaaggacttcgactgctgttgtctctccctgcagccttgccacgatcctgttgtcaccccagatggctacctgtatgagcgtgaggccatcctggagtacattctgcaccagaagaaggagattgcccggcagatgaaggcctacgagaagcagcggggcacccggcgcgaggagcagaaggagcttcagcgggcggcctcgcaggaccatgtgcggggcttcctggagaaggagtcggctatcgtgagccggcccctcaaccctttcacagccaaggccctctcgggcaccagcccagatgatgtccaacctgggcccagtgtgggtcctccaagtaaggacaaggacaaagtgctgcccagcttctggatcccgtcgctgacgcccgaagccaaggccaccaagctggagaagccgtcccgcacggtgacctgccccatgtcagggaagcccctgcgcatgtcggacctgacgcccgtgcacttcacaccgctagacagctccgtggaccgcgtggggctcatcacccgcagcgagcgctacgtgtgtgccgtgacccgcgacagcctgagcaacgccaccccctgcgctgtgctgcggccctctggggctgtggtcaccctcgaatgcgtggagaagctgattcggaaggacatggtggaccctgtgactggagacaaactcacagaccgcgacatcatcgtgctgcagcggggcgtaccggcttcgcggctcacggaggaagcgcataagagaatgaccgccgaagc

SEQ ID NO: 65653 - DNA, 916 bp, Homo sapiens
agcggacagttgaagaagcgaccgagggactgggagtcgttagtgaggatgacgcggcatggcaagaactgcaccgcaggggccgtctacacctaccacgagaagaagaaggacacagcggcctcgggctatgggacccagaacattcgactgagccgggatgccgtgaaggacttcgactgctgttgtctctccctgcagccttgccacgatcctgttgtcaccccagatggctacctgtatgagcgtgaggccatcctggagtacattctgcaccagaagaaggagattgcccggcagatgaaggcctacgagaagcagcggggcacccggcgcgaggagcagaaggagcttcagcgggcggcctcgcaggaccatatgatgtccaacctgggcccagtgtgggtcctccaagtaaggacaaggacaaagtgctgcccagcttctggatcccgtcgctgacgcccgaagccaaggccaccaagctggagaagccgtcccgcacggtgacctgccccatgtcagggaagcccctgcgcatgtcggacctgacgcccgtgcacttcacaccgctagacagctccgtggaccgcgtggggctcatcacccgcagcgagcgctacgtgtgtgccgtgacccgcgacagcctgagcaacgccaccccctgcgctgtgctgcggccctctggggctgtggtcaccctcgaatgcgtggagaagctgattcggaaggacatggtggaccctgtgactggagacaaactcacagaccgcgacatcatcgtgctgcagcggggcggtaccggcttcgcgggctccggagtgaagctgcaagcggagaaatcacggccggtgatgcaggcctgagtgtgtgcgggagaccaaataaaccggcttgggtgcgcaaaaaaaaaaaa

SEQ ID NO: 65654 - DNA, 923 bp, Homo sapiens
agcggacagttgaagaagcgaccgagggactgggagtcgttagtgaggatgacgcggcatggcaagaactgcaccgcaggggccgtctacacctaccacgagaagaagaaggacacagcggcctcgggctatgggacccagaacattcgactgagccgggatgccgtgaaggacttcgactgctgttgtctctccctgcagccttgccacgatcctgttgtcaccccagatggctacctgtatgagcgtgaggccatcctggagtacattctgcaccagaagaaggagattgcccggcagatgaaggcctacgagaagcagcggggcacccggcgcgaggagcagaaggagcttcagcgggcggcctcgcaggaccatgtgcggggcttcctggagaaggagtcggctatcgtgagccggcccctcaaccctttcacagccaaggccctctcgggcaccagcccagatgatgtccaacctgggcccagtgtgggtcctccaagtaaggacaaggacaaagtgctgcccagcttctggatcccgtcgctgacgcccgaagccaaggccaccaagctggagaagccgagctccgtggaccgcgtggggctcatcacccgcagcgagcgctacgtgtgtgccgtgacccgcgacagcctgagcaacgccaccccctgcgctgtgctgcggccctctggggctgtggtcaccctcgaatgcgtggagaagctgattcggaaggacatggtggaccctgtgactggagacaaactcacagaccgcgacatcatcgtgctgcagcggggcggtaccggcttcgcgggctccggagtgaagctgcaagcggagaaatcacggccggtgatgcaggcctgagtgtgtgcgggagaccaaataaaccggcttgggtgcgcaaaaaaaaaaaa

SEQ ID NO: 65655 - DNA, 840 bp, Homo sapiens
agcggacagttgaagaagcgaccgagggactgggagtcgttagtgaggatgacgcggcatggcaagaactgcaccgcaggggccgtctacacctaccacgagaagaagaaggacacagcggcctcgggctatgggacccagaacattcgactgagccgggatgccgtgaaggacttcgactgctgttgtctctccctgcagccttgccacgatcctgttgtcaccccagatggctacctgtatgagcgtgaggccatcctggagtacattctgcaccagaagaaggagattgcccggcagatgaaggcctacgagaagcagcggggcacccggcgcgaggagcagaaggagcttcagcgggcggcctcgcaggaccatgtgcggggcttcctggagaaggagtcggctatcgtgagccggcccctcaaccctttcacagccaaggccctctcgggcaccagcccagatgatgtccaacctgggcccagtgtgggtcctccaaagctccgtggaccgcgtggggctcatcacccgcagcgagcgctacgtgtgtgccgtgacccgcgacagcctgagcaacgccaccccctgcgctgtgctgcggccctctggggctgtggtcaccctcgaatgcgtggagaagctgattcggaaggacatggtggaccctgtgactggagacaaactcacagaccgcgacatcatcgtgctgcagcggggcggtaccggcttcgcgggctccggagtgaagctgcaagcggagaaatcacggccggtgatgcaggcctgagtgtgtgcgggagaccaaataaaccggcttgggtgcgcaaaaaaaaaaaa

SEQ ID NO: 65656 - DNA, 2415 bp, Homo sapiens
tgcaggctggtactggtcgcgaggtgttatgatccacagtcctgccactgtcccttcctccctaggatgacgcggcatggcaagaactgcaccgcaggggccgtctacacctaccacgagaagaagaaggacacagggtgcagggctggggtgggaagaggcgggacatggctgtgtcttggagtcaccctctcccctcgtgccccaggttttgcttcctctgtccctgtctctctcccgcccccgatatacactgatggccatgaccatgtaaacaacagctgggtgatcccatgaccccatgtggcccggcactgtgttctctgccttctgcgcatgaactcactcctcccaacagagtgtcagggagggtgctcttgttaccccatgttccagaggaagaaactgaggcccaaagagggacaggcacttgagcttggtcacagtcagaagggtggaggggagtcagccgtcagcccctccaccaagctgccactcagtgaccaggcctgtctgcctctcaccctccagggttgacaactccctgtgggttcagcccgtggccccagcacacaggcagcggctcccaactgcctgtttctctctgagtcccccacccccaccaccgcgttgtctctgtgcctctctctggggctttggagacggacatgtctcctgttgctccgcccctccatcactctgcccatctctgtccccagcggcctcgggctatgggacccagaacattcgactgagccgggatgccgtgaaggacttcgactgctgttgtctctccctgcagccttgccacgatcctgttgtcacgtgagctgggaacagggatgggtaggtctgggtggggagagcaagggaaccgccaggaggaggctgtgtgcgtgggtctggccacctgcacagccagggaaccctggatgagcagtttatcctcagagcctctgtattctcacatgggacatgggcatgatcctagcatctgtttcatagtgtggaacatatggaaaggaacatacttctaatggggtgtagggctctcagagcattgccgaggccatcggagcagctcacctttggacacttcccatgacctacctctgatggtagggcaaaggcttaacaggtgctgagtccaggcactaaatacgtgctcaattagtggtatattttgtagaagacagtaattaatgatcagggcccccaaggccaccttcaggtttcttttttttttttgagacagagtcttcactttgttgcccaggctggagtgcaatggggacatcttggctcactgatatcccaggctcaggtgatcctcctgcctcagcccccacgagtagctggaaccacgggtgtgcactaccacacctggcgtttttgtttgttttttgtagagaggggagctcactttgttgcccaggctggtctcgaactcgtggctgcaacaatatgtggcacacattgttgctgagagaatgaagcactttccctgcagctctattgggagaggacagctggaagctcaaatctagtctctactagattctgccccatgtgcctttttcctttgctgattttaatctgcatcctttcactgcagtaaactatcaccatgagtataacagctttgctgagttctgtgaattctagcaaataattgaacttgggactgatcatgatgacttctgcctataatcccagcacttcgggaggccgaggcgggaggatcactttctttctttctcattgcaccctgtctttgcagcccagatggctacctgtatgagcgtgaggccatcctggagtacattctgcaccagaagaaggagattgcccggcagatgaaggtgatggggatggggaggaggcggcacacggaggcaggagcttttgagtctgagctcacaggcagagccactcagagccctctgatctcagttccctctgcctggtacaccattcccctcccctgcttccggccaaatccttctcaccgatttcagcccagatgctgcctcctctgagctcctgccagtccccaggatctgccccagtcacctcttctcttagcacttagcatagttgtagctgtacatgtggctgtctgacacatgcccactttcccttatggacttcgagttttcccaccctgtagcttaggtccttagtaaagatatgctaaatgggtcgggggtggtggctcacacctgtaatcccaggactttgggaggccgaggcaggcggatcacttgaggtcaacagttagaggccagcctggccaacatggtgaaaccctgtctgtactaaaaataaaaaaataaaaaaaaaaattgagccgggcatggcgggcgcctgtaatcccagctactcaggaagctgaggcaggagaatcgcttgaac

SEQ ID NO: 65657 - DNA, 1114 bp, Homo sapiens
tgcaggctggtactggtcgcgaggtgttatgatccacagtcctgccactgtcccttcctccctaggatgacgcggcatggcaagaactgcaccgcaggggccgtctacacctaccacgagaagaagaaggacacagggtgcagggctggggtgggaagaggcgggacatggctgtgtcttggagtcaccctctcccctcgtgccccaggttttgcttcctctgtccctgtctctctcccgcccccgatatacactgatggccatgaccatgtaaacaacagctgggtgatcccatgaccccatgtggcccggcactgtgttctctgccttctgcgcatgaactcactcctcccaacagagtgtcagggagggtgctcttgttaccccatgttccagaggaagaaactgaggcccaaagagggacaggcacttgagcttggtcacagtcagaagggtggaggggagtcagccgtcagcccctccaccaagctgccactcagtgaccaggcctgtctgcctctcaccctccagggttgacaactccctgtgggttcagcccgtggccccagcacacaggcagcggctcccaactgcctgtttctctctgagtcccccacccccaccaccgcgttgtctctgtgcctctctctggggctttggagacggacatgtctcctgttgctccgcccctccatcactctgcccatctctgtccccagcggcctcgggctatgggacccagaacattcgactgagccgggatgccgtgaaggacttcgactgctgttgtctctccctgcagccttgccacgatcctgttgtcaccccagatggctacctgtatgagcgtgaggccatcctggagtacattctgcaccagaagaaggagattgcccggcagatgaagtttcatcgtctgtaaaacgggctgacggccaaatcagaggacacagcagggcacctgggaggtacacgcagatgagcattctcaaggcgtgttactgggaacccggcctggccttccatggacaaagccatttgatgggtggctccccctgtgcccatgtcctccacacagcctggtggtcatgtcggaggccctcatgagcatcca

SEQ ID NO: 65658 - DNA, 753 bp, Homo sapiens
ggccttccatggacaaagccatttgatgggtaggaggggccctgtttgaggcacagtgggtctgtccccctcttcccctgcctggttgctggcgctcaggaaacactacaggtcacatgcttattgggctttttgtcccaagcaggtggctccccctgtgcccatgtcctccacacagcctggtggtcatgtcggaggccctcatgagcatccatcactgtcactgttacctcctcactcagctgggtggcccagggtggtctggaactgcagcaccgcccaggcaactgctgtgcgccaggcagggctgagctcaggtcatggcttcacttctcccgtcctcactcactgtccgtccatagacatgggctcctcagcattcccttagatctgaagtctacatcccccgtcccaaacacgggctggggcatgcactgtatagaaaacttaattggccagcaggtgacattaattaaatgcttagctgagtgccaggtgaggctctccatgctgtaaacactcaccttatgtaacccttcagtgagccgctgaggtgggtaaccactgttaggctgttttacagatgaagaaactgaggccaggagaggtcatagtgctcacttaggccacagagtgacagagatgggctttgagccctggcagtctggctatacaacgcagtaaggttcacacccacccagggtggcagttaccaccctctgccacatagtgcctccatcagagggtcccctt

SEQ ID NO: 65659 - DNA, 389 bp, Homo sapiens
ccatttcagcctcccgagtagctgggattacaggcgcacaccaccacgaccagctaactttttgtatttttagtacagatggggttttgccatgttggccaggctggacttgaactcctgacctcaagtgatctgcccgcttcagcctccaaagtgctgggattacaggtgtaagccacggtgctcggccttcagtgaagttttaatgtgcgtttccctggtgactatattagtttcctatcattgttgtaacaaattactactaatttagtgttgcagtgtcacacctcatggagcctctggtgtacttgtgagagaatgagaatcagaaaggcaaataatgtcttagtattattaagacaacagttttgaccttgcagactgtctag

SEQ ID NO: 65660 - DNA, 1004 bp, Homo sapiens
agcggacagttgaagaagcgaccgagggactgggagtcgttagtgaggatgacgcggcatggcaagaactgcaccgcaggggccgtctacacctaccacgagaagaagaaggacacagcggcctcgggctatgggacccagaacattcgactgagccgggatgccgtgaaggacttcgactgctgttgtctctccctgcagccttgccacgatcctgttgtcaccccagatggctacctgtatgagcgtgaggccatcctggagtacattctgcaccagaagaaggagattgcccggcagatgaaggcctacgagaagcagcggggcacccggcgcgaggagcagaaggagcttcagcgggcggcctcgcaggaccatgtgcggggcttcctggagaaggagtcggctatcgtgagccggcccctcaaccctttcacagccaaggccctctcgggcaccagcccagatgatgtccaacctgggcccagtgtgggtcctccaagtaaggacaaggacaaagtgctgcccagcttctggatcccgtcgctgacgcccgaagccaaggccaccaagctggagaagccgtcccgcacggtgacctgccccatgtcagggaagcccctgcgcatgtcggacctgacgcccgtgcacttcacaccgctagacagctccgtggaccgcgtggggctcatcacccgcagcgagcgctacgtgtgtgccgtgacccgcgacagcctgagcaacgccaccccctgcgctgtgctgcggccctctggggctgtggtcaccctcgaatgcgtggagaagctgattcggaaggacatggtggaccctgtgactggagacaaactcacagaccgcgacatcatcgtgctgcagcggggcggtaccggcttcgcgggctccggagtgaagctgcaagcggagaaatcacggccggtgatgcaggcctgagtgtgtgcgggagaccaaataaaccggcttgggtgcgcaaaaaaaaaaaa

SEQ ID NO: 65661 - DNA, 1605 bp, Homo sapiens
tgcaggctggtactggtcgcgaggtgttatgatccacagtcctgccactgtcccttcctccctaggatgacgcggcatggcaagaactgcaccgcaggggccgtctacacctaccacgagaagaagaaggacacagggtgcagggctggggtgggaagaggcgggacatggctgtgtcttggagtcaccctctcccctcgtgccccaggttttgcttcctctgtccctgtctctctcccgcccccgatatacactgatggccatgaccatgtaaacaacagctgggtgatcccatgaccccatgtggcccggcactgtgttctctgccttctgcgcatgaactcactcctcccaacagagtgtcagggagggtgctcttgttaccccatgttccagaggaagaaactgaggcccaaagagggacaggcacttgagcttggtcacagtcagaagggtggaggggagtcagccgtcagcccctccaccaagctgccactcagtgaccaggcctgtctgcctctcaccctccagggttgacaactccctgtgggttcagcccgtggccccagcacacaggcagcggctcccaactgcctgtttctctctgagtcccccacccccaccaccgcgttgtctctgtgcctctctctggggctttggagacggacatgtctcctgttgctccgcccctccatcactctgcccatctctgtccccagcggcctcgggctatgggacccagaacattcgactgagccgggatgccgtgaaggacttcgactgctgttgtctctccctgcagccttgccacgatcctgttgtcaccccagatggctacctgtatgagcgtgaggccatcctggagtacattctgcaccagaagaaggagattgcccggcagatgaaggcctacgagaagcagcggggcacccggcgcgaggagcagaaggagcttcagcgggcggcctcgcaggaccatgtgcggggcttcctggagaaggagtcggctatcgtgagccggcccctcaaccctttcacagccaaggccctctcgggcaccagcccagatgatgtccaacctgggcccagtgtgggtcctccaagtaaggacaaggacaaagtgctgcccagcttctggatcccgtcgctgacgcccgaagccaaggccaccaagctggagaagccgtcccgcacggtgacctgccccatgtcagggaagcccctgcgcatgtcggacctgacgcccgtgcacttcacaccgctagacagctccgtggaccgcgtggggctcatcacccgcagcgagcgctacgtgtgtgccgtgacccgcgacagcctgagcaacgccaccccctgcgctgtgctgcggccctctggggctgtggtcaccctcgaatgcgtggagaagctgattcggaaggacatggtggaccctgtgactggagacaaactcacagaccgcgacatcatcgtgctgcagcggggcggtaccggcttcgcgggctccggagtgaagctgcaagcggagaaatcacggccggtgatgcaggcctgagtgtgtgcgggagaccaaataaaccggcttgggtgcgcaaaaaaaaaaaa

SEQ ID NO: 65662 - DNA, 2560 bp, Homo sapiens
tgcaggctggtactggtcgcgaggtgttatgatccacagtcctgccactgtcccttcctccctaggatgacgcggcatggcaagaactgcaccgcaggggccgtctacacctaccacgagaagaagaaggacacagggtgcagggctggggtgggaagaggcgggacatggctgtgtcttggagtcaccctctcccctcgtgccccaggttttgcttcctctgtccctgtctctctcccgcccccgatatacactgatggccatgaccatgtaaacaacagctgggtgatcccatgaccccatgtggcccggcactgtgttctctgccttctgcgcatgaactcactcctcccaacagagtgtcagggagggtgctcttgttaccccatgttccagaggaagaaactgaggcccaaagagggacaggcacttgagcttggtcacagtcagaagggtggaggggagtcagccgtcagcccctccaccaagctgccactcagtgaccaggcctgtctgcctctcaccctccagggttgacaactccctgtgggttcagcccgtggccccagcacacaggcagcggctcccaactgcctgtttctctctgagtcccccacccccaccaccgcgttgtctctgtgcctctctctggggctttggagacggacatgtctcctgttgctccgcccctccatcactctgcccatctctgtccccagcggcctcgggctatgggacccagaacattcgactgagccgggatgccgtgaaggacttcgactgctgttgtctctccctgcagccttgccacgatcctgttgtcacgtgagctgggaacagggatgggtaggtctgggtggggagagcaagggaaccgccaggaggaggctgtgtgcgtgggtctggccacctgcacagccagggaaccctggatgagcagtttatcctcagagcctctgtattctcacatgggacatgggcatgatcctagcatctgtttcatagtgtggaacatatggaaaggaacatacttctaatggggtgtagggctctcagagcattgccgaggccatcggagcagctcacctttggacacttcccatgacctacctctgatggtagggcaaaggcttaacaggtgctgagtccaggcactaaatacgtgctcaattagtggtatattttgtagaagacagtaattaatgatcagggcccccaaggccaccttcaggtttcttttttttttttgagacagagtcttcactttgttgcccaggctggagtgcaatggggacatcttggctcactgatatcccaggctcaggtgatcctcctgcctcagcccccacgagtagctggaaccacgggtgtgcactaccacacctggcgtttttgtttgttttttgtagagaggggagctcactttgttgcccaggctggtctcgaactcgtggctgcaacaatatgtggcacacattgttgctgagagaatgaagcactttccctgcagctctattgggagaggacagctggaagctcaaatctagtctctactagattctgccccatgtgcctttttcctttgctgattttaatctgcatcctttcactgcagtaaactatcaccatgagtataacagctttgctgagttctgtgaattctagcaaataattgaacttgggactgatcatgatgacttctgcctataatcccagcacttcgggaggccgaggcgggaggatcactttctttctttctcattgcaccctgtctttgcagcccagatggctacctgtatgagcgtgaggccatcctggagtacattctgcaccagaagaaggagattgcccggcagatgaaggcctacgagaagcagcggggcacccggcgcgaggagcagaaggagcttcagcgggcggcctcgcaggaccatgtgcggggcttcctggagaaggagtcggctatcgtgagccggcccctcaaccctttcacagccaaggccctctcgggcaccagcccagatgatgtccaacctgggcccagtgtgggtcctccaagtaaggacaaggacaaagtgctgcccagcttctggatcccgtcgctgacgcccgaagccaaggccaccaagctggagaagccgtcccgcacggtgacctgccccatgtcagggaagcccctgcgcatgtcggacctgacgcccgtgcacttcacaccgctagacagctccgtggaccgcgtggggctcatcacccgcagcgagcgctacgtgtgtgccgtgacccgcgacagcctgagcaacgccaccccctgcgctgtgctgcggccctctggggctgtggtcaccctcgaatgcgtggagaagctgattcggaaggacatggtggaccctgtgactggagacaaactcacagaccgcgacatcatcgtgctgcagcggggcggtaccggcttcgcgggctccggagtgaagctgcaagcggagaaatcacggccggtgatgcaggcctgagtgtgtgcgggagaccaaataaaccggcttgggtgcgcaaaaaaaaaaaa

SEQ ID NO: 65663 - DNA, 922 bp, Homo sapiens
agcggacagttgaagaagcgaccgagggactgggagtcgttagtgaggatgacgcggcatggcaagaactgcaccgcaggggccgtctacacctaccacgagaagaagaaggacacagcggcctcgggctatgggacccagaacattcgactgagccgggatgccgtgaaggacttcgactgctgttgtctctccctgcagccttgccacgatcctgttgtcacgcctacgagaagcagcggggcacccggcgcgaggagcagaaggagcttcagcgggcggcctcgcaggaccatgtgcggggcttcctggagaaggagtcggctatcgtgagccggcccctcaaccctttcacagccaaggccctctcgggcaccagcccagatgatgtccaacctgggcccagtgtgggtcctccaagtaaggacaaggacaaagtgctgcccagcttctggatcccgtcgctgacgcccgaagccaaggccaccaagctggagaagccgtcccgcacggtgacctgccccatgtcagggaagcccctgcgcatgtcggacctgacgcccgtgcacttcacaccgctagacagctccgtggaccgcgtggggctcatcacccgcagcgagcgctacgtgtgtgccgtgacccgcgacagcctgagcaacgccaccccctgcgctgtgctgcggccctctggggctgtggtcaccctcgaatgcgtggagaagctgattcggaaggacatggtggaccctgtgactggagacaaactcacagaccgcgacatcatcgtgctgcagcggggcggtaccggcttcgcgggctccggagtgaagctgcaagcggagaaatcacggccggtgatgcaggcctgagtgtgtgcgggagaccaaataaaccggcttgggtgcgcaaaaaaaaaaaa

SEQ ID NO: 65664 - DNA, 936 bp, Homo sapiens
agcggacagttgaagaagcgaccgagggactgggagtcgttagtgaggatgacgcggcatggcaagaactgcaccgcaggggccgtctacacctaccacgagaagaagaaggacacagcggcctcgggctatgggacccagaacattcgactgagccgggatgccgtgaaggacttcgactgctgttgtctctccctgcagccttgccacgatcctgttgtcaccccagatggctacctgtatgagcgtgaggccatcctggagtacattctgcaccagaagaaggagattgcccggcagatgaaggcctacgagaagcagcggggcacccggcgcgaggagcagaaggagcttcagcgggcggcctcgcaggaccatgtgcggggcttcctggagaaggagtcggctatcgtgagccggcccctcaaccctttcacagccaaggccctctcgggcaccagcccagatgatgtccaacctgggcccagtgtgggtcctccaagtaaggacaaggacaaagtgctgcccagcttctggatcccgtcgctgacgcccgaagccaaggccaccaagctggagaagccgtcccgcacggtgacctgccccatgtcagggaagcccctgcgcatgtcggacctgacgcccgtgcacttcacaccgctagacagctccgtggaccgcgtggggctcatcacccgcagcgagcgctacgtgtgtgccgtgacccgcgacagcctgactgattcggaaggacatggtggaccctgtgactggagacaaactcacagaccgcgacatcatcgtgctgcagcggggcggtaccggcttcgcgggctccggagtgaagctgcaagcggagaaatcacggccggtgatgcaggcctgagtgtgtgcgggagaccaaataaaccggcttgggtgcgcaaaaaaaaaaaa

SEQ ID NO: 65665 - DNA, 816 bp, Homo sapiens
agcggacagttgaagaagcgaccgagggactgggagtcgttagtgaggatgacgcggcatggcaagaactgcaccgcaggggccgtctacacctaccacgagaagaagaaggacacagcggcctcgggctatgggacccagaacattcgactgagccgggatgccgtgaaggacttcgactgctgttgtctctccctgcagccttgccacgatcctgttgtcaccccagatggctacctgtatgagcgtgaggccatcctggagtacattctgcaccagaagaaggagattgcccggcagatgaaggcctacgagaagcagcggggcacccggcgcgaggagcagaaggagcttcagcgggcggcctcgcaggaccatgtgcggggcttcctggagaaggagtcggctatcgtgagccggcccctcaaccctttcacagccaaggccctctcgggcaccagcccagatgatgtccaacctgggcccagtgtgggtcctccaagtaaggacaaggacaaagtgctgcccagcttctggatcccgtcgctgacgcccgaagccaaggccaccaagctggagaagccgtggggctgtggtcaccctcgaatgcgtggagaagctgattcggaaggacatggtggaccctgtgactggagacaaactcacagaccgcgacatcatcgtgctgcagcggggcggtaccggcttcgcgggctccggagtgaagctgcaagcggagaaatcacggccggtgatgcaggcctgagtgtgtgcgggagaccaaataaaccggcttgggtgcgcaaaaaaaaaaaa

SEQ ID NO: 65666 - DNA, 1123 bp, Homo sapiens
  misc_feature (54)..(54): n is a, c, g, or t
agcggacagttgaagaagcgaccgagggactgggagtcgttagtgagagtttcnctcttgttgcctaggctggagtgcaatggtgcgatcttggctcatcacgaccttcgcctcccaggttcaagtgattgtcccatttcagcctcccgagtagctgggattacaggatgacgcggcatggcaagaactgcaccgcaggggccgtctacacctaccacgagaagaagaaggacacagcggcctcgggctatgggacccagaacattcgactgagccgggatgccgtgaaggacttcgactgctgttgtctctccctgcagccttgccacgatcctgttgtcaccccagatggctacctgtatgagcgtgaggccatcctggagtacattctgcaccagaagaaggagattgcccggcagatgaaggcctacgagaagcagcggggcacccggcgcgaggagcagaaggagcttcagcgggcggcctcgcaggaccatgtgcggggcttcctggagaaggagtcggctatcgtgagccggcccctcaaccctttcacagccaaggccctctcgggcaccagcccagatgatgtccaacctgggcccagtgtgggtcctccaagtaaggacaaggacaaagtgctgcccagcttctggatcccgtcgctgacgcccgaagccaaggccaccaagctggagaagccgtcccgcacggtgacctgccccatgtcagggaagcccctgcgcatgtcggacctgacgcccgtgcacttcacaccgctagacagctccgtggaccgcgtggggctcatcacccgcagcgagcgctacgtgtgtgccgtgacccgcgacagcctgagcaacgccaccccctgcgctgtgctgcggccctctggggctgtggtcaccctcgaatgcgtggagaagctgattcggaaggacatggtggaccctgtgactggagacaaactcacagaccgcgacatcatcgtgctgcagcggggcggtaccggcttcgcgggctccggagtgaagctgcaagcggagaaatcacggccggtgatgcaggcctgagtgtgtgcgggagaccaaataaaccggcttgggtgcgcaaaaaaaaaaaa

SEQ ID NO: 65667 - DNA, 563 bp, Homo sapiens
  misc_feature (552)..(552): n is a, c, g, or t
tgctttagttggtacaaagtactcatgattttgatttttaaaaagaaagtcaagattattacatatttaatacaaattcttacatatgccaagaacaataaatgcatttcttttaaactgagaagtaactctgatgtgtttttacaagagaattacttccatttctctgtaatttcactgctttcaaatccaagagcaaaattcatacttagaatgacatttaaaaggaaagccaaacgggcttttattcattatatcacaacacttcttacttcattaaaacattctttatgcttgataattttcagattgataatacattaccagattaaggaataggaggagtatgatatacaatgatatacaactaacagtttttggttctttttttgagacagggtctcactctgtcacccaggctggggtgaagtgtatgtgatgtcagctcactgcagcctctgcctcccaaggtcaagcaattcatgtgcctaagcctcctgagtagctggaattacaggcatgtgccaccacacctggctaatgtcgacgcgnccgcgaattta

SEQ ID NO: 65668 - DNA, 1060 bp, Homo sapiens
cctcttgtttttagtctcgcttttcggttgccgttgtcttttttccttgactcggaaatgtccggtcgtggtaagcagggtggcaaggcgcgcgccaaggctaagtcgcgctcgtcgcgcgcggggctgcagttccccgtgggccgcgtgcaccggttgctccgcaagggcaactattcggagcgcgtgggcgccggcgccccggtctatctggccgcggtgctcgagtacttgactgccgagatcctggagcttgccggcaacgcggcgcgcgacaacaagaagacgcgcatcatcccgcgccacctgcagctggccatccgcaacgacgaggagctcaacaagctgctgggccgcgtgaccatcgcgcagggtggcgtcctgcccaacatccaggccgtactgctgcccaagaagacggagagccaccacaaggccaagggcaagtgaggccgcccgccgcccccggggcccctttgatggacataaaggctcttttcagagccacctaccatctcgagaaaagagccgcactgatcctgcagttctttataggccggaggcctgatcaccctaggctcatgaatgagcgcagtggccatggggaagggcgcaacgggaaccgagaccctggggactgattgggctgcatacttgcgaggtgggcaacgtgttctgttaacaacagggaaccctcgtccacaggtggccaccccttgctcttgagtcccacccaaaacctctagtagggttttaataacgctcaccgtaaaggtgtcttcataattactagtgacaagttctcttgactctagcaaggttcccgtgtggtcatcaagtacagaatgcaatttcttaatgatttatctgatattaaaagtatttatgatctctaaaaaaaaaaaaaaaaaaaccaaaacaaaaaaaaagaaaataacacaaaaaccaaaaaacccccccaacacacaaaaacaacaacaccaaacacacccacaaacaccacacacgaagccacaaattacacccccccccccaccatggcccaccccccccctccata

SEQ ID NO: 65669 - DNA, 776 bp, Homo sapiens
cctcttgtttttagtctcgcttttcggttgccgttgtcttttttccttgactcggaaatgtccggtcgtggtaagcagggtggcaaggcgcgcgccaaggctaagtcgcgctcgtcgcgcgcggggctgcagttccccgtgggccgcgtgcaccggttgctccgcaagggcaactattcggagcgcgtgggcgccggcgccccggtctatctggccgcggtgctcgagtacttgactgccgagatcctggagcttgccggcaacgcggcgcgcgacaacaagaagacgcgcatcatcccgcgccacctgcagctggccatccgcaacgacgaggagctcaacaagctgctgggccgcgtgaccatcgcgcagggtggcgtcctgcccaacatccaggccgtactgctgcccaagaagacggagagccaccacaaggccaagggcctgatcaccctaggctcatgaatgagcgcagtggccatggggaagggcgcaacgggaaccgagaccctggggactgattgggctgcatacttgcgaggtgggcaacgtgttctgttaacaacagggaaccctcgtccacaggtggccaccccttgctcttgagtcccacccaaaacctctagtagggttttaataacgctcaccgtaaaggtgtcttcataattactagtgacaagttctcttgactctagcaaggttcccgtgtggtcatcaagtacagaatgcaatttcttaatgatttatctgatattaaaagtatttatgatctctaa

SEQ ID NO: 65670 - DNA, 896 bp, Homo sapiens
cctcttgtttttagtctcgcttttcggttgccgttgtcttttttccttgactcggaaatgtccggtcgtggtaagcagggtggcaaggcgcgcgccaaggctaagtcgcgctcgtcgcgcgcggggctgcagttccccgtgggccgcgtgcaccggttgctccgcaagggcaactattcggagcgcgtgggcgccggcgccccggtctatctggccgcggtgctcgagtacttgactgccgagatcctggagcttgccggcaacgcggcgcgcgacaacaagaagacgcgcatcatcccgcgccacctgcagctggccatccgcaacgacgaggagctcaacaagctgctgggccgcgtgaccatcgcgcagggtggcgtcctgcccaacatccaggccgtactgctgcccaagaagacggagagccaccacaaggccaagggcaagtgaggccgcccgccgcccccggggcccctttgatggacataaaggctcttttcagagccacctaccatctcgagaaaagagccgcactgatcctgcagttctttataggccggaggcctgatcaccctaggctcatgaatgagcgcagtggccatggggaagggcgcaacgggaaccgagaccctggggactgattgggctgcatacttgcgaggtgggcaacgtgttctgttaacaacagggaaccctcgtccacaggtggccaccccttgctcttgagtcccacccaaaacctctagtagggttttaataacgctcaccgtaaaggtgtcttcataattactagtgacaagttctcttgactctagcaaggttcccgtgtggtcatcaagtacagaatgcaatttcttaatgatttatctgatattaaaagtatttatgatctctaa

SEQ ID NO: 65671 - DNA, 858 bp, Homo sapiens
cctcttgtttttagtctcgcttttcggttgccgttgtcttttttccttgactcggaaatgtccggtcgtggtaagcagggtggcaaggcgcgcgccaaggctaagtcgcgctcgtcgcgcgcggggctgcagttccccgtgggccgcgtgcaccggttgctccgcaagggcaactattcggagcgcgtgggcgccggcgccccggtctatctggccgcggtgctcgagtacttgactgccgagatcctggagcttgccggcaacgcggcgcgcgacaacaagaagacgcgcatcatcccgcgccacctgcagctggccatccgcaacgacgaggagctcaacaagctgctgggccgcgtgaccatcgcgcagggtggcgtcctgcccaacatccaggccgtactgctgcccaagaagacggagagccaccacaaggccaagggcaagtgaggccgcccgccgcccccggggcccctttgatggacataaaggctcttttcagagccacctaccatctcgagaaaagagccgcactgatcctgcagttctttataggccggaggcctgatcaccctaggctcatgaatgagcgcagtggccatggggaagggcgcaacgggaaccgagaccctggggactgattgggctgcatacttgcgaggtgggcaacgtgttctgttaacaacagggaaccctcgtccacaggtggccaccccttgctcttgagtcccacccaaaacctctagtagggttttaataacgctcaccgtaaaggtgtcttcataattactagtgacaagttctcttgactctagcaaggttcccgtgtcccaccctctcgagatcctctagagcacc

SEQ ID NO: 65672 - DNA, 479 bp, Homo sapiens
ggccaggcctttaggcctctggaaaacagctgctgccgcaaacacagctccacagcctgctgttgcctcgtgctaaacccagcactagccactggggagcagcctgtcgctgtcccacaggcctgcgctagcttccagggaattcttggagctgtactaatactgcagaaaaactagtttagccttggctttcagaagatgccagtgacaatggagtacattgccctaaagcagtattttcaaaatgtgcattgtggaatccatttggtctaagatcaaaataaatttttaatgaaacagaaaaaggtcagagtgcatcacacatatcatggataaaccagattttggtttctaataccactcccattaaaagaagccagggctccttgcagaaatagctgattccagggctagggcaggataagcacaagataagcctgaagcatcttgttaggatagaaataaaaaagaagtactca

SEQ ID NO: 65673 - DNA, 359 bp, Homo sapiens
  misc_feature (21)..(21): n is a, c, g, or t
cgttttgatgtgagagagagnaaaaaaaaaaaaaaagttgtcctgtttggaatatgttgcctgctgtctgtaatgtgcactactgatagtgtacagagcatgtggcagcatgaacctccgtagctctgatgtgaagagatgtagtatagtgggtatagagtaggagggcggtttttaagtgatgctcttttagtcttttataagggttttgaatgatttgaaattttaagactgcttttattcagtctcaacttttgtgtatatttgtatttcacttttaaaattcatctcataaaatccactatttggtatcatagcagatcctaatactcaagtttttattctctcccgttctacca

SEQ ID NO: 65674 - DNA, 184 bp, Homo sapiens
caggagaatggcatgaacccgggaggcggagcttgcggtgagccaagattgcgccactgcacttcagcctgggcaacagagcaagactccgtttcaaaaaaaaaaaggaatcggacgaaagaaccacaggatgttgaagacaactgtctggaagtatttgtgagggacaacggatgtggccctc

SEQ ID NO: 65675 - DNA, 1513 bp, Homo sapiens
caggagaatggcatgaacccgggaggcggagcttgcggtgagccaagattgcgccactgcacttcagcctgggcaacagagcaagactccgtctgggaaaaaacaaacaaaaaaaaacctctgagataccttggtttctattaataatattttcagcagtttaatctcaactctgttggcttccctttcttaaagagttaggcagtgatatacatgtcatttagaagtaaagggagggctttagtactgcctgttctgaagtaggagtcttagaaattcagtggcaaactgtataggaagggcctgagtttcatattgtctatattgccttgaaatagccttagtctcctgcttaaaaaggcatcctggaaatcatataaaaagtaacaacaaattaaaatgcatgtgtctgtacctaaggcagctgtaagtggaaatatttttacctcatagtgaaatagaatggatgtattaagaagggagaattttttttcagagtgttttatctcagtgtggctcagaaaagccatttatagggtagggtaatcactagagttgagggttcctctcctcccaccccccataagattggtatccataaagcagagatttctaagcagtgagagacttcagtattttagattagattcttgggttataatagaataagatcattagtagtagaacatctggtatcagaaaacttgagtgtttttattgccatgttagcatatgaatcttaaaggattacagaattcagttaagagaaacaagcttttattggatgggtatttaaagagtttcttgataagagagaccttagatttcttacgtaaagccatgttcacaaggaccactgtccttgtgattctaatttgccagataaaagtctatgtcctggcgcagtggctcgtgcctgtaatcctggcattttgggaggctgaggtgggcggattatttgaggccaggagctggagatcaacttagccaacatggtgaaatctcatctctactaaaaacacagaagttacctgggtgtggcgacacgcatctgtaatcccagctactagggaggctaaggcaggaaaatcacttgaacctgggaggtggaggttgcagtgagccaagatcccaccactgcacttcagcctgggtgacagagcgagactctgtctcaaaaaaaaaaaaaagttgtcctgtttggaatatgttgcctgctgtctgtaatgtgcactactgatagtgtacagagcatgtggcagcatgaacctccgtagctctgatgtgaagagatgtagtatagtgggtatagagtaggagggcggtttttaagtgatgctcttttagtcttttataagggttttgaatgatttgaaattttaagactgcttttattcagtctcaacttttgtgtatatttgtatttcacttttaaaattcatctcataaaatccactatttggtatcatagcagatcctaatactcaagtttttattctctcccgttctacca

SEQ ID NO: 65676 - DNA, 546 bp, Homo sapiens
ttgagaaagtaatataactaattttgaaagtctaataatcaagctgtaaaaggaaatgtatgagttaacaaatatttattttgcattctttgtgtgccttatcatgtgttaagtaccatgagggtacacccaggcttagcacaatgcatttggtatacaaaaccatgtaaaatgtcatagcttttgatagcttttaaatgaaacttaattttggcccagtttaaagatattaccgaacatttgggataaaatgtgatggtttcctggcttctatcatggacgatgttatggaagacaattaccacgtttttgaaatcatgtctataaatatttaatatccatttaaattatgtatagaaaattattttgttcatgttttagaaattaaacatttctttcacctgagtatatgttttacttgtatggcttcaccatgtctctctggtaaaccacagttaatattttaagctatagtgggaaataaaaactcttttgtgattgcggtaactatttttataccatgcttaacattccctaatagcagat

SEQ ID NO: 65677 - DNA, 629 bp, Homo sapiens
agtgggggaaactcgggcacccctaaactattctccagtgttctcaccagaggtggtcagccatgtgatggcaagagtcacttcttaagcttttgctatccccagaaacttaaagcaacaccaaccacacccaaaagtcaagtgatatccagacagcaacagtagagcattaactgagtgcagggccgtggtgactcctcgacactccaggctctcctgctggtaacctcccattggcagagccaggcactcagcaaagccctggacagtcagcagcctcctgaacaggctctgctgtccccactcacgacttcagagcagctaggactcctgtgaccacccctgtcccctgttcccccccaccccgccccgccccgccaactgcctcatctctgtcccaagataactgctctccagaattttccatgatatggtcattttaaaagttttttttttttttgagacagagtttttcctgtgttgcccagactggactcaaacctctgggctcaagtgatcctcctgcttcagcctcccaagtagctgggactgtaagtgtgcaccactgtgcctggcttgatggtgtcatttttcactgtacgtgtatttgtaaaccgtataaatcagaa

SEQ ID NO: 65678 - DNA, 243 bp, Homo sapiens
tgatctgagccagcctgtaactgtgcacactcctctgacaatcagcttaatgagatgctacagagatccctcaaaggagccaaacaaatgaattagcatgagtgcttttggtctaaaataaggtaccttaaacctgctgataataaccctaaaggaaataaaattcatcattgttattccattaggagattttgaaccagaagaatctaaccatatgctggctttggtaatgctactacattt

SEQ ID NO: 65679 - DNA, 393 bp, Homo sapiens
gcacagctaacaagagcatgggggagaccccaccatgactaccccacactgacataactggtaactgccatgcaggagcgctagccacaacggccacaccttctgagtacttgcagagatctttgggtttatgccttctctgcaattttgaaaatattatttagtaactataggctaatctgagcctaaaaataattacctaaggaacctgttaagtgtgtttgtgcaatctcctggaattagcattttcttgaaagggaacctgtgtaatcctttcaagtgtctggtgtgtttctctgagtaaccagttatactttgtgaggactttccaattcatcagactatagtatagtttcatgtgctcttaaacatcatcagcaagcaaaaaatagt

SEQ ID NO: 65680 - DNA, 239 bp, Homo sapiens
atacaaggagagaaaatatattggttgggaaaccattgctcatctttgagaaaaatcataaagacttggagccctagatatatagtattattttttcctgatattctccttccataagagataatacctgaagtactatgaatattatatatttaaattacagcactctaagcaaaaatttcacacagatttcctacttgtttaaatgtttaataaattacaaaataaacgtttccaaa

SEQ ID NO: 65681 - DNA, 292 bp, Homo sapiens
actgctctccagcctgggcaacagagtgagactccatctcaaaaaaaattacaaaataaagatccaggggccctgaagttgttacaatcaagctaggatggttcaagacagatttgaataggtacgggtgatgatgtcatcaaggccagactctcaagattgggcttgctgtcttggaaatgagaacaatttggatagcatggagcatgtgctgaggagtggccacctccctgctgtgtggagtgtgaatagaaatccctcagagaatggcttcaggctgaagatgtaagaa

SEQ ID NO: 65682 - DNA, 422 bp, Homo sapiens
actgcccaactaaacatgcgatccttgcttaaactgactggaattcaaatcccatctctgctccttactactagtgtgactgtgataatattttatgatgtggtcttagatgctcttatctataaattgagaaaaatagaccagacgcactgcctcacacccatagtcccagcactttgggaggctgaggcatgcagatcacttgagctcaggagtttgagaccagcctgggcaacatggcaaaaccccatctctaacaaaaatacaaaaaattagctgggcatggtagtgtgtgcctgtggtcccagctgcttgggaggctgaggtggcaggatcctttgagcctcagaggtggaggctatactgagtgcacatggtgctactggactccaacctgggtgacagagtgagaccctatctca

SEQ ID NO: 65683 - DNA, 2644 bp, Homo sapiens
  misc_feature (2284)..(2284): n is a, c, g, or t
ctccaccgtttgttgtggccagtgttactgtggtgaccgccagagcagccttcgcgctatggaggagcccggtgctacccctcagccctacctggggctggtcctggaggagctacgcagagttgtggcagcactacctgagagtatgacggcagattcgaatccttatggttttccatgggaactggtggtatgtgcagctgttgttggattttttgttgttctcctttttttgtggagaagttttagatcggttaggagtcggctttatgtgggaagagagaaaaaacttggtgaaacgctttctggactaattgaagaaaaatgtaaactacttgaaaaatttagccttattcaaaaagagtatgaaggctatgaagtagagtcatctttagaggatgccagctttgagaaggcggtagcagaagcacgaagtttggaggcaacctgtgaaaagctgaacaggtccaattctgaacttgaggatgaaaccctctgtctagaaaaagagttaagagaaatctaaacattctcaacaagatgaattgatggcggatatttctaaaaggatacaatctctagaagatgagtcaaaatccctcaaatcacaaatagctgaagccaaaatcatctgcaagatttttcaagcgactgaagaacgatgggcaatagcaataaaagatgctttgaataaaaattctcaacttcacgaaagccagaaacagcttttgcaagaagctgaagtatggaaagaacaagtgagtgaacttaataaacagaaaataacatttgaagactccaaagtacatgcagaacaagttctaaatgataaaatcacatcaagaccctgactggacacttgccaatgatgaacgatcaggctgctgtgcttgaagaagacacaacggatgatgataacttggaattagaagtgaacagtcaatcggaaaatggtgcttatttagatgatcctccaaaaggagctttgaagaaactgattcatgctgctaagttaaatgtttctttaaaaaccttagaaggagaaagaaaccacattattattcagttatctgaagtggacaaaacaaaggaagagcttacagagcatattaaaaatcttcagactcaacaagcatctttgcagtcagaaaacatatattttgaaagtgagaatcagaagcttcaacagaaacttaaaataatgactgaattatatcaagaaaatgaaatgacactccacaggaaattgacaatagaggaaaattactggatagaggaagaagagaagctttctaaagtggaagaaaagatcagccatgccactgaagagctggagacctatagaaagctagccaaagatcttgaagaagaattggagagaactgttcatttttatcaaaagcaggttatttcctacgagaaaaaaggacatgataattggttggcagctcggactgctgaaagaaacctcaatgatttaaggaaagaaaatgctcacaacaaacaaaaattaactgaaacagagtttaaatttgaagttttagaaaaagatcctaatgcacttgatgtttcaaatacagcatctggcagagagcattccccatatggtccctcaccattgggtcggccttcatctgaaacgaggacttctctctcctcaaactttgttggaggatccactcagactctcacctgtgcttccagcgggaggaggaagaagcccaagcggccgagagaatcctctggaccatcagattaccaatgaaagaggagaaccaagctgtgataggttaactgatcctcacagagctccttctgacactgggtccctgtcatctccatgggaacaggaccataggatgatgtttcctccaccaggacaatcatatcctgattcagctcttcctccacaaagggaagacagattttattctaattctgatagactgcctggaccatcagaactcagaagttttaatatgccttctttggataaaatggatgggtcaatgccttcagaaatggaatccactagacatgatgccaaagatgatcctggtagtttaaatgtgcctgattcatctctccctgctgaaaatgaagcaactggccccggctttattcctccacctcttgctccaatcagtggtccattgtttccagtggacacaaggtgcccgttcatgagaagaggacctcttttcccccaacctcctccaggaacgatgtttggagcttcacaaggttattttccaccaagggatttcccaggtccaccacatgntccatttgcaatgagaaacatctgtccactgaggggtttacctccttactttcatccaagacctggattttaccccaaccccacattctgaaggtagaagcgagttcccttcatggttgattctgcctttaaaggagcctgctactgaacatccagaaccacagcaagaaacctgacaatatttttgctttcttcaaaagtaattttgactgatctcattttcagtttaagtaactgctgttacttaagtgattacacttttctcaaattgaagtttaatggaattgtagttctcaggatagtattttgtaaataaagatggtttaaatatgaataaaaaataaaaaatatctattctac

SEQ ID NO: 65684 - DNA, 374 bp, Homo sapiens
gacatttaacaaaacaactttacgtgatactgagatggcattttttcaactggtgtctaattcttgaaattgaagcatcaagaaaaaatcatttaaaaatgttttaatctctctcgttcagtagtagcttcaaattagtttgtgatgtaggagaggtataaatgacaaattaatgaattctcaaactgatatcgaataatatgcacaattttatgcatactaaaaataatctcttaaaatctgtacgtctgtgccatgaaatcactgttcaccaaaagcaagacatttggaattttatattaggtttatattatccatggtttttttttttggtatatgaggaatgaaaaagtgaaataaatgttttgataaag

SEQ ID NO: 65685 - DNA, 351 bp, Homo sapiens
cccaatacagattaatgatgatcacacaatcttagagtgcatgggaaataaagttcttttagaaaaactcagtgtcaccattcactctgttttcagtgggggaaaaaagtcaggagtggaacaagagccagaaatgatttccatgtctctctaggaaaaaaagcaggtggatttaaaggaaaagtatgtcctcagagaaacaagatatgtatccaggatcaatgtgttctaaatgctcttcagagaagagctaatgaatcccatgataagagggcaaatgtcagattatctactacccaagctattttctaggatcctcaatgactctggcctcacacaaactaattatta

SEQ ID NO: 65686 - DNA, 3755 bp, Homo sapiens
gatattttccaatttgtcactggatgagcgttgcctttccgcatcattggtttgcaagtactggcgtgacctttgtttagacttccagttttggaagcagctggatcttagtagtcgtcagcaggtcactgatgaattgttggaaaaaattgcatcaagaagtcagaatataattgaaatcaacatttctgattgtcgcagtatgtctgataatggcgtatgtgttttagcatttaaatgtcctggacttcttaggtatacagcctacaggtgtaaacagctttctgacacctctattattgcggttgcctctcactgtcctttacttcagaaagtgcatgtaggcaaccaggacaaactcactgatgaaggactcaagcagctgggctcaaaatgcagagaactcaaagatattcatttcggccagtgttacaagatctcagatgaaggcatgatcgtcatagctaagggctgtctgaaattacaaaggatatacatgcaggaaaacaaattagtgacagatcagtcagtgaaagcatttgctgaacactgtcctgagcttcaatatgtaggcttcatgggttgttcagtcacttctaaaggagtcattcacctaaccaagctaagaaacctttccagcttggacctacgtcatatcactgaactggataatgaaaccgtgatggaaattgtcaagaggtgcaaaaatcttagctctctcaatctctgtctgaactggatcataaatgacaggtgtgtggaggtcattgcaaaggaaggacaaaacctgaaagagctatatttggtgtcctgtaaaatcacagattatgcactgatagccattgggcgatacagcatgacaatagagactgtggatgtcggatggtgtaaagaaatcacagaccaaggagccaccctgattgcacagagcagcaagtctctgagatatttggggctgatgagatgtgataaagtaagagttgactatcaagttgtttgctttctacatatcagtatagttaatagcttgatgtcatatcctctctccttctctatctccacccccgtgtattatatattatatatacattttatatgtatatatgcaattatagctatgcattgtttgcctgcttttgtaaactaatctgagattatctttgtatttccccacttaataatgaattttgtgcttaagtagaaagaaaaagtaatcatatacatagtcaactagagtttggcatcctattcataagtccatggaccaaaatgtaaaagattacatgacaaactgcaatttgcagggtctaaccgtaaaattgtattctgggtttcaagtttccagcaacagtaaaggtggaaagaacagtgccaaattggtttttcacaagtgtgtaattttggtactgaacatctatgtattctggccattcgggaccaacaaagggccagtaagggggtatgtgggaatttgcatctccccatacatcagatgccactcccagcacatgataagaagtggttccagaggtcctggtggaaggcctgtagaaccagccagggatgtgagcatgagtttaggaaatggtgtagcatttaacgtgggaccctttgaagactgagaaaacagataataaaaatctatactgacacctgtaatcccagcacattgggaggccaaggcagaaggatcacttgagcccaggaatttgagaccagcctggacaacatgggaaaaccctgtctctatccccctctcccccaacaaaaaaaatcagccaggcataatggcacacacctgtagtcccagctactcgggaagctaaggtgggaggatcacctgagctcaagaggccgaggttgcagtgagccgtgattgtgccgcaaccacctcagcctggatgacggagcacgactgtgtcccaaacaaacaaaaaaaacctatactggacaccaggcactccacaggtgttttcttctttgtttattccatgttttacctataacaagtctaagaaatagttatttgcattgtgaaggggagaaaatggaggctcagaaagaccagtcagtggccccgggatactctggcaagacttcatgccgggtctttggagtctgtatccagtgctgctggcacaacccagggggcagtctgtggccacggggactgcttcccttggaaaaggtccagttcagatacttgctcagaaagtgccgccatcttgtactaatttacacatgtgtgctacttttgtaaatggtgattaggaacaaatctagcaaaataatgtgaaactaaatagacacgccattcaaagggcatgcatcttctaaatgtagcaaatgtgggggcaaatgaagtatggcccaaagctcttgtgtcctttgtgattttttgttaattggctaattcttttctccaaacactttagaatcccaacttatacgagacctttgccagctagttatgtttagagaaatgttattatatattctcagcccagcccagaagcgacttactttgtaactaagcaacagcactgagatccggggcttgcgagtctcccacaaatctttccactaaccaacctaatgccgctgctaaccctgccactttaaaatgacttcttttaagacaagttaaagggtccaccataggcatagtcctctagaaacaggaatcaatgacagcagaactcctcagcttccagcagaaggaactgccacatgaatgctaactaaagctaccaaaatgtacacattcatacatatgtgtccgcagccattctcagaaattgtcatatttctaacctgtaatctttagatggttaagatcagctccatcttcggagatacactgtagaagttgtatgttacagttactacaggagaatgttattccagacatatttgctgaccagcattttgctgatttttagttaagaaatgggttattttctacccaaatgcaaattagtccaaaattaaatagagacagtattcagattagctgtatccctgagggttttagcccttttcctgggctgcctctgaatcctttctctaaccagagagccactctgagaacccattggctccagcacgacgccgtctggtcagagcctgctgcagtgcagcccagggagatgctggacccagccttgctgtctggcttcctcagacttaaagcagctcatagccaaacacgagaggctctgtgaggatggaagacagttccaaaccacacacaaagcacaagtaaagccttgcacagaaaagcctgcttgttggtttagttggatggaaatctaaagtagctattcagttttcagattttgtatcatgccatccatctccagattttaagttaccatcaagattcaaaggaagatatgagtaacaaagaaaagaaattagtagcaacggtatggtctgcggagagccagagttcaggttcagatctgggctttgcacttactagttgtgtcaccgcgggcagttactaacctctcagtgcctgttccctcgtttgcaaaatgaggatgatactagtacctatcttgtagaattgtgagcatgtgaatgagttaacatacataaagcacttagaataatgtctattatatataaaatgctctgttactgattagtcttatcatccatatcattatattaacctgtgttgtgatactggaattttccaatgagaaaaaaaaattatattgcctactatcccattttgaaagacaatt

SEQ ID NO: 65687 - DNA, 1530 bp, Homo sapiens
  misc_feature (1011)..(1011): n is a, c, g, or t
  misc_feature (1042)..(1042): n is a, c, g, or t
gatattttccaatttgtcactggatgagcgttgcctttccgcatcattggtttgcaagtactggcgtgacctttgtttagacttccagttttggaagcagctggatcttagtagtcgtcagcaggtcactgatgaattgttggaaaaaattgcatcaagaagtcagaatataattgaaatcaacatttctgattgtcgcagtatgtctgataatggcgtatgtgttttagcatttaaatgtcctggacttcttaggtatacagcctacaggtgtaaacagctttctgacacctctattattgcggttgcctctcactgtcctttacttcagaaagtgcatgtaggcaaccaggacaaactcactgatgaaggactcaagcagctgggctcaaaatgcagagaactcaaagatattcatttcggccagtgttacaagatctcagatgaaggcatgatcgtcatagctaagggctgtctgaaattacaaaggatatacatgcaggaaaacaaattagtgacagatcagtcagtgaaagcatttgctgaacactgtcctgagcttcaatatgtaggcttcatgggttgttcagtcacttctaaaggagtcattcacctaaccaagctaagaaacctttccagcttggacctacgtcatatcactgaactggataatgaaaccgtgatggaaattgtcaagaggtgcaaaaatcttagctctctcaatctctgtctgaactggatcataaatgacaggtgtgtggaggtcattgcaaaggaaggacaaaacctgaaagagctatatttggtgtcctgtaaaatcacagattatgcactgatagccattgggcgatacagcatgacaatagagactgtggatgtcggatggtgtaaagaaatcacagaccaaggagccaccctgattgcacagagcagcaagtctctgagatatttggggctgatgagatgtgataaagtcaacgaagtgacggtggaacactggtgcagcagtanccccacatcaccttcagcaccgtcctgcagnactgcaagaggaccttggagagagcctatcagatgggctggacccccaacatgtctgccgcctcctcctagcgctcctgcctcgcctagtccactgggatcattcagcagagcagaggagaattgtacatttggggagctgatctctcggaagggttttaactgtcacctgtctgtgtgtgttcaagtatgtgtattgtgtcttgttgcatactgataccaaaaagtgcagttgtcatttgttcccaagtgagctggctttttttcttagaaattaaagattatgaaagccacaaactttttagtttttaacttcaaaggcttctttctctttaaaaaaagaattattttgtaatatagagtcaaaaaatggggctgtattatttggagcttctaaatggctggcacttggggatggcccaggtaagaagggcctctttttaccttgggctggaatgggtgccttctaatgatgatggaacacacggg

SEQ ID NO: 65688 - DNA, 356 bp, Homo sapiens
  misc_feature (307)..(307): n is a, c, g, or t
tcaataaatatcagttatcttcccctttccttgatcttagattacaaaaatatcagcaacatcctccagatatggacatgttgaaaaccaacaaaaaatcatagcttcttccaaaattacagaaatttatattaactaaccaacactggtttactccacaaaattcaacatacacattctaatgcatctatgtgtctgtaagtgcactgcattgaggccctactaaacacaaacttcactttatccattgctgtgtgtggacttcacccaggagagtttctccttggacattttcgtcacctaacgncaacgactgaggatcttggagggctcagaagacaggaaggatgtggtaa

SEQ ID NO: 65689 - DNA, 274 bp, Homo sapiens
cctctctgtggaggtgatgttttagtacagacccgcgtgaagtgaggaatctagccataaagatggggatgaagaagagtagtccagacagacggaactgaaaattgtaaagagcctgaggtgcaattccttgttctgttctaggaatagcacaaaggccggcatagatggaatgcactgagcaaggggaatgtgacaagagttgatgctaaggaagcagcctgggctaaatcatgcgtggacttgcagaccaaggtgaggactttggtttatc

SEQ ID NO: 65690 - DNA, 1669 bp, Homo sapiens
  misc_feature (1276)..(1276): n is a, c, g, or t
cggcgctcggagcccgacgcctcgcgagggcgcccgcggagcctccccggccctgggcgttgggcgagccccggggcggtcggaggggcccgggggcggtcggagaagcccggacgccggctgcgcgaatacagttatggccacccaggtaatggggcagtcttctggaggaggagggctgtttaccagcagtggcaacattggaatggccctgcctaacgacatgtatgacttgcatgacctttccaaagctgaactggccgcacctcagcttattatgctggcaaatgtggccttaactggggaagtaaatggcagctgctgtgattacctggtcggtgaagaaagacagatggcagaactgatgccggttggggataacaacttttcagatagtgaagaaggagaaggacttgaagagtctgctgatataaaaggtgaacctcatggactggaaaacatggaactgagaagtttggaactcagcgtcgtagaacctcagcctgtatttgaggcatcaggtgctccagatatttacagttcaaataaagatcttccccctgaaacacctggagcggaggacaaaggcaagagctcgaagaccaaaccctttcgctgtaagccatgccaatatgaagcagaatctgaagaacagtttgtgcatcacatcagagttcacagtgctaagaaattttttgtggaagagagtgcagagaagcaggcaaaagccagggaatctggctcttccactgcagaagagggagatttctccaagggccccattcgctgtgaccgctgcggctacaatactaatcgatatgatcactatacagcacacctgaaacaccacaccagagctggggataatgagcgagtctacaagtgtatcatttgcacatacacaacagtgagcgagtatcactggaggaaacatttaagaaaccattttccaaggaaagtatacacatgtggaaaatgcaactatttttcagacagaaaaaacaattatgttcagcatgttagaactcatacaggtaagagaagctttctagtccataagttcagttctcttttctgattgttacttgagtggttagttaagtagtgcttgagaaaaaggactctggttcaaatccaggttccattttgctatctttgtgaccttgcacaagttgtttaacctctttgttcagaaatttctccatggagtaacaatatctaggttgggaggattagtgaagttacatgtaaagcacagaggaacagccaagagatnttaccgtggtcttactaaagtacatatcctaacttggggtttaccttcagcaagttagactggccgtgcatggtgctcacgcctgtaatcccagcacctcgggaggccgaggcgtaaggactgcctgagcccagaagttctagaccagtctgggaaacgtggaaagacccccgtctcaaaaagaaaacagaaaaaaaaaagtttgtgtatttatttctgtgacagtgaacacatttaagatgcagtgtagtttctgaaagaaattgagggcttatataaaaaggaaaactcagtgattaaccttgcacatgcccacttaacaaaagcctcaaactttaaaacatttgacttatagcattgagttcctaaatggaacaacttgtctttgtccac

SEQ ID NO: 65691 - DNA, 663 bp, Homo sapiens
tcgttagaggatcctctgctgcccctcttcagaaagtaggagcagaagaggcagatgagagcctacctggtcttgctgctaatatcaacgaatctacccatatttcatcctctggacaaaacttgaatacgccagagggtgaaactttaaatggtaaacatcagactgacagtatagtttgtgaaatgaaaatggacactgatcagaacacaagagagaatctcactggtataaattcaacagttgaagaaccagtttcaccaatgcttcccccttcagcagtagaagaacgtgaagcagtgtccaaaactgcactggcatcacctcctgctacaatggcagcaaatgagtctcaggaaattgatgaagatgaaggcatccacagccatgaaggaagtgacctaagtgacaacatgtcagagggtagtgatgattctggattgcatggggctcggccagttccacaagaatctagcagaaaaaatgcaaaggaagccttggcagtcaaagcggctaagggagattttgtttgtatcttctgtgatcgttctttcagaaagggaaaagattacagcaaacacctcaatcgccatttggttaatgtgtactatcttgaagaagcagctcaagggcaggagtaatgaaactttgaacaaggtttca

SEQ ID NO: 65692 - DNA, 3453 bp, Homo sapiens
cggcgctcggagcccgacgcctcgcgagggcgcccgcggagcctccccggccctgggcgttgggcgagccccggggcggtcggaggggcccgggggcggtcggagaagcccggacgccggctgcgcgaatacagttatggccacccaggtaatggggcagtcttctggaggaggagggctgtttaccagcagtggcaacattggaatggccctgcctaacgacatgtatgacttgcatgacctttccaaagctgaactggccgcacctcagcttattatgctggcaaatgtggccttaactggggaagtaaatggcagctgctgtgattacctggtcggtgaagaaagacagatggcagaactgatgccggttggggataacaacttttcagatagtgaagaaggagaaggacttgaagagtctgctgatataaaaggtgaacctcatggactggaaaacatggaactgagaagtttggaactcagcgtcgtagaacctcagcctgtatttgaggcatcaggtgctccagatatttacagttcaaataaagatcttccccctgaaacacctggagcggaggacaaaggcaagagctcgaagaccaaaccctttcgctgtaagccatgccaatatgaagcagaatctgaagaacagtttgtgcatcacatcagagttcacagtgctaagaaattttttgtggaagagagtgcagagaagcaggcaaaagccagggaatctggctcttccactgcagaagagggagatttctccaagggccccattcgctgtgaccgctgcggctacaatactaatcgatatgatcactatacagcacacctgaaacaccacaccagagctggggataatgagcgagtctacaagtgtatcatttgcacatacacaacagtgagcgagtatcactggaggaaacatttaagaaaccattttccaaggaaagtatacacatgtggaaaatgcaactatttttcagacagaaaaaacaattatgttcagcatgttagaactcatacaggagaacgcccatataaatgtgaactttgtccttactcaagttctcagaagactcatctaactagacatatgcgtactcattcaggtgagaagccatttaaatgtgatcagtgcagttatgtggcctctaatcaacatgaagtaacccgccatgcaagacaggttcacaatgggcctaaacctcttaattgcccacactgtgattacaaaacagcagatagaagcaacttcaaaaaacatgtagagctacatgtgaacccacggcagttcaattgccctgtatgtgactatgcagcttccaagaagtgtaatctacagtatcacttcaaatctaagcatcctacttgtcctaataaaacaatggatgtctcaaaagtgaaactaaagaaaaccaaaaaacgagaggctgacttgcctgataatattaccaatgaaaaaacagaaatagaacaaacaaaaataaaaggggatgtggctggaaagaaaaatgaaaagtccgtcaaagcagagaaaagagatgtctcaaaagagaaaaagccttctaataatgtgtcagtgatccaggtgactaccagaactcgaaaatcagtaacagaggtgaaagagatggatgtgcatacaggaagcaattcagaaaaattcagtaaaactaagaaaagcaaaaggaagctggaagttgacagccattctttacatggtcctgtgaatgatgaggaatcttcaacaaaaaagaaaaagaaggtagaaagcaaatccaaaaataatagtcaggaagtgccaaagggtgacagcaaagtggaggagaataaaaagcaaaatacttgcatgaaaaaaagtacaaagaagaaaactctgaaaaataaatcaagtaagaaaagcagtaagcctcctcagaaggaacctgttgagaagggatctgctcagatggaccctcctcagatggggcctgctcccacagaggcggttcagaaggggcccgttcaggtggagccgccacctcccatggagcatgctcagatggagggtgcccagatacggccttgctcctgacgagcctgttcagatggaggtggttcaggaggggcctgctcagaaggagctgctgcctcccgtggagcctgctcagatggtgggtgcccaaattgtacttgctcacatggagctgcctcctcccatggagactgctcagacggaggttgcccaaatggggcctgctcccatggaacctgctcagatggaggttgcccaggtagaatctgctcccatgcaggtggtccagaaggagcctgttcagatggagctgtctcctcccatggaggtggtccagaaggagcctgttcagatagagctgtctcctcccatggaggtggtccagaaggaacctgttaagatagagctgtctcctcccatagaggtggtccagaaggagcctgttcagatggagttgtctcctcccatgggggtggttcagaaggagcctgctcagagggagccacctcctcccagagagcctccccttcacatggagccaatttccaaaaagcctcctctccgaaaagataaaaaggaaaagtctaacatgcagagtgaaagggcacggaaggagcaagtccttattgaagttggcttagtgcctgttaaagatagctggcttctaaaggaaagtgtaagcacagaggatctctcaccaccatcaccaccactgccaaaggaaaatttaagagaagaggcatcaggagaccaaaaattactcaacacaggtgaaggaaataaagaagcccctcttcagaaagtaggagcagaagaggcagatgagagcctacctggtcttgctgctaatatcaacgaatctacccatatttcatcctctggacaaaacttgaatacgccagagggtgaaactttaaatggtaaacatcagactgacagtatagtttgtgaaatgaaaatggacactgatcagaacacaagagagaatctcactggtataaattcaacagttgaagaaccagtttcaccaatgcttcccccttcagcagtagaagaacgtgaagcagtgtccaaaactgcactggcatcacctcctgctacaatggcagcaaatgagtctcaggaaattgatgaagatgaaggcatccacagccatgaaggaagtgacctaagtgacaacatgtcagagggtagtgatgattctggattgcatggggctcggccagttccacaagaatctagcagaaaaaatgcaaaggaagccttggcagtcaaagcggctaagggagattttgtttgtatcttctgtgatcgttctttcagaaagggaaaagattacagcaaacacctcaatcgccatttggttaatgtgtactatcttgaagaagcagctcaagggcaggagtaatgaaactttgaacaaggtttca

SEQ ID NO: 65693 - DNA, 3577 bp, Homo sapiens
gcagcgtcctgtgttggaatgtgcggctgccgcgagctcgcggcgcagcagcggagcgagcgccgccgaggcccggggccccagaccctggcggcggctgcggcagccgagacggcagggcgaggcccggaggcctgagcaccctctgcagccccactcctgggccttcttggtccacgacggccccagcacccaactttaccaccctcccccacctctcccccgaaactccagcaacaaagaaaagtagtcggagaaggagcggcgactcagggtcgcccgcccctcctcaccgaggaaggccgaatacagttatggccacccaggtaatggggcagtcttctggaggaggagggctgtttaccagcagtggcaacattggaatggccctgcctaacgacatgtatgacttgcatgacctttccaaagctgaactggccgcacctcagcttattatgctggcaaatgtggccttaactggggaagtaaatggcagctgctgtgattacctggtcggtgaagaaagacagatggcagaactgatgccggttggggataacaacttttcagatagtgaagaaggagaaggacttgaagagtctgctgatataaaaggtgaacctcatggactggttgaggcatcaggtgctccagatatttacagttcaaataaagatcttccccctgaaacacctggagcggaggacaaaggcaagagctcgaagaccaaaccctttcgctgtaagccatgccaatatgaagcagaatctgaagaacagtttgtgcatcacatcagagttcacagtgctaagaaattttttgtggaagagagtgcagagaagcaggcaaaagccagggaatctggctcttccactgcagaagagggagatttctccaagggccccattcgctgtgaccgctgcggctacaatactaatcgatatgatcactatacagcacacctgaaacaccacaccagagctggggataatgagcgagtctacaagtgtatcatttgcacatacacaacagtgagcgagtatcactggaggaaacatttaagaaaccattttccaaggaaagtatacacatgtggaaaatgcaactatttttcagacagaaaaaacaattatgttcagcatgttagaactcatacaggagaacgcccatataaatgtgaactttgtccttactcaagttctcagaagactcatctaactagacatatgcgtactcattcaggtgagaagccatttaaatgtgatcagtgcagttatgtggcctctaatcaacatgaagtaacccgccatgcaagacaggttcacaatgggcctaaacctcttaattgcccacactgtgattacaaaacagcagatagaagcaacttcaaaaaacatgtagagctacatgtgaacccacggcagttcaattgccctgtatgtgactatgcagcttccaagaagtgtaatctacagtatcacttcaaatctaagcatcctacttgtcctaataaaacaatggatgtctcaaaagtgaaactaaagaaaaccaaaaaacgagaggctgacttgcctgataatattaccaatgaaaaaacagaaatagaacaaacaaaaataaaaggggatgtggctggaaagaaaaatgaaaagtccgtcaaagcagagaaaagagatgtctcaaaagagaaaaagccttctaataatgtgtcagtgatccaggtgactaccagaactcgaaaatcagtaacagaggtgaaagagatggatgtgcatacaggaagcaattcagaaaaattcagtaaaactaagaaaagcaaaaggaagctggaagttgacagccattctttacatggtcctgtgaatgatgaggaatcttcaacaaaaaagaaaaagaaggtagaaagcaaatccaaaaataatagtcaggaagtgccaaagggtgacagcaaagtggaggagaataaaaagcaaaatacttgcatgaaaaaaagtacaaagaagaaaactctgaaaaataaatcaagtaagaaaagcagtaagcctcctcagaaggaacctgttgagaagggatctgctcagatggaccctcctcagatggggcctgctcccacagaggcggttcagaaggggcccgttcaggtggagccgccacctcccatggagcatgctcagatggagggtgcccagatacggccttgctcctgacgagcctgttcagatggaggtggttcaggaggggcctgctcagaaggagctgctgcctcccgtggagcctgctcagatggtgggtgcccaaattgtacttgctcacatggagctgcctcctcccatggagactgctcagacggaggttgcccaaatggggcctgctcccatggaacctgctcagatggaggttgcccaggtagaatctgctcccatgcaggtggtccagaaggagcctgttcagatggagctgtctcctcccatggaggtggtccagaaggagcctgttcagatagagctgtctcctcccatggaggtggtccagaaggaacctgttaagatagagctgtctcctcccatagaggtggtccagaaggagcctgttcagatggagttgtctcctcccatgggggtggttcagaaggagcctgctcagagggagccacctcctcccagagagcctccccttcacatggagccaatttccaaaaagcctcctctccgaaaagataaaaaggaaaagtctaacatgcagagtgaaagggcacggaaggagcaagtccttattgaagttggcttagtgcctgttaaagatagctggcttctaaaggaaagtgtaagcacagaggatctctcaccaccatcaccaccactgccaaaggaaaatttaagagaagaggcatcaggagaccaaaaattactcaacacaggtgaaggaaataaagaagcccctcttcagaaagtaggagcagaagaggcagatgagagcctacctggtcttgctgctaatatcaacgaatctacccatatttcatcctctggacaaaacttgaatacgccagagggtgaaactttaaatggtaaacatcagactgacagtatagtttgtgaaatgaaaatggacactgatcagaacacaagagagaatctcactggtataaattcaacagttgaagaaccagtttcaccaatgcttcccccttcagcagtagaagaacgtgaagcagtgtccaaaactgcactggcatcacctcctgctacaatggcagcaaatgagtctcaggaaattgatgaagatgaaggcatccacagccatgaaggaagtgacctaagtgacaacatgtcagagggtagtgatgattctggattgcatggggctcggccagttccacaagaatctagcagaaaaaatgcaaaggaagccttggcagtcaaagcggctaagggagattttgtttgtatcttctgtgatcgttctttcagaaagggaaaagattacagcaaacacctcaatcgccatttggttaatgtgtactatcttgaagaagcagctcaagggcaggagtaatgaaactttgaacaaggtttca
